United States Patent Application Publication US 2007/0054278 A1 - sequence listing, part 22

SEQ ID NO: 93731 - DNA, 14852 bp, Homo sapiens
tttcgtgtaacacatgggtcttcatttctcttgggtaaataggcacaggattactgggtcatttggtaagtatatgtttatttcataagagccaagttgttgtcccgagtgcgtctgtcattttgcagtccaccagcgttgtgagcacccctgtaagttaaacaccacagtaggcagttgctctgtatccctgtcagcacttgatagttgcagtatttgttaactttagcttttctagtagtaggtacataacagtagctcactgtggttttattttcatttccctaatgcctgataacgttgaacatctgttcactggcttctatgtcctcactggtgaagtggctgttcaagtctcatttttaaaaatggaattgttggccaggcatggtgactcacacctgtaatcccagcactttgggatgccaaggtgggtggatcacctgaggtcaggagttcgagaccagcctggccaacatggcaaaacccaaagtgctaggattacaggcatgagccaccatgcccatctgttactgttcaatcttgagagttctttatgtgccactatggtgactggtaaatattttttcccagtgtgtagactatctttcttcttttagcactgtttttttcatagtaaatgtatttaatttttgtgaagtccagtttatcaatttattcagtttaccagtttttttcttatgtttttggagtcctatctctgaccccaaatcacaaagattttctttgctttcttttatagtttgtttctttgttttccccagaaacagggtcttgctctgtcacccaggctggagtgcagtagtatgatcatagctcactgcagtctcaaactcctgtgctcaagcaatcctcctgcctcagcctcccaagtagctaggactacaggcacaagccaccaagcccagctaattttttttttttgagacggagtctcgctctgtcgcccaggctggagtgcagtggtgcgatctcggctcactgcaagctctgcctcccgggttcacaccattctcctgcctcagcctcccgagtagctgggactgcaggcacccaccaccacgcccggctaattttttatatttttagtagagacggggtttcaccgtgttagccaggatggtctggatctcctgacctcgtgatctgcccacctcggccttccaaagtgctgggattacaggtgtgagccacagtgcccggccttgagttaatttttatataagtgtaaagtggggattcattgttttgcacgtggaaatccagttgtcccagcaccatttgttaaagatactattctttactcattgaattattttggcacccttgtcaaaaatcaattaaccatcgtgtgaaggatttttccctggactctcaatttttgcatatgtactcataagaggttggtctgtagtttccttaggttgtttgtctgggtttggtatcagggtaatactgccctcagagaatgagttgttaccttttacttcaacctacttgtatcctgttatatttaatgtgagttacttaaagacagcatataattaggtttttataatccaaactgataatatgtcgaattggcgtgatgaggccatttatgtttaatgcaactattgaaatgtttggctttagatctaccattatgttgttttctgtttgttccctgttttccattgctgtttcttctttccttttttccttccctcctatctctccttctccctatacacacacacacacacccccaacacacacacatagtggttgttctaggggttctaatacacatagtttttttgtgttttttttttttttttttttggagatggagtttcgctcttgtcgctcaggttggagtgcaatggcacaatctggctcactgcaacctccgcctcccgatttcaaacaattctcctgcctcagcctcccgagtagctgggattacaggcatgcaccaccacacctggctaattttgtatttttaatagagacagggttttgccatgttggtcaggctagtcccgaactcctgactttaggtgatccacccaccttggcctcccaaaatgctgggattacaggcatgagccaccctgcccggccaaatacacatactcttacagtcaatttagattaatgttttgccatttcaagtagcatgtagaaacctcactaccatctaggtcccttcacccttctcccctcatgttctagttgtcttacatctgtatacactgaagcctccatcagacagtatcatgacttaattcaaccatcacataactcttaaagaagtaaagaatagtttcatatttatgtggacttttgccatttatgatgttcttcctgcattcccaaagttttgaattgcccccagtaatctcttctgtctgaagaacttggtttaacatttttttaaagcagattctttggttatgaatttcctcagcttgccttcatttgagaatgtctttattttatttcattcttttattccagtaaaatagaaatttttactggatatagaattcttgggtgacagttatttcaaaactaaaaatgttccacttctttctggcctctatagtttctggtgaagatccagtctttcaaagaattgttcacctgaatgaaatgtatcgtttttctctggctgatcttatttttcttggtctttagttttcagaagtttctttatgatgtgtctaagcttggacttttgttgttaatttatccagttgtgtggttcactgagcttcttggtttgtaagtttatatctttttccaaactatcatctaatttatggactccatgctttgtcatttccattctgtttaagaatattcaccaatactttctgaaggctggttataaatagctgctttgaagtctgtatctgatcattccaatagttgaatcatctcaggatgggcatgtattgatcatcttcttttctcccatgttaagattttcctggttttcctacactgggttattttggataacctggatattttaaatattatgttgagactctggaccttgtttaaatcctaagcagaatgttgactgtttaaagtgtttgcactactagtcatattagtcctgtatctacaccggtcagtctgggacctgcaatgtgcatctagggtcagccctgtgcgcagcttggcagcaagccaatgacttcacatatcactttatcggatcactcacttcatctctcccttctctgtactctccctgaaacacaacagctccctgcaacatccctaccaagacctccagccacaaatctggggctctttccctacctaccctgctgcatactccctgaaactgcatccagggcccagcgcaggggggcagaaaggagctgcagaaggtggttgccccatgcttttggggccatggctcctctagacagagggtagcgttaccctctcaggtttcaagtgcgtacccagctcacactaccgtcactgtgccaccactgccacctccatgttactgcccaggagctggggtagagaagaaaagaaaaattggagggattcccccaactcactgacttcgaggggcttcacatcccactcctctgattcttcctggagctctttctgttggtgcacttgaggtttcaagccgcctgtgtgtccaggctaggcaatacttgttacctcaccacttctctgcggaactttgaatctgatctccttttcttatctgtctactgacagctgctcctgcatctgtccaggattggtggctgtcagtgggagagacatgggaagatgctccctccaccttcctgggaccaccttgttgactcagcagccttcctcgccgcccaccatgctatgccttcctggatggaggccctgagggtggcttttggttttcctacccctgtacccctccaagaaagctctggcacactgcagaggccagcaactacttgtcaaatgaatcaaaggaaagtcaagccggagccaagggtcagaagcaggggcttgcttccccgaagtccagcccttctttgggctcccctttcctttttgacacctcctgcttggttggcagtgaggtctcccaggtctgggggatccttgccactgcttctgcacccagccctggctaagcggccttgttctcatcaaagctgccgagacctgcagggtactcagcttctacttccactcctacacagctgcaagtgacttgaaaatatgaccatgcttcaaagtctccagtgattcccactgtgttgggacacaaagcccacctctctgccatgtgcccctgatggtcgctgccccagcttgtttgctttctgtagggcttgggtctttgccaacccctctacctgaattgctctccctgtaggactcatcatagctgaggcctttgcactccgctctttccactcacatgtcacctcagggctgtccccggcctctcctttcccatctctcccagtacattatggtccttccttcctagcatctggtgctatctacggtaggcatgtttagctgctggtacgatccctcctccactgaaatatgggcttcatgtctggcccctgtgggactgccagagcctggtcctcagtcatgtttagttgggctagtgaatcaactcttggtcaaagggacaaaagcagatgaggagatgtggcttcaatcaggatcagtgtggaacagtgagacctgcgcatggcactgctaggagggatgggttccacctgccagccttgggggtcctggcagccgacaggactttgcccactgggacttgtctgccaacctttgggtacagagccttagcttcacaggccccaagccaggagcccctccccaggtaggccagcagggatggagggaggcctgtcgagggtttcttgcacactcagatccaagtctcagagtggtggtccctctgctggcctctcacctacccgctcctgttatcagaagtgtcgcaggtgacagtgtggtcactggggtgggaggaaatgggaggccctggatggggcccatgcccaagggtctggccatggccccttcattagggccccaattgtgactttattgctcatagtctcttccctgccttggtggctctcatcccccaaacctgaatgcagaagtcttggtcctagactcaactccgtgccacccttcagcctacgttgtgggttcctgctaagctgagcatttacctaacaatcaagacttctgacagtcctcagtcctgcccccaaacccccttggatttctctttttcaaggtggtttcggctaggagagtgagcgtggcttgggtgagggcagatagggtgggagcatggggcatgtatggatgagaccttgacaaagggaccccggaggaaagacaggggccctttccccctttgtcctggaaacccggctcagccccagcccttgcccattctgctgctgctgcctggtaccttccacaaggccagactcctctccacaaagctgtggtctgcaccagctcctctggctctcctcctctgcctgctgagggccgcctcctagcctggctgccaatcacaggagaaaggggttgggattttgtttgtgcctctgtctgagcagagaatggctgataggccactgagcgttgccctggagagcccctctgtccctgctatccccatctcccctggcccagacttctgcccttcacgcccatccctgaccagcagccccactcagtctgggctctgggtgccagctggttatagacatgccacctgaacccaggccaggagctggtggatgcgtggggctattttaagcacagcctcttggcctgcacactcccctggcccccagcccccagcagctcagctactggtcacctgccaccgcctggaatgctgattggcagttggctggggtgggtgggggctgggaagacactattataaagctgggagtgttgggaagcagccgtccccgtccagagtcctctgtggtccctgctgccaccatggccactcaccgcctcgtgatggtccggcacggcgagagcacatggaaccaggagaaccgtttctgtggctggttcgatgcagagctgagtgaaaaggggaccgaggaggccaagcggggagccaaggccatcaaggatgccaagatggagtttgacatctgctacacgtcagtgctgaagcgggccatccgcaccctctgggccatcctggacggcacggaccagatgtrgctgcctgtggtgcgcacttggcgcytcaatgmgyggcattacgggggcctcacagrcytcaacaaggcagaaacggccgccaagcacggggaggagcaggtgaagatctggaggcgctccttcgacatcccgccgcccccgatggacgagaagcacccctactacaactccattagcaaggtgggctgcctttgctgggaaggcctctgggaagctgcagagtggggagtcgggtgggggcccactggcttgggagggaaagcagcgtgcctgtgtcccccaggagcgtcggtacgcaggcctgaagcccggggaactccccacctgcgagagcctcaaggacaccattgcccgggccctgcccttctggaacgaggagattgttccccagatcaaggccggcaagcgagtgctcattgcagcccacgggaacagcctgcggggcattgtcaagcacctggaaggtgaggccaccttcaggagcctgggcagggtgggtgggcagcagccccagctggcttctcatctcagcaaagtctctcgcccatggaccaggctttctaggcgtggggctccacatcattcactgaaaaaggagggctgagaagccattttttagttttgtgaaattttccccatttctgtgtaactgggacacactccacaggggctgactgcactcgaagctcgctgtgtcccgaggtggggcaggctccaaaggtggcatctgccaagggacacccagctaggaaacggaagggctgggcttagagcatctggctccaaatcccaacttactgtggggccctggacaagccacctccatctctgggcctctcccttttccggggtggtggggagctccccctggtactgaattcctcttgatgtaggcttggacccctcgcagggccctcccccatcaggtcctcagaatccctgcatgagcttcaccacctatctccctctggagcccctctctgggcaaaggaaagaccaatcaaaagaggggtgcaggactatggagtggccagactctgggcttgcagctgggctcccactgaagagcaagggctgacaaatgggcccgggatgcatgggcgcagtaaggcctcgcccagagtgactggcacctccgctccgcctcccaccttagtattctgacacaagggcagtctaaattagcatctgaatgaccttaaagcttgttgagtcctggaaaggctagaagggtgtgccccagacctcctgctcctagggccgttgggcagttggccagagcacccagaccggcaggccccggagacccagccagccccaagcctgcccgctccaaacacggacacctggcacctggcactggggccaggcagagggaaggaccacctgcctcctctcccttccggagacttcatgcagccccatgaccctcccacagcctggtttggggaaaggggacgcacttttggtggtgaatatgagggatttcactctgactccccagagaacattttcttaaaccctcctgcacggagcaggggtggagtggcgcgaacatcaaaggtcgagctgctattcccagctcaggggctgcaggaggcaggcagggtcaggtttcgaccaggctcggcctccctgtccctcctccagctccattccgcacttgctcctctgttcaggatgtctagaatttagagcactttagaaaccaaagggtgctgggcacggtggctcactcctgtaatcccagcactttgggaggctgaggcaggcagatcacctgaggtcaggagtttgagaccagcctgaccaacatggtraaacccgtttctactaaaaatacaaaattagccgggtgtggtggcgctcacctgtaatcccagctacttgggaggctgaggcagaatcacttcaacccaggagatggaggttgcagtgrgccaagatcgtgccaytgcactccagcctgggcaagaggagtaaaactccatctcaaaaaaaagaaaaagaaaaagaaaagaaaaaaaaaaaccaaagggtgagtgtcccttcctgaccctcaacttcagtctggctggagtcacactgggctgagggaactatggacagcaccaccacagatcacagccacttgggtggggctgaagtccccatttttttcaccactgggctatttctgtaggctgcttggtctaactcagttactccttgacctttggcaacatttctgtggcctcgttctcagggctgggaaggaattggtgccaggggaactggctctgtggaccataaaggtcacatagtgtctgctgtgtaaacaggctggggacagaggggctaaggacacctattccttccggcatagggatgtcagaccaggcgatcatggagctgaacctgcccacggggatccccattgtgtatgagctgaacaaggagctgaagcccmccaagcccatgcagttcctgggtgatgaggaaacggtgcggaaggccatggaggctgtggctgcccagggcaaggccaagtgaggggtgggcttgggcaataaaggcacctcccccaacagcctggagtccagcgcagccgtgcatgccaggctcacaccgccatcagctgtggggactccagaaccaggggtgcagccacccaccctcccccactccatacgtgtgtcaccaggggcaggagcctagtacccacacctagtcatcaggacactgagccagggctgcaaccactccatgagtttgcagtcaggacaagcctgtggtgaccctgaagcttcagagccacttagtaaccatgctccagaattggcgtgcttggggccagttagaagaggccaagtgacccagctctccccatggggagcaaggaccacagcccaggacacggcttcctggacagcttcctgcagagggcaggtggtcctctgctgtccttgcaacccccgggtggcactttgagccctgcctcttgggttgggacaggcaagcccacagggggcctcaaagctggcaacagcccaaacctgggtcttccatgggagtggaggggaagttccctcttcatgggagaggcaccaggaagccctggcgaaaaggggagaggcctgagcacaggaaggccaggagcaaggttgggctccatgcagccttcaccccaggcactagcaggtaacaccttgagtcaaccgcctagcagtctgcctagcagctctggggcacaggagggacctaattccccggatgctcagtgggtgccaggtacctgacgccacacagtgggccatcccatgtaggcagaggctccctgaagctgggagcagggcagcccttggcctctcctagaggaactggaacgcaggaaggctccaacttcagtcccatcttaacatttagcctcttcctggtggctgatcatcatcagccacagtctcagggtgagggtgctcaccccagacacggagcagaggcagacactgggcaggtggtggggtgctattcccacatgggagcattcaggctacagcaggacaggtgagagctgcgagcctgtgtagaccaaactgggaattcgtggtccaaaagcatatttgttcttcagagacacggatgagctgggacagaaaataggggaagacaacaggccaaggccactctgtgttacttttcctgaagtcagaatcagttgaggcacacactggggcctgcaggcatcgagtgagccgcgtggaggaacatgttgtgtctgccgtttttgaatacccagggtgggagcttggccatctgcatccccacttcccatagcccaggcagagggacagagaaatggagtggggagcacagagcaggctccaacaagacaaattccctgctgccaaaccacmatgatccactctgactttggtcacaaactctgctaaaaacaattctctacgttcactgttcccaagggtcattctaaacagtggtggccaccaccccttagaagcaagagaaaaagaaaaaaggcaaataaatgcagaaggcagccagagcctcccagatgcccctgctcaggacccttccccgcagcttggcagtggccactcagggcttggccacaggcagggcttggctcagtatcctgtcaggggcaagagccaagctgtctgggagggtcgggggatgcaggaaggatgtgtgggaatcaccaggccattgctgcatttggggtgacaggctgagtctgccaagccggagggagccctgaggcctcatcctcactgggggtcctattcctggaagagtgctgaatgtcaactcccaggcctcctcttccagcaataaggaagccatgtctgagaggggaagggcaagatgtgccctcagcctcactcaatgagctccacgtagttggcagggaacatgccaaaatggccatccggcccatagccacgccaccagccttcgtcgatcacctcgatgcccgtgatgaggttctcggggtcaaaggagatctctgtgtcgtcggctrcaaagaggatgagcccagatgcatatcaggggctccctcccacatcccacctgctcgggcagcccacggcagccccacactgctgcagcacacctcgctgcagctctggttcctcctcagaaatatccctgccaccctgctaagccttggccaacactgcaccctgtcccaatgcggctccagtgaccacacccccagggcataccctcctacagagcattcccaaaaaaggctagagtagacaccagcctgctccgtagggggcctccaccccattctccaaggcctccacccagggamgcctggtgaaccagcatccaggcctggcccacctccctgctcagagtccatgttctgtgacaagggtggcaactgggattcacatcagcggccagcaaatagctaatgaggaacatgtagggaggcctgggctgtgcagaacactctagtgccacagtcacccccactccagaggtgcttctacccctaaacgcaccgcccaccctcctgtcttctcttcctgataccccctggtgccatcttcccataaaaccccagaccctcttgtctcctaacctcaggaccctgtggtctgtgccagccaggccagggcaccttacctgcctggtagtcgtacagggcacgggcacagagcccttgcccactgagcccctggccctgaatgtggtggtcaatgtgctcagagccrgcaccttgctgctgcacctgcccagggatgacaaaggtgttaccccagactcagcccttacacacaatcgctgctctgccccacatggctcaggtcaagctgggagtacgcagagggcaagcagtctacaggctcgggggctgggctgctgctgtccccgccctaccagagtacagaagccacaggacagtgcataaatccctcagccataggctgcaaggtcctcttcccacccagcacctcctatagagtggggcgtgccctgacaatttataacacagggctgctccaaaaatgcatgtgctttaaaacctgttgcatgcccccagaaaactcaggcggcccgtgataagtgttcctgagtatgcagccccttcctggccccagccccagtgtaggaacccaccagtgggggctgctcgtagaaggtctcctgctctggaggttcctcatacacagcctcctcttctgcctgcaccagacatggaggagtgctgggcgccggctcctcagcagggagatctgcaccagggaacacagcaggttctcactcccacacatcccccttctccactgctgtcccccagggtccccatggggtgacaagcgccttgcctgccctgggccttgagatggcagcagctggctctctgccaaagtgggtctctggttgggtgagctgcttctgcaggaaggggctcctcagcttgcctgcaaacccgggtaaatatatacatcacttcagaaacaccaccasacacccacgcaccccacagcaccctccaccctggtgtgctcgaggcagtctcatggggcttgctcttgctagtgcaggaacagaggccccagggccatgtgctatgtggtgacgtggtagacagcgcagcccaatatcttttggaggccaaactggtgaccagtgtggtcactgatgaggtcaatggccccaggtgtcccttctcctcactcactcacccgtcaccgatatatctgtcactagccttgggggagcccacataggaccccaggctccccctcagcctgctgctgcctcatggccaggcccaaagggagagctcaccaggctgaggactggagatggaggtggtggacatggccctctccttctgcttgaaaatctccctcgggtgcacggcagactcctggagggaagcacatgttgacccctgcagtgggcaaaaccttcaccacctctccccagatcacagcccctccagctgtcggcccagtagcccctcaaaggtgagtgtggggccaggaggcaaaacatgttctcaggagagaagtcatttaaaaataaaaagtaacgttaaaaaaggaagtaaaacacagaagccaaggggctcccagggcctcccccaggaccaggtgtggtccaagcccgacgcttccgcctttggctttcctctctactgccacctcttgaggtgcccagattccaacctgccccagctgactgcagggcagcctctgcccaggtctgggctgggccctcaatccgagatcagggacttctgcgtgtggccaggacaggtccaaacaagtagagcacccccatcttacctgctcatttcggttccttgaaaccacttcttgctgctgctcccacgtcctgctgggaagggccgggtggggcacagctgaggcacagtcacagcttctcatgccacaccccttagtcctcctcgcctccatgggatggagcaggtgcccagcaatgcctcagggtgggtcccccaggccagcctccacctctggctcacctctgggggctggcctcgccaccctgctcctgatagcgctgctcccggcgtgcagcctcacgcagctcacgctcccggcgctcctgctccagctgccgctgtgcctcctcggcccgccgcttttcctccagccgacggttctcctcctccttctgcagggagagccactgcccgctcagccctatgctgccacttcagcctaatcccctgcccaggactgagttttaggcacatggccaaagacgggcaccagagccagtcgatcattagccttgtggcttaacttacccgagcctcagtgtgaccatctgtaatgggcaccaaggagagtggatgctgcatgagctcacttgtgaggaaagatgagccacagcaagcagaacactcccacgtgcccagcatgccccggggcagcactcacctctgctttggcccagaagctgtctttaccaacccttttaatctcagacacggcattggtcttctggtacacagagccctgtaggggacagcactcattagagacctggacccaggtggaaggccaggcccacaggcaccaaaggagagaatacgctaaacttgcgacagcacaggtgagtgctgctaggactggacccagcagaggcagcagagcactgcccagtgaccctcaaggagacacacaccaagatgacctgaaagaagcccaggacactgccccaagggggatgctcaatcccagacaacactagaggggtctctggtggtctctcgccctcatggatgggggccagggcaagaaaggcccccataccccacctgcagactcctagacattgggcagttctgaggcaggcctctgaccaggggcactcagacagctgactaccacaagagcatccaaggaatcacgtccaaccacacgcatgcggacgcagctcccagccatcagctccacacagcactggggccacaggcccacaggtatctcccgtgactccaaggggcctgctctggtttcaggctccgccttgatgcctcctttagttcctccacggtggctacctccaggggcagcccaagatgttccagtgccatgaccttgagggcagccagactatcatagccatgcatgctgcagagcctccactctgaccacacaggctgggctccagaggaaggctccagaacagctagtccaacccctaggcaaggtcagagggctattcctgctcatctggtcagtgggcaatcaccacagctcaggggttaccatctgcagaaactaagcaggcatgggcccagccagcccgggtgctgggaagtgcatattcctggccccctgcctcaggccctgagcaacaaaagggctggcgatgggcaagcagcactcaccactggggcctggggtcccaygtcctggaagcggccactctccttgtgaaagctgtagttggcacctgaagccttggccaccttctccatgatgcactcaggctccacatcctcctcggcccgtgcgttgatggtcacatgggccccctgcagcaggagcagcacttgaaagaagggc

SEQ ID NO: 93732 - DNA, 18187 bp, Homo sapiens
cggataccacacccgccccccagacaccacacactgtacacctccccagacaccacacaccttcagacaccacacatgccccgacacaccttcagacaccacacagccccccagaccacacaccttcagacactacacacacccccagacaccacatacacaccccaaacaccaaacacccagacaccagacccccaaccacacacccccarccacccccgccagacaccacacccaaccacataccccaccasaccccccagacaccagaccaactacacacccccaaacaccacacccaaccacacaacccccgccccagacaccacacaccttcagacaccacacagccccctgccccagacaccacacacaccgaaccacacacccctatacaccaccaccagtagacaccacagccccctagatactacacataccccccattaaccccccccagacaccaacccccaccccccagacaccacacacacacacacacacacacacacacacacacacacagcaccccctcgccctgcagcactcactcctcgtcccgagcccagcctgggcgctgcgtcctcccatcagggcccgtctggctgactccacacccccgtgtgctctaagcttcgctgcgggcctgctctgagttcagaggcacgtctgaaaaacgtatttctggttttaaattcaacaaacacaccacaaacttgcactccatgaaataacacgctccccagttcccaatcagccctgaatcttcccaaaggtcccaggccaagctgctggggactgtcgaggtggtcgttcatgccacctactgtagtggttggcacagatcttcagggtcttgtccctccgcatgaggaggcggatggcccctttctccttgtgcttcaggagcttgacgtcaccagtgcctcgctccttccattctgggagatcgttctcagaggcaaatcggaacagttttgcccgcctgcaagaaaagccgtgaggttaagagtgcagacctgcagcccacatgcagggcctgcgcaggaggacacaggacaactctgcactgcaggaccccatgcctccacgaacgccccagcccttcttcaggctccaagaactgcccgtcacaacaccaccagaaagcgcagcagcccaacaaactccaggtcatcttgaattccggttccacaaccaagagaattagacgaccgggcgcggtggctcatttgtaatcccagcattcggggaggccgaggcgggcaggtcatctgaggttaggagttcaaaaccagcctggccaacatggtgaaaccccatctctactacaaatacaaaaatcatctgagtgtggtgatgcacgcctgtaatcccagctactcaggaggctgaggcacgacaatcacttgagcccaggaggcagaggatacagtgagtggagatygccccactgctcctacagtcacaatatttccctcagtggggaccagcctgggcaacatagcaagacactatctctacaaaaagataaaaattagctggacatgatggctaacacccgtagtctcagctactcaagaggcagagggaggaggatcccttgagcgcaggagttcaaggctgcagtgagccatgataccactgctgcactccagcctgggtgagagtgagaccctattttaaaaaaaaacaaaacaaaacagggcacagtggcccacgcctgtaatcccacactttgggaggctgaggtgggtggatcacctgacgtcgggagttcgagaccagcctgaccaacgtggagaaaccccctctctactaaaaatacaaaattagccgggtgtggtggcacatgcctgtaatcccagctactcgggaggctgaggcaggagaatcccttgaagccgggaggcagaggttgcggcgagctgagatcacaccattgcgcaccagcctgggcagcaagagcgaaattccatctcaaaaaaaaaagagagagcaggcgcgggggctcacgcctgtaattccagcactttgggaggccaaggcaggtggatcatgaggtcaggagatccagaccatcctgactaactcggtgaaaccccatctctactaaaaatacaaaaaatcagccaggcatggaggcatgcgcctatagccccagctattcaagaagctgaggcaggaaaattgcttgaacctgggaggcagaggttgcagtgagccaagatcgcgccactgcactccagcctgggcaacagagcaagactccgtcccatggtcactgtgcaagagcaccccagccccagagatctgcagggacaacatggatcaggtgcaggccaaggacctctgtcacgacaccaccaggaagcacagcagcccaaaaaactccaggtcatcttgaattccacttccacaaccaagagaattagatgaccggacgcggtggctcacacctgtaatcccagcattttgggaggctgaggcgggcgggtcatctgaggtcagatgacccagagaagaggcccaggcctctaatcaggcaacaggccctggccaacacctggccctcctgcccaggagcagcccctcccgctggggaccagggcacccagaatccagcagtgcactcagggctcaggctggcgccctccctctgtgcacagctctgcctgcctctctcagacgactctgctctctgccccaacatgattctggcaagagactgtctcacagggttccccaacaggatgcccctggagctttactgcaaagacccgggcccaccctgctggcctcacctccctcaggaagggcctgggcccaggccaccaggagcacctcccacccgacatgggcagtgagggaacagaggcaagcacttcaccacagcaaagagctactcccaaacaggggctacggcaatgcatcagcagagtggagccatggccacccagtggtttcagggagatgtccatcaccctctgtgaccaaagggtgacacacagctctcctttcccaggtatccctcctggcccccttccttggataggaaactcacagtaggaatgactctctctgcttccctctcccaccccagagcaacaaaaccttaacctggactcttaaagcaacttcaaggatggggggattccatgaacttgaacagggaaaaactacaacctcattttcactgaggtgtgtaactaaacatgatgtttgttgcaatcctgagtgtaggcgacaggccacagtctctgtggtgctgtgacactgtcacaagacacaaggctggtacccaccactgtagccagctcttaactgaaagcgtcaagaagcacatgtacagaatttttttaagtggttttaataactaaaccatcacctattttcatgtgttatcgcaagcatcatgttgtatattaagggtgggccgggcgcggtagctgacgcctgtaatcccagcactttgggaggctggggtgggcagatcatgaggtcaggagatcgagaccatcctggctaatacggtgaaactccgtctctactaaaaatacaaaaaattagctgggcgtggtggcgggtgcctgtagttccagctgaggcaggagaatggcgtgaacctgggaggcggagcttgcaatgagccaagatcgcaccactgcactccagcctgggcgacagagcgagactccatctcaaaacaacaacaacaacagacaccgggtgggggatttataagcttcacgatgccaaagaagtctatgctgcaaaaacttaaaaccccctgctcaaccaagggactccctggatcctcagaagccagtggcaaaaaagggcagtggggccgccatgccagtggacagagcagcaagatgggatgcccttcatgcaactggctgcagggcagcaagggcatctggtgaagattcatgaaaggaacgggttaaatttccacatgggattagtcaccaactttaggccctttctttaagcagcctcagtctgattaaaagtcaggccaaaacctggacacccataaaagttgtaacctcaaccttaaagagtcctatttctgggacatcagcctacttacattttaaaaagttcctcttcatcttcttccagtgttttaatttcttgctcaggaagagaaactattggctcaaactgagggtcatggttggactcgtctgtattctcagtggaagtatcatggtcctcatgagtgtcctgtggagatacaaagaggttacactgctggcctatggatctggctcacaaccagagcccaaccagtgcctgcagtggtcagccctccgacaatgaagggacttcagatacaaggatgggcccaaccccaaagcaagaaattaggcccactcttccacactaggaaagctctgcgtttatgcccagctccatgtgagcacagagtgagacaccagaacttggggcccctcccccagattcacagacatcaatcagatctgtgcacagactgatgggggaccctacaagccgccaacacttgcagagagtggcctggcagaaactgcctcatctctttgagcatcagtttcttcctcatccataaaatgcagatgatacctgctgtgtgaagatcaaaggacacaatgatgggtcgaaatagattttgaaatattactttaaagcaaaatgtaactctttcagttttgactaattaggaaatagttgtgctcttgcttagtaaaacgaaaaaagtcgctacaggactgctagtatttacactggattcacagctctgccagcaattttttcacagttcagaaaactaagttaataactagataaattgtaccggtgaaagtcatgaaatcctggcccaatttagaggataagagagcaccaataatcatattttaggttcgagtcttccagaacacatgccttggtcacccagaagtccgtaagagacccaagacttcaccactagactcaaactggaaaagaaaacataagcttttcgctgctcttcactgttccccacagcactgcggctctgcagcggcccgcactcaaccagacaccgcagccaacaaagccgccgcctgggtcggcgcatctaggacctgtgccccacgcwggaacgcgagcttctgccacagaggccagtggcggttccagacgtaagaaccgaatgaatgaagtgctgcgtgggcgacggaaagaataaatgcaccgtactagtggggagccccaagtgggccgagccggaggaaacccgccgcccgcaccagttcctggaggctggggccgtcccgcgtggcgacggccgctccccaacccaccccaaggtcacgcgggggccctgcagcccccaggcctctgcagagcctgcacccccaaacgccccaactccgcaggcctcgagcccccaaaccccacgcgccccgactccgcgccaccgaggcccagcagacggccgagcctgcaggccggcggaggttggtggcggcggcgcgggccgcccacgtggccgctgataacggccccggccccgcccgcccaccctgtccccgcttgggcccggcggcaccttggcggccgccatgggggcgcggcggcggcggcggctcggctgggtcggtcgtcgctggctccgcggcctctcggcggctactcgtagctccttccctccgcgtctggcgccggcgcctcccgcccgcccgctcttccctccgccccacgacccgaacctygacccctgaccccagcggcgggaaacgcgccgcgattcaaaaccagtacagctttattggctcaggaggcggacactctcattgtccggcccgccccgcgcttcccgccaaaacgcccgcggcgcatgcccggcccgcccgtcagccagaggagcgcgcactcccggcgacmcccgcgcgcacttccgtcccggccacgcgcgccgctagagctggctaaagtggttgggggttggatccggcgcgtgacgatgacgttgccagaagccaggatcatagagacgctcggcctccgccgcacgcgctggcggactaagagtggctggcgaagcgagcggccggcgcgggcccctggcgggcgggcggtacagccccaagcctgagacccggacctgagcatcgcaggttcgagtcccgccccgcctggggcgaagccgggggtggcggcgacctcgcggcgttgcaccggctctgtgagcacctcccctctgagcacttcccttgtgacaggccacttcccttgtgacaggcccaggacgaggtggccaggcggcccccatggcgtccctggtctaggcggagaaccgcctgggcgatgagtgagaacctcgacaacgaggtagagtgcggggagacgctgggtagagacggggatggggtgggaggaggcggggtgggtcaggaaacctgccagagaataggtggggacgaggcaggtgcgatrggggaggaaaggaracgggaatggggtcgggagggtagactgggggaggggcagggctgagtgcaragtgcaccgacggaggtctgggtgtcccataaggaagcttggggggccaggcccccagggcctagtcctcaccctagcaccccatctgtccccacacagggcccgaagcccatggagagctgtggccaggagarcagcagtgccctgagctgccctaccgtctcggtgccccctgcagccccggcagccctggaggaggtggagaaagagggcgctggggcggctacagggccggggcctcagcccgggctctacagctacatcagggatgacttgtttacytctgagatctttaaactggagctgcagaacgtgcctcgccacgccagcttcagcgacgtccggcgcttcctgggccgctttggtctgcagccccacaaaaccaaactctttgggcaaccaccctgcgcctttgtgacattccgcagygctgcagagagggacaaggccctgcgcgttttgcatggtgccctctggaaaggccgcccactcagtgtgcgcctggcccggcccaaggccgaccccatggccaggaggaggcgacaggagggtgagagtgagccaccagtaacacgagtggccgacgtggtgacccctctatggacagtgccctatgctgagcagcttgagcggaagcagctggagtgcgagcaggtgctgcagaaacttgccaagtgagtgtgggcgcaagacgcccctcttggccagggctctgcccggcctgtgcttcctcagcctgtccatgcaccagttgggaggcccagcacaggatmtggcggcccctttgggagctagccagcaagacacccacgtcacagtgggcacaatgacatcccaaaggaggggtcaggagcctggacatttggggagtggcctggcatgggtcgggggcagtaggtggagtccaaccaccgatctgctcctcttacagggaaatcgggagcaccaaccgtgccttgctgccctggctrctcgagcagaggcacaagcacaacaaggcctgctgcccgctggagggggtcaggccatcaccccagcaggtcagrctagacttcggtggccacaaacccctatcctgggttttgaaaaactttgcttttgctcacccttcctgttgatctccctgctttgtgttttcttctggtaacatcacatagttgtcagctgttcctcttgtttgactgccagcccctgtggggaaatcagggtttccaggcccaagygctgggcagccagggtaaggtgcagctctctctccctgcagactgagtatcgtaataagtgtgagtttctggttggcgtcggggtggatggggaggataacaccgtgggctgtcggctcggcaagtacaagggcgggacgtgtgctgtggcagccccgtttgacaccgtgcacatccccgaagccaccaagcaggtggtgaaggccttccaggagttcatccggtgaggacctgtgacggggctcccgggaagtcctatgcrgtgtgggagcagagggtggtgatcctgccccgggaattctggagtgcctgccatttcasccagatgaaggaaggtgtggccagaggagagagcagggggactgcttgcccagttgtgggcacttgggccagctcgtgattcccacaggtccactccatactcggcatacgacccagagacgtacacaggccactggaagcagctgactgtgcgcaccagccgccgccaccaggccatggccattgcctacttccacccccaggtctcaacgggggccctgctgggggagggtgcctagcctaggtgggcctcagcacagcctgatgggaacttttcaccacttactccagaagctgagccctgaggagctggcagagctgaagacytccctagcgcagcacttcacagcagggccaggcagggccagtggagtgacctgcctctacttcgtggaggagggacagcggtaaggagcccgagtggggcggggcaggtccctgcagggactgtgacactgaaggacctgcaccttcgcccacagaaagactcctagccaggagggcctgcccctggagcatgtggctggggaccggtgcatccacgaggacctgctagggctgaccttccggatctctccacacgccttcttccaggtagccrtgagtccctggtgggcatggggacatgttgagggaggcctgacrcaccatcaggacgtgatgggaacagtgggctcaggcggtgagatttgggggagtatccaggcaggtgagccacaggggagggtgaagtaagaaagaggttggtcatcactgatttgactcgggataacctagaggtacacacggcagtggcccttgtcacagggaggatgaggagtggccctcagtgcattaccacagggcactgctctgggctcggcaggagggaggccatggtggcctctgggctgggaaatactgtttcactgtttgctcactgctgcaggaaggctgtggggacctggagcggccgtttttggagacaggcctggcaggacctcctggagggctaggtgtgggggtgggagctgcagttgggtgattccaggggccccggtgtgagttgtgggaggcaaagcccccttgctggggcagggaaggtacagcctattggcctgcggggcctcatgagccctcaaccaagtggggcaaggaggaggctgtgcttagcacgggcttggcttttaaagccaggggctggatgagggcatcagcaaggctggtccaaggtggggtcagggaagacgttgggcaccaaggtggggagtgggcgccggaggtcccggcaggatggagggaccaggaatgtgggcgtcggggcaccagtggcaccacaggagaggagccactgacatcctgggcaccgcctgcccccaggtgaacacacccgcagccgaggtgctctacacagtcatccaggactgggcccaattggatgcggggagcatggtgctggacgtgtgctgtggcaccggcaccattggcctggccctggcccgggtgagccctcctgccctgctgagggcaccctctccccaccccaagacccccattgaccccagctcaaagtcaccacagctgactccatcatgccccaggcccagctcctctttgctgcccacagggccccatgtactcccctccctgggtggggcgacaccacgctttcctgtttcagaaggtaaagagggtcattggggtcgagctatgcccagaggctgtggaggacgcccgggtgaacgcccaggacaatggtgagtggcaaggccgtgggtgggggtggggatgggggcagccgccacccctgctgcaagcctcagccacagccagggcttgggggctgcccgacaggtagagcaagtgagcaagctctttggctaggggttccccagggctggccctgctgggagggcatgtggccctctgacaggccacggtgccatctcttcagagttgagtaatgtggagttccactgcgggagggccgaggacctggtgcccaccctggtgagcagactggcctcccagcacctcgtggccatcctggacccaccccgtgctggcttgcgtgagtggcttttgcttaaggaggtggcacgggaacgaggacacrtggggtggctcaccatgttatgcactctctggctgtggggacccagctggtgtttgcctcctcagattccaaggtgatcctggccatccggagagctaagaacctcaggcggctgctgtacgtctcatgcaacccccgggcagccatgggcaactttgtggagtgagtgtctgcaggggcctgggtrggggctaggcctgctaccaagyccccagctcccacaggagcccctgattagcctatcggctgaccttagcgccccccttttccccccacagcctctgcagagccccatctaaccgggtgaagggcattcccttccggccggtcaaggctgtggcagtggacctgttcccgcagaccccgcactgtgagatgctcatcctgtttgagagggtggagcaccccaatggcacaggggtcttggggccccacagscctccagctcaacccacaccaggacccccagataacaccctacaagaaactgggaccttcccctcatcctaggcccaggacccattatggggacaggagctgaagggctcccagggccccaggggcggggaaggcatggcttgctggccaggatattcagaggtaggcagccaaagggcacagaaccctgtgccccaccaggattggcctgctgctaggggccaggggccctgaccaggaagacaggtgggttcctgtagcctgttscccatccccagggcctttgtggactagccaaggctgtgagggccagaataaacaactgctcaacaaagggtgtttctgtgatgagagccaggggtctgaacacagggcctgggtgccagggaaagggccaaactaggcctaggcagctctgcaagcctctctgcatggctgggggagtcagggcagagcttactttaaaaaagaatgttcgatttgatacttaaacttgaggagaggcagagagaggtctgggaactgcaccagctgggggcatggggtggagaacactgggcagagttggcccctctgtggccagcctggccctcagcccagcagagagggcatcaaccaaggaaggggccatgctggggtgctgctcagctgttacaaaggcagggtccagcctgcagggaggccccaggaggggatctggccagtcaagggtccacagggtgccagcctctcaccctcagaataaagacatcagccattcccttctggacagtttgctttatgtgttcagacaatcaaggctcgccttccaggcacagcccagtgcyctggatggcatcagcacaggctcccctgccccggccttgaagcatggctgtgtgcacgattcatacccatgcttggcagacgggtkggggggggggggggcgcacagagaccacaagagtatggcagcacctgctgtggtggtgcctgggaacagcaagacacagcgaggctccccaacctttaggggaacacatgtgcacgaagctttggttcacaggcgcatctggctggctaagggcaacagtcacagtcaaatgactattcacagctgcagacaggaggcaagacagaagcaagtgtctaattatagcaatttgagttgagggtttcwtttttaaaggtcaacagaagccaaccttggtcacacaggtagtgagggaaggatatgttgtgggcggcccacaggccaacattgttttcctgacagaaaaaaaaaaaaaagcgccrtcagtaccgcctgtagggggcatggtgggggacagacacggcagaacgctggactcttgcttcagatggcgcaccacaagcacacggcactctgcacaggtgccagtccaccaccagggccagcctttgagcacaccctggtgcctcagactccggcaggaacacatttccatcgcacacccacccataggggccaccagtcgagaagcaagctgggcaccaggcagctgcctttgacatccagagaaaccgctgtcacaggcaacagctctggatcaagaatgggctacactgaaggcccttgcttcctgtttcaacaagtccacttgctaaaatgcatgattccaaatctaccttctactctcactgtgaaagtctttcaaaatgctaaaatatcacaaaagctttaaaaatcaatgggtggacatatggactcgactgcaaaaaatctttgtaaaaaactgttgccggaggccaggaaaggcagagagggcctcagtgtccaaagaggcgcttttagggaattaagacttcatcagaaaaagggaccctaggaggccagggtaactccaggaggtggcaggacgtcatccttgctggcatcgtgtccagactggagagggaccaccttgatggtttgcctccaatcccagaaagctagttctgatgctaaaattctgtttaagccaaaaaggtttaaaatattcctttctcttctaccttttcaaagaaggggaaacacagagggtgggtgagggcagggcaccatgtgcacctcctgaccaggtccctgtagcagccctgcaggcgccctgggcacatgggccacctggcatcacgggccagccacaggactcagccatcccctctcatctgtcatccaagcatcatgtgtcgtcagtgcgtattacatactaaaattcatgaaagccttcataaaaagagcctgcagcaggtgcacagaagcagggtccaccactgtccacagtcaccagctgccactggtgcagtcgctgagtccatccattcaggcctggagctttccagggagagccgctgctccacatgtgtgctgtgtggccatggctgtccctgtacactaaagcctccaccctaaggccgggcccacaggttggccacagggaaggagcgtgggttggaggcctgacactgtggtgcacgatgcatgactgctggtctcctcagaagtgcggctggcggcccccgcgccctggcccgtgccacctccctcacacgtccacggtgcacaggggctcaccgccaggctgggcggacgccacaatggacatcttgggcttctttcgagtctcctcctgaaagaacaacaaaggtcaggggtaccagtgaggtgggcttggcagaggctcgggaagacacaaggtggagggagagcccagcagatcatgccaggaggccctggagccccaacrgcaccagtgcttgtgatgccaggctaggaggagcagggaaggcctggggcaggccagcctgagattgcagaggccccctgcattgccatcagagtacaacatgtgcagcctccctggcaatcaggacatgtaccaagaagtgaagaattttgggtgcagttacagggacaggccaggcctccccattgggtgttcctcccttgcccagcttttgcttgccccaggcccagccaggagcactatgtcctgcacctgctgcccttgagccccacagcccctcttccgaccaggggcaaaccaggcagtcccactggctccaggaggccaagccccaccccagggagcagcaagggacctgctggcctgggcggcagcagatacctcctggggctctcacccaggccaggggactgccacacttaagaaagctcccacccagaaggcccaggtgggcaggtcacgccgtggccaggcagacgatgcctgaagacagaagacaccactgccagcctgacaggcccctctttgagtggggttcccaaggtggctttaggaggcttcatcaggaccaagccctacagattcaaccctggcaggtgcactgacctacctccaaacacccagggaggacatgggactcaggtggcccaccaagactgtgaccttcatggtccaccaacaggctggcctgccagctctctaacaacagaaccaaaactgaagtgatttataaaactatcacacatgtcgaagctcaaagaaaagcctgtatctgattttggaaggaggatccaagcatttccaaggtgtcagctcaggcacgggtcctggggtctgctgtccctccacaggtgccacaggaatggccgtggcccggcagccctcccgctagggtggcactcaccctttcctcagctagcctcttcatctcctcttggagcttgctgaggatgtgcaggttgggcttgttcttcttggcatactgctgcagctcaatcacactcttgtccgatgtctcctgggaagtatagcacctcacgctcaggactgcaggctgtagctctacggcctgcccgctgcccagcagctgtgtgcctgggaccctgaaggyaggcgygcccagggtctggcagacacgaaacagccaggagctgtggcaacataactgcatgctgactggcccgcctcagtgatgccaggcccactgacagcagcagagagcgaggggcagtccatagctgccaggcctttctgcccacaccacgccacttatatggcctcctgccatgggcagagtagggaggtgaggtgctcgtggtgcccagagtcctcatcaaggagtgaaaccagagtgtggccatagccagtaagaacagcacgctgcagcccagcccatcagcctcaggcactgagctctctgcacactccatgaatgcagagcagcatcaggctggcctcagccccttcccgtcttaggccagccccaagggtgctgtggttcctcgggatgccagagctcccccaagctgtggctgtgcctggctgggacctttccccctcctgctcagggaagtttcccacccccgggccagagtggggcttgccttctctccctccgtcacagccaaggaccatgcacagcaagggcagaagcaagtgctacctacatttcaacttgcttcccaaaaatctctctcaagttccttaacatgccctggtggcccgtgtgagccccctcaccctcccttatcatgtccagagtaaaggcctcttcggggacagtgccgaggcctcggtctcagggacctaaaggcaggccctgctcttggcagctggcttgggcagagggcccacccaccacacagtcctagggctgccccacctgcaggcctaacccctccacaactacttccccttccaatgaccaggagggcaagaacccagagagtttctgtaatcatttgaggaaaatgattacactcacctccccatgttaccctccacccctcaggagtgggcactggcttacactgcaggatgttggccacaacagcagaaacaagacagatggtacacatatgctcttctgttagagatggaccggcactggtaccagggagagctaccctgacacactcgctctccttcaagcagggagagctggccctggctcctgagcctttgcacacctccgagccgggcgcaccttcagcatctcctgcctggccctgccttgcactttggccatctccctacaagccacatagctgggcccagcctgcgttcccaatcacccacacttcactgaccatgcccagcaggctgggataggagatgtagctgggacgaccccacccctgcccacaaagccacacaagtggcccaggagagaggcagctgtgagcaacagcagagctgcccagctctgccccctctgagcacagagcctcaggaatacgctccagggtggcagcacaggctgccctgggacctgctgatggccagttacctgcttgaccatcttgctgctctcacggccatacatgcgcagtaaagacccccagttcttgacatgtgggtgcagcagctgaaggatcttctgtgaggctaactgctttccaactctcttgttcttacctacacagagaaagagcaagcatggagagggggtcacaaacacccagtgctcatggggccccctgccgctcccagccctcctgacccacaccccgagggccagccagggcacattctacaggaataggcagcactctgccactgctctgggcacctgagtctcacagtacccagctgccaccttgagagagtggccctcagagtctaggagctgaggacactaccactcaaagccacgcagccgagagcctccctcccgccaagacgcacacctccagaaacagggagcagcaggattctgctggctgttcgaggaggagggcctttcctcctgccacagggacaagggctggacggagacaggggtgacagcgggggaaagggaaaagacagggaaagtgcaggcaggacggctgccagtccgccttaggctgaacgtgtggtggccagcacacacagctgggctcagggacaatgmcagggcaacagctgagaccaagccacagaggcgcagggccacaccaggggccgcccgcccagcggccaccaggcagcagagaaggagtccttacaccacccgcgcactgtgtgcttgccacacgccatgacgtattcactcttctggtttttcccaggaaccacttcaaacttgatagacgtgtcacccatcccatggtttctttaagagaaaacagacaacagatggcgtcccctgagcagagcagccagctgcctctgaggaggcctgctctgggaagcccttaggaaatgaccaagcctctccccagactgcatctcagccagaggagggaattctccacacgcccgattcaggcctgtgggactgactggtggccagggccaaggggctgctgtgtacccagggaaacctggccatgcctctgccttgggacaaacagccacaagaatatgagacgccagagaggagctcccccgacctgactcatggggggaggcacccccctaccctaccttttaaggcactcgtggaggatctgatatggagacaacagcccagccttgctggtcagctcgtagacccgcgagtcctcgatgctgatgtggttaaaatactacaacacaaagcagaggcttgtgagtccccaccaggcccaccggcctcttcatggctgggcctgcggttggctttccccagatgcttaatgtctgttcttgtgagctcgcctagcacttcatacctcaactctgcaaggaacccaccgggtacaagacatgctccgtacctcaccgtccagttgcccatctccagagcccacagcacccttccaccctgagcactgtgggatggagtctggtatcctaagagggccccaggtacatggctggctggccaggcccaccttatttggatctgattctgatccataaggcacccttctcagaactctataaagataaagcacctttgcagagaggctttactattgccacaactgagactacaggagagggaaagtcagccagacccaaaagctggccttaaaaggcccagctccccaaaggccaaagccccacacagctacacagagcccagccccaggtggccagcagaggcccagcccagcaaggcttccaacagtgtcatcaccctggctctgcagccaacccaagaacacacaggaaggrcaagagaggcagacagggaaacaagaggtgatggggagattccacacagtgaggcatagggaagctgcagcaggctgaggtgcagagacattgcccactgtgccttcccagactaggactttggctgaagctgagagtgcctcctgggtgaaaggaagatgctatccagcccactctggagcatggacaacctccctggtggagctcctgtgacaacataccacaaagtcagtggcttagaacaagaggtttattctctcaccattctgaagtctgaaatcaaggcctcagcagggccatcctctttcagaagcctctagggagcctctgccagctcctggtggccccggcatcccttggctatggcagcattgctccgattttcatatggactactagccctgcccctcctccctcttcttagagaaacaccagacacactggatcacaccactgctctgcttcagtgtgatctcatgttaacctaattctatctgcaatcatcctctttccaaaaaagaccacactttgaagcactggag

SEQ ID NO: 93733 - DNA, 16666 bp, Homo sapiens
aatattccaactttcatttaaatgaaatattcagaattttgattaaaataaataataaattacacaagtttacaagtaacagttaaatatttagggacatgtactaagttttacaaacagtacaaatatttaagagtgttgattgggagtaagggaatgtcaactgccaataaagtggaagatgaaagaataggactttacacagagcatatttagttatgggtctctgtctcctccccacacagaaaaactcccagacattcatgacttcatccaccctgcctggcagataggccatatttcctgaccccctggctcttcacctcaaaaggtttatctttccaccacactagcaaagaccctcaggacacacaactcatactgccagctaagcatctaccccgagggacaaggcaagcacacactagggcagctgggccatcctggccctaatccctccagcggtgtccacactgagcattgcagcacttgtagaaggtggtcatcggctcatctgcagagcgggtctgaagctgcatgaagtaagcacgaggatgttcgcatttgggacacgactctggcaatgagaaaaaagaagtgaccacatttaaaaaaagatgctactcatggctgtcaaaagtaggtattacttaatatgtgggaggccaaggcgggcggatcacctgaggtcaggagttcgagaccatcctggccaacatggtgaaaccccatctctactaaaaatacaaaattagccaggcgtggtggcgggcgcctttaatcccagctacttgggaggctgaggcaggagaatcgcttgaacccaggaggcagagattgcagtgagccaagatcgtgccactgcactcaaaaaaaaaaaaaaaaaaaaaaagtaggtattactataatatcttttttttttttttttgagatggaatctcgcagtcacccaggctggagtgcagtggggcgatctcagctcactgcaacctctgcctcccgggttcatgtgattctccttgcctcagcctcccaagtagctgggattacagttgcccgccaccacacccggctaatttttttgtatttttagtagagacaggttttcactatgttggccaggctggtctcgaactcctgacctcatgatccgcccacctcaacctcccaaagtgctgggattacaggcatgagccaccgtgcccagactacttaatatctttaaagatggtaaagaacctccctgctcatttgatcccccttgacaagggtagatctacaaacagtgatgtcattcccaccacgctgtaacactaagggaatctgggagacctgtgactcacacactctccccctcccctccctgagtcccatggttcttctcaaatccagctgaaggctggttggaaacgtaacatggaaggtgactgttttggtccattttgtgctgctgtaacaaaatgcctaagactaagtaatggttagatggtggaagagttttgaagtaaatgctgggaaaagcctgcattgtcaagaattgagcattaagggccgggcgcggtggctcacgcctgtaatcccaggactttgggaggccaaggcaggcggatcacgaggtcaggagatcgagaccatcctggctaacatggtgaaaccccgtctctactaaaaacacaaaaaattagccaggcgtggtggcgggtgcctgcagtcccagctactcgggaggctgaggcaagagaattgcgtgaacccgggaggcggagcttgcagtgagccgagatcgcgccactgcactccagcttgggcaacagagtgagactccatctcaaaaaaaaaaaagaattgagcattaagggcgattctggtgtgggctgaaaagaagaggccgggtatggtggctcttgcctgtaatcccagaactttgggaggctgaggcaggtggatcacgaggtcgggaggtcaagaccagcctagccaagatggtgaaaccccgtctctaccaaaactacaaaaattagccgggcgtggtggcaggtgcctgtaatcccagctactagggaggctgaggcaggagaatcgcttgaacccgggcagcataggtttgcagtgagcagagatcgtgccactacactccagcctgggcaaaagagactccatctcaaaaaaaaagccaggcacagtggctcaggcctgtaatcccagcactttgggaggctgaggccaacagatcacctgaggtcgggagttcgtgaccagccttatcaacatggagaaaccccatctctactaaaaatacaaaattagctgggcgtggtggcgcatgcctgtaatcccagctactcatgaggccgaggaaggagaatcacttgaacctgggaagtggaggttgcagtgagccgagatcacaccattgcactcttcaaagcgatttcactttgagaaacttatcctacacctgacagaaatggcttcaaacactctatttctgacattaggtaaaaagattttttttttttagacagtctcactcaggctggagtggcatggtctcggctcactgcaacctccgcctcctggttcaagcaattctcctgcctcagcctcctgagtagctaggactacaggcacgcgccactgagcctggctaatttgttttttttttttttttgagacggagttttgctcctgttgcctgggctagagtgcaatagcacgatctcagctcactacaacctccgcctcacaggttcaagcgattctcctgtctcagcctcccaagtagctgggattacaggcaggcaccaccacgctcagctactttttgtatttttagtggagacggggtttcaccatgttggccaggatggtctcgatgtcttgacctcgtgatccgcccacattggcctcccaaaatgctgggattataggtgtgagccaccgtgccagctgctaactttttcacatagcagatttgtatgttcttttttttgacagagtttcgttcttgttgcccaggctggagtgcaatgatgcaatcttggctcactgcaacctccacttcccgggttcaagcgattctcctgtctcagcctcccgagtagctgggattacaggtgctgccaccacgcctggctaattttttgtatttttagcagaaacggggtttcaccgtgttagccaggctggtctcgaactcctgacctcaggtgatccgcccgcctcggcctcccaaagtgctgagattgcaggcgtgagycaccacacccagcctatatgttcttttatagggggaaaaccacagtactaaccatcagttatctctctcacctctcaatataacttacatttacgtcttcccctttcctctcctggccacatctatgtctaccagacatgcaataaacatgtattttacccaatctgcagtttaatgctcactggtattaacttctaaaaatctatattagaagcgtgtattagtccgttctcacactgctatgaatacctgagactgggtaatttatatagacaaaaggggttttgtttgttttgagacagagtctcactcttgtcaccgaggctagagtgcagtagtgtgatctcggctcactgcaacctctgcctcctgggttcaagcaattctcgtacctcagcctcctgagcagctgggtctacaggcgagcgccaccacacccggctaattattttatctttaatagagacagggtttcaccatgcgggccaggctggtctggaactcctgacctcaagtgatctgcctaccttggcctcccaaactgctgggatttacaggcgtgagccacgacacccagccaagaaaagaggtctaatttactcacagttctgcgtggctggggatgcctcaggaaacctacaatcatggcgaaaggaacctcttcacagagcagcaggagacagaatgagtgcgagcaggggaaacgcaaacgcttataaaacgatctgatcttgtgagaactcactcactatcaggagaacagcatggggggaaaccgctcccatgattcaattacctcccactgggcccctcccaggacacctggggattacggaaactataattcaagatgagattagggtggagacacagccaaaccatatcaaacagaaagaacatacttttttccttagactcttatttttattaatctactcatcattgccattatcaaagctatcacctgttgagtgcctcttatataccaagcacggtataattcactttatgctctcgcagtctacgaatatggattagccccagagaagtcaagagacccaaggaaggtcctacaacaatacaaggttgccctgagaatctgacccgggcctgtatgactccaaggctggcacaaatattgcttgtctgacagattattaaacagtaacaaatacaaataaattattcaagaaccattttctatttttagaaacctacatcatttatatgacatcatagactctgccaagcagtggcatcaacagcctcataattatccacagtttagcaacagaaacagttttccctcttacctgcagtagagtcaacattctcccaggcagctgctccaccaagcacatcatccacttctttcagttttgggtacttccgatttgttacctaacaaaaacaacacttcagactccaagtaactgaatagcgcaaacctgggctgccaaaccttaaatttcaggattacataagagttcactcggctgggcgtggtggctgacacctgtaatcccagcactttgggaggccaagacgggcggatcacgaggtcaagagatcgagaccatcctggctaacacggtgaaaccctgtctctactaaaaatacaaaaaattagcccggcgtgttggcgggcgcctgtagtcccagctactcaggaggctgaggcaggagaatggtgtgaacctgggaggcggagcttgcagtgagccgagatcgcaccactgcactccagcctgggctacggagcaagactccatctcaaaaaaaaaaaaaaacaaagagttcactcttcccgtagtttcaaactccaaactcccacaacacagtacaaactggagtagcatgcaaacattaagactgacgtagcaccaacatattctaactgctaaaaagtaaaggtattctggccaggcgtggtggctcacgcctataatcccagcactttgggaggccaaggcaagcggatcacctgaggttgggagttcgagaccagcctggccagcgcggtgaaaccccgtctttactaaaaatacaaaaattagccggggatggtggcaggcgcctgtaattccagctactcgggaagccgaggcagaagaattgcttgaacccgggaggcagaggttgcagtgagccgagattacgccattgcactccagcctgggaaacagagcgagactctgtctcaaaaaaaaaaaaaaaaaaaaggacgggcgcggtggctcacgcctgtaatcccagcactttgggaggccgaggcgggcagatcacgaggtcaggagaccgtcctggctaacacacggtgaaaccccatctctactaaaaatacaaaaaaatcagccaggggtggtggcggacgcctgtagtcccagctaattgggaggctgaggcaggagagtggcgtgaacccgggaggcagagcttgcagtgagccgagatcgcgccactgcactccagcctgggcgacagagcgggactccgtctcaaaaaaaaaaaaaaaaaaaaaaaaaaaaaacaataaaaaaaaataaagaaagcacacaatacattacataatatattagaaggtaataagccctatggaaacaattacaaagggaaggagaataaattggaaggaggggctgaaatttaaaatacggtaaagacaagaccaatgagtaaggtggcgatctaggggaagagtgaactgagcaacagcaagtgcaaaggccctgctagcaccatgwgcacgatgagagatcgtccaggaggcggtgttgatgcggcaaagggcaacaggaagggcattaggacttgaaatcggagacgcacgcaggggagggagtcagtgtcggaacctggtaggccctgggagaactccggcttttcgtctgcgtgagctggagaagagccgaaggtttctgcgcacagcacggacctgcgtgcctcagctttaaggaaatcaccgtggccgccgctgtgaacgcagagaagggcgcgagcgtgggagcaggaacccaaggcggtgggaaacggtggggctttctgagtgtattggaaagtagagcccacagatctgctgcagaccagaaaggggcgcgagaaagagcggacagaggcagacgccggggctggcggcgatggagcagcagtcggaggamgcggaaggcctgcgagagtcgcccgcggcccagygccggccttcgggtcccaccttgcgggtgatgttgtgcacgtaggggcacgtgttgcaggmgaagcggtggcagcgttgtccctcctccacgatcagcccgttcccgcagccggggcagaacagcagcatggtctcgaactccgcaggctccaactcccggcagctcccactgccgctcagcgccgatgcgccgcccgcctcgagctcacattggtcctggcagccttcccgccacaccaaccaaccaatagacagggcgattctgcgctcccggccctgctgcaggctgtctcgcacttgtcattggtcactgcagccgccccaccccccccggcgcgccagtggctgggcggcctcgctggggcgggccgcagttcctgcgcgtgcgcgcttggcctccctagtgcgggctggcagtgcgggcagagcccggctgagaggggcggccctggaggagacggaggcsgcgggtgggmccgaggcgcaagaggaagatgaggacgaagaagaggcgctgccgcactccgaggccatggacgtgttccaggagggtctggctatggtggtgcaggacccgctgctctgcgatctgccgatccaggtgtgtgcgggcgggggctgggggcgcgggagtcgttccccggggtccgggcatccgggcgccggcagcctccgaaggtgctggtgggagactgcggcccaaggctgaggaaggcgcctctgggcgtaaacgagggttttaaccttgaccgggcgcactcgcctggggcgcgaagcttaaagaggaaccaaaaacctcattagtgagtgacatcaaatgacattttaatgtaattgtatttagggggctcgggggacagggtcttgctgcgttgcccgggctggagtgcagcggcgtcctcccacctcagcctcccgagtaattgggaccacaggtgcgcgctaccacacccggctaatttttaaatattttgtacagagggagtctcactatgttgcccaggctgatctgaaactcctgggctcaggcgatcctcctgcctcggcctcccaaaatgctgggatttaggtgtgagccacccgcctggcctgtaatacctttaaaagtcaaagttgaggcaaaaaaagagcctacggtaaaagaaaaatttagttttaaataagagcaagattagtagtactgattgttccatttgcctcaagcgtcaatcatgtgtcaaagcgtcagtatcatgctttgggacgatactgtctttttatttatttatttatttatttgagactgagtcttggtccgttgccaggctggagtgtagtggtgccatctcgactcactgcaacctccccctcccgggttcactacaggcacgcgccaccacgcccggctaattttttgtatttttagtagagacggggyttcaccatgttgggccaggatggtcttgatctcctgacctcatgatccgcccgcctcggcctcccaaagtgctgggattacaggcgtgagccaccgcgcccggccaattttaaatgttttatattttgctcatcatggatattttaattgccttgtatttcttaaatgttgtattaaaatatttattgttattaccgtgttttgctgccccggtaaattttgcacacctgccttactcagtcccgaagcctggcctgggtcctgatgatcagggatatactcagcgtgaactgacaggcctctacccacccctgggggcaggtcctcatgtgagtttattctcttgcctgtttcttagcacckctttcccccagagactctgtccactatggacattaaaatgtgagtggaacatgagattggggctctgatgaattgggaaaccrtaacrtacaggcaaccacccttccttgcccttcgtaaaatggagcaccactttttggccactatcggcttgttctttgttgttgctcaaggtggtaaagagagccagggttcccacttctgccyttggtcttttgtaggttactctggaagaagtcaactcccaaatagccctagaatacggccaggcaatgacggtccgagtgtgcaagatggatggagaagtaatgcgtaagtgctaccctcctcccttcaggttatgtggtccaggctttcacagcaggaagacctaacagtgctggtcagcctgctcagaaactcacaggccatgcccaggggtactggggcaaccacaaacctgccctgtgcacagaggtgttggttcctttcctgccatcggaggctgtggctttgggttctcmccatggatcttctcccatctgtgtccgtggttgcagccgtggttgtagtgcagagtgccacagtcctggacctgaagaaggccatccagagatacgtgcagctcaagcaggagcgtgaagggggcattcagcacatcagctggtaagtggaacaacattcccttcattatagcccttcgtggggctagtgcccttcttggcactgtcaccaggcaccacctggaaacagctctcagctctgcatgagtacagcaccactgaagtgatgagctccctgtcacaagagtgatgagctccctgtcacagacagtgcgggtcgttctgtgcctgggactcctgcctcggccatccccaacattctgctcttccatcggcatcaccccatccgagctgctgggtatcttcacttggggacactgtcgggaatttccagtgtgtctggaagtggcctccctagttttggatggtacacctgtaggggctcccatccccttctcacctgggtgctgtcagccctcactctcctattggatcaactatcctgttcactgagtctcaacactgtcgcctgttgcattagcaaggtttgtttggccaagccgccccagacagccctctgagaacagagcctccttgtagctgcctcagacccaatctgcacattgtacagaacagcccaggtagggaggacagctgccccaggtcccataggactgcatgcctcaagcccacgtcatgcagagccactcagctcaccctgctcagggcacgtggtttacctgcattcccctcttgcaggtcctacgtgtggaggacgtaccatctgacctctgcaggagagaaactcacggaagacagaaagaagctccgagagtaagtgccggccacgtcctgagccgtagggcaccgctgttctgttgccccttagtcccccatgctctgccagagggctgcggctccctctccggagataacaccctcctccaaggagcttccttggggccctccccactaggagaatggcaggcagagggcasctggaggggccttgctgcttcccaccagtggcagcttagggctacacagtgccaggagggaggaaatcagagtgggcatggaggcgaaaggctgtgactctatctgacactcagttccctgccccggggacttgtgagtcggagtgcttctgggtctgtgagaggatggccactgccacttcctggccttcccagaagccacacgcctcccctctgttgtttcttcgtggtcctccacagcctcaggaggggagtcacagatatgtccttctgtagggcaggtgctttatgcctttccttctttttcagctacggcatccggaatcgagacgaggtttccttcatcaaaaagctgaggcaaaagtgagcctccagacaggacaacsctcttcatcactggtggctgagctttttcccagcaggaatgggtcctcgaatcatcgtgcctctttcacagaaaggacgttgtggtggcctcaccccaggcatgcccaacagkaactgtcagcataaacctgggggccctcaggactaggacagggtgagccagtgctccctcctttcatgtacttggcctgagactgacctctccctaggtccaaatgccctagtcacatggcagacccacggcctggcccactgtataaaataaacctgtttgcttcttagtttgaaaagtagaaagccacagtaacctgggtagcaaagactgagattgccccatcacagaggtgagttaaggggagagaattggtacaggcgagtcctatagtccaagatggcgccacaccaccaaagccttgaggccacaccactccccaaaccacacaactgtgttaccatgatctccacagcaaggaggaaataaaagcagagcggctttagggtttgcatcctggagctcacagtggcagcaagcatagcacagctgtgtgtgggccctccagcctcagcctttagggttccctgcagcaggttcggtggacagggagggagtgtggggtggaaattggagctgctaagggtgggggcggggtgcttcccagcatgtggggagggtatgacagtacatccctaggtccctgtcccagcgtcggctaccagccactctaagaaagagcaaggtgcacgtgcctggctgaaggatttcactgggaagtgaaagagcccgtgactgtatctgacactcagttccctgcccgggtgagtcagccacaaggggcctgcaggacctccctccacagcttccagccagaaacaaagaaggatagggaagccctggtcaagttaatggcagctaaaacgctcccagtccatttattggccacatgaggtggtcgtcaagaaacaagttagaaggttatgacaggaagtagtataataaatgcccggcagtacgaggggttcaacagaagtgaacaaggcacaagaaagaggtctgtgttcaggaaacaggccagtccccacatggagcaggtgactcctgtaagcctgtgaggctcagggaggtcgtgtctggctctggcctgctggagcacacggccgctggagcccgcagccagctcagtggagctgagcgtccagttcgtacttctcacagaacttgtcagtgaaggggatgcaggtgaggaactcacaccactcacagcggacaggatagacgtagaagaggaccaccaggccagccaggaggcccaggaagaccacctgaaagatgatgatctggcagcgtttccggtacaggtcgaacttgccaaagctgatgtagggcaagaaggcgaaggagaggaagaggccactgatgaacccygagatgtgggcaaagttgtcaatccacggcagcagcccaaaggtgaagaggaagagcaccacagccagcagcttgaagaaggcacgccagggccgcgccaggatctgccagctctggaagagctccacgaagaggcaggccaggatgccgaactgggagccagcaggacccacctgggggatggttggggtagctgtaaggcagtggggctgggcaggccccctggacccaaggcctcatctttctgccccacttcccatggcccagagcatattgggaccgaggatccaactggagatgctcccagactcagtgctcgatatggacaggttcacagcaggctgcaggtgcacacgggaggatccccaccctgagggccagccttacctctgctcggtatggcaggaagatggcactggccaggttgccggtgacaccactcagcaggtagatgatggctatgcggtgccagcctgccagcttctccaggtcccgcaggacagtcatctggaagcagatggacaccaggcagtgcaagatcctgtagtcagtagcaggcgggggtcgggagacattcagcagggaagtgacctttctgccacccccagccagccaatcctgagggccctgagacccccgacccggcccacagtgtcacttgcccggcgtgcaggaagagggatagccacaggcggtagaactggtcaggcacctcggggttgagaaaaggcaggagcccacacacatcatccatgcagtgcacctgcgcagagcagcatatcagcatcacagtagctgggggaggggaacgacggacactctgcagacctacctgagagcagagcgtggcctcctcatggaagtagcccctcatgaagtcacagtactcccgggaggtgatctcacacctagaaaggcaggccagggttcggagactgctgccttgcagagggggattgctggcatccagggcgagtttcagccgcacctacccacctttgttggccccaaggaagtccagaccccctctaaccccacatccttggtatactggcttatttcaggatttggttagggagaaggcacgccctagggcgatgctctgagcccagagaccagctgcactcgctggcacgcacacgtacctgcccttggtgccaatgcagcagggccgtcctgtgatgacacagtccatgtggggatggttggtgtggttcccagcgctgtttttggtgcagatctgggtcacaaatgaggacgagctgagtcagggcctcccccaacctttggccccacaccacgtttgggggtagaggcaaagatgggtgggctcataaagcagaaaacggtgtggcttccttgacttcaagcaggccaccacactgagtctctatcaaactggaataatgtcacttgacctttcaagtctccatctagttctcttgatctacttgctcagaggggcaggcgctggttgatggacaggctgtacaaagggcaggtgcacagcctctgaaaacgtgaggtggtcccatgatgggaatctctggtatcaccagtgggtggggtgtggcattctcccccacatgacacggagggctccctaacaacccccccactgcagctcaccggccacttggtgatgtcttctggccactcatgagggtcttcggaggagggctcatcacacaccctgcatgagccaagtatgtggtcagaccggcttcgagcccctagcattggcacccttccagccaagtcgccaacaagaggagcccctacaccctctgcaccacagcccccggggaaggtgtggacaaaggcaggtgagagagctgccggcaggactaacctgggatcctggtggcagacagagccaaactgtctcttgtggcccgcaagctctggggcgctgggatggatgggccacttcacccacactgccagcgtggactgtgggagggggacacagggtcaggtccagttgggtcagggcaatgaggggcacgcagggagtcaggagtcgaaggcaaaaccactgagctcttccctccgcttctacaagtcacccccactcttgagatgcacgtgcatgttggaaaagactcttacaaggagtttgacggcataattcctgttagctgaaaatcagaaacaacctctgtgtcctaaatcagggaactggtatggactacggcacttccacataagatgatgtgatgaaagttgggatgaatttttttaaaaattgcttagtggaaaagaggcaaataccacttatgtaagctttaagacacatgctggaagagtacacccaaatcaaaagaccaaatcagatgatggtctacggggcgaggagctggagatgggggagggtggggatgaggaggaatgaatatgacaaggccttgcgcgtaaggacggcgggatgtgccaggaacgagggcgaaggatcactctgccgagtctatctgaggtctgaagagcgaacaccgggcagacgaaggcgggagtcccgggcggggaaacgcaccgagcactcctcctccgaggtctgcacgcagcccgacctgtcgttgcgcacgcagcaggcggagtgcttctcgcgctcgcgcgccgagcgaatgaagctgtgcacctgcgggtcctggcgcatgcagggcgaaaacttggcgcccaggtggatgagggcctcctgcgggcgagggagacgagcggccgcagtccggggcctcctgcccccgccgggcacctccaggtcccgcccccgccggccccgcccccagccccgtcctcaccgagctgggcccgatccagaagttctcctgctgcacgtacttgacgttctcgtagaccccgcggttccgcagcacctgggaggttggggagcgggatcagacgggccccgactctggccctctcctcccagagcgggtcgggagggggtccagtgcccggactccactcgtctgggcccagggaaggcacaggggctcaccgagtccaccgtctcatgctgcgagaagcccacgggcgcgatgccatagatgcacacggctaggatggtgacgagcgagtgcacgaaggtaagccagtaggtgaagaagggcctgcggggtggagcgtcagcgggggcctcatccccgacccggagcccccaccctcccccgggagcctccatcccaacccaggccttgcctgccacgcctacctgtggtcgtccatgtcctcgatctggcgcttgacgaagctgtcgatgcgcttgcggtaggtgcggttggtgagccgtcccaccatgcccagcccatacggccgcttctcccgggcgaagagcttgcgcaccggcaccgcgatacgctggccccgtcgcggccccgcggtgctcaccacctcctgtcggagccgcaccttgggctgcggggctgcggcgccctccttctgcttccgccagcctcgctccaagggcctggagggagccggcattcacctcccgccccagccccgcaaactgctgcagtccctccccggggggcaccagggcaccctgtctctatcctggcgaatatgctgcgcaagtcgcccggcatctgccttctccttgccagtaaaaaagcaacactgcgggcctccggggatggcagggagctggaacggggacacactgacttctgcaactcagcaagtatcacctctgtcacctccgcctccccgttggattctgcccagcccctgggttctaagattgctgtcccattccacaggcaagccatgagactggggccatgcccagccctgcgtctcccacccctggtggcccagtgagtagtgagttcccagtccctgaggctaccccttccatcgcccacagaggtgaatgccgatactcgcccagctgttcctgacgggccccggggtctctctctgccccccttccctgcctgccgcactcacagcatcaggtggctgcgctcaagctcgctgcggtccagggccccgccggtgaggtccgcctgctccggtgccttctcccagtcctttagcgctgcctccgatggggactcgaaaacttcatccgggtatgtggacagctcttcatggaggataccttcctgagcaaacacatgaggtcagggtggacacaggcaggaagggaacgtggggtggggggacaccccgggcacttcttacccrggcaaagaaggatgtgtccagctcatcggggaaatcagttgtgtcctcctccagaaagctagctggagtgaagcttcgacgctgtgcccggcgaaaggtgccatccctaacggagcggccctggggacggggaagtgagcatgagacccggctgctgggtcggcccccaaccccgcctttggcccctgcacccactttcatcagcgctgcggccgcccggaagctcatcttggccaccgactctcgcttgcgccgccgcgggagccggtggaaacctgagcgggagctggagaaggagcagagggaggcagcacccggcgtgacgggagtgtgtggggcactcaggccttccgcagtgtcatctgccacacggaaggcacggccacgggccagggggtctatgatctggaggaggggaggagatgctggagtcaggaccatgggggctcctagctcacccagaggcacagaggccttgcaaagacagcgtgactgctgctcctgactcctcacgggcccctggacagctctatggccaccactcccaccccacagcacctagaggtcctgcctggaatgctctcccatccagacactggccccctggtgcaatcccaagaccatgtccccatcccaaggtaccccttcccagagactgtttcaggtgccttcacgagcaggctgtctgactgcccttccagactgtgagctcccagacagtcccttctgctcaggctggctgtgtccgcagccccagcccctgagagcggaaggaggggcctgcaggaggcagcaacaggcaggcataccttctgcatgcccagctggcatggccccacgtagagtgggggtggcgtctcggtgctggtcagcgacacgttgtcctggctggg

SEQ ID NO: 93734 - DNA, 17990 bp, Homo sapiens
tattccaggattcagtccaggaactttcccttttatccatgaatattcttaccctagtttatttcatctaatcctgtgcctttaaaaattattctgtgctactcatgtccaaattgacctctctaggactatagcacaaggggtgtcattatcctaaagtaacccagaaatttaataagctggcctaaaagagggatttccttttcccaacatgaggggctgtgcctactatagctccctgtacaatgggtggctttatcccctaagaaaaggaaaactctttgcatgaggcccaaggactctgggtgctgggcagttgagtttcaccatcttgtgaacagttggcacctaaatccagactgtttcacaccaacagcctgtgtgttcctccattgttaaagctgtgtccttctgcttacatgacaaaaaaaaaattataataagggagactagtgttcctacattggaatgcagattgccattgtgagcccatcatttcttgacaatttatgcattagcataaaaaagagaatagagaaatcatgctatctattctttttctgatcagtaatctttgtgagttttcctaatatagcattttttttttggcctagcacagacaggggactttattgatggtacaggacaaggtggggttccctaggcccctccctcttcaggggttctgcatggaaactgtgaggaggggagattctcagtgtcgtgggggactgagtgtggcagagtctccccagcacctgagggcctctcttttcctctcttgctctcgctggggctggtggtccagggatcttactccttggaggccgtgtgggccatgaggttcaccactttgttgctataaccaaattcattgtcataccagaaaatgagcttgagaaagtggtcactgagggcaatgacagccccaggatcaaaggtggaagagtgggtgtcaatggttaagctgaagtagacaacctagtgctcagtgtagcacaggatgcccttgaggggatcctctgatgtctgcttcaccaccttcttgatgttatatttggcaggtttttccagatggcaggttaggtccatgaccaacatattggtggtgggtacatggaaggccatgccagtgagcttcccgttcagcccatggatctcattgcccacagccttgacggcgccagtagatgcaaagatgagatctctgcggccatgatgccagtttcacgaaggggcattcacagtcttctgggtagcagcgatagcgctgactgtggtcatgggtcattccactattccaaagttgtcatgaatcatcttggctagaggtgctatacagttggtggtacaggaggcattgctgatgttcttgaggctgttttcatacttctcatggttcatacccattataaacatgggggtatcagcagagggggcagaaatgatgactcttttagctcaaccttgcaagtgatctccagccttttccatggtagtgaagacaccagtggactctatgatgtactcagttccagaatcaccctatttgattttggtgggatctagcttttggatgatggtggtgggatttccactgatgacaagcttcttgttctcagccttgatggtgccatggaatttgtcataggtggactcatactggaacatgtagaccatgtagttgagctctatgaaggggtgattgatggtgagaatattcactttatcagagttataagtagccctggtgacccagcacccaataaagccaaatccattgacttaggccttcattttcaccatggtgcctcagggatgtggctggctctgcacgagaagatgatgctgtctgtcaaatgggagaagcagaaagctacagcatattatttaacccataattatcacactgagaaattcttcacatgctcagatgccaataggtggtgactcagatgagcatcacttgatacagcaggctgacattccctgagcatgtggacaattccgttgtctaattatcacttggttaaaagactatgctttcccccattggatttcctattgtcaaaatcaattggccatatgaatccaggccattaacacagacataggcaaaaattccctcataataaattataggcttaaatgtaaaggctaaattatacacctcttagaagaaaacataggttagcgtattcatgatcctgaattagacaaaaactcaacttttcctggttaaaaaaagagttgaaaaatgaaacatgatcaaaactaaaaatgtttgcacttaaagacaacaataagaaaatgaaaagataagccacagactgagaaaaaatatcaaattctatgtttgataaaggacttatatccaggatataaaacacacttacaactgaacaacgaaaagataaataacctaattttataaatgggcaaaatatttaaatagccatttcaccaaaaaggtgtaggaatagccaataaagtacatgaaaagatagtcagcatcattagtgatcagggaaatgcaaactgaaactacagtgagacattacttcttacccactagaatgctataataaaaaaggacagaagcaactggaggaagtgaaaaaacaatgatgtggaaaaatcaaactactcatgcattgtcgatgggacatgcagccatgttgaaaaccagtttggcagtttcttaaaaactttgaagatacatttaccatatgacctagcactttcactcctagctgtttacccaaaagaaataaaaacctatgtccacacaacacatgaatgtgaatgaatattcatagcagctttatccataacagtccataaagtggaaacacatcaaatatctatcaacagatgaatgaacaaacaaatgggaactatcaatacaatttaataggatttgacacctaaaaggaatgaaatattgatatgtgctacaacatagataaaacacaaaagtatattaagttaggtgaaagaagacagatacaaaagaccacatattgcatgattctatttatatggtgtccagaaaaggcaaatctgtagagtcagaaagtcaattaagggttgccttgagttggggagtgggaagaaaaggtggcaactgataagcatgagggattttttaggaatgatagaaatgttgcaaaacagggtcgtggtaatggtcacacatgtctaaaattttactaaaaataattgaactgtacacttaaaaaaggtgaatgttatgatatgtcaattataccttagtaaagctgtttaaaaacaaaaaagtttagtagtgtgggccccatctgtcttgccctttgtttaatttctcactttcttcagggcttatatttattgcttccactcagagattccaagagacactggctgaaatctatcagcctccagaactctcaacagctgagggaatgtccggccccaccctgaaggtgatggggtatctataaggtacactccagcatctgatacagcagacaaaggcatgcgatgcacctgagtggtttcagatagtgctccacaagtctcagcaagacccagggcctgtagctagttccgatagtttcagagaaccagctgctacatcttccagcacagggccaacctttcctaggcaagtgggtttgaagcattggtagtcagaccccaagtagcagatgaatgtctacaacatgggaggacggcaagacccagagtggggtttcaaaccaaatcatttgtagagtattatttccagcaactgcaaaaagcattcttttcacatgcttatggcattttcaccaacatagactatttgctgcaccataaaataagtctcaatgtatatccaaggatcagaatcatgtggagaatatgctatggccacaatagtatttaattagaaatctgcaacaataagatatatagatggctcacacctgtaatcccagcactttgggaggccgaggtgggcggatcacaaggtcaggagatcaagaccatcctggctaacacggtgaaacctcatctctactaaaaatagaaaaaatagccgggcgtgatggcgggcgcctgtagtcccagctactctggaggctgaagcaggagaatggcatgaacccgggaggcggagcttgcagtgagctgaggtcttgccacggcactccagcctgggcgacagagcgaaactccgtctcaaaaaaaaaaaaaaaaaaaaaagatatctagaaagcccccagtcttagaaaacaagcaacataatctgaattacactttggtcttagatgaactcacaagaaaaaatttaaaacatcagtaactgagtgatgataatgcatcaaaatgttggctacagctgacatagtgcttagagagaaatttacaactttaaatgcctatagtggaaatgaacaaaggagtaaagtcaattatctatattttcatcataagaatactgaaaaataactgtaaaataaacacaaaattaataaatgtaagccaataataaagaaaatcatgaaataaaaaatgaacaaacaatagagacaatcaatggtcaatttttctatactccatgaacaaaacttcatttcagaatgattttatatttaaatgtgtatccagaaccacagaaatcttaaaataaaaagttaggaaaatatgggaataaaataagaattctatgagaataaaaatcagaaagtagttgtctaccaagtaggttgggtacagtgcaaggaattaactaagaacttcttttcaagaagaaaatggcctctgtttttttggatggtacttacacgggcatacataactgtcaagtttcactggactgaacacttgagatctgggcagtttaatgaatacaaattacatttttttaagtaaagaaagtgtctcaggagcttacggtgggtaaatttgggcagttctaatgcataggcttcagaagcactcacagcatgttcagttcaggaatttgctgaaaatggttttgcagccaaaaatatggcataagttcaaacatctatgacaagagtcattggggcaaacaactacaatctccactcttgtggtacgggccatattattaagcagttatcaatagatacctttccttcaatgatgttcttcatctagtaacccagagctcttcaggggaaagttgcaattgaggtcttggatatattcagtaggaaagaaagtcacctcacataaaactaagtgattggagctgtcaccattgcaaatttctaaactttacaagataatagcaacatttcaaatgacactcagacaggaaataatgtgctaatgtggattcccctccaaacatatttactgcacaaaggcaaagttcacattgcacttggagatatctcccagtctagtttaacttcacagattgcagatcccagacagctggtatgaactgaccagcgtcctgttaaggctaaacctaagactctttaccacactcttctccacagactctttaccacacattttaccacttaatctttttcgaagagtggccttaggattggatttctcttcctgttcctgggaagaattagagatataacctaaaggtcactattcttctgagaaaagggatgctggaggagatgggagcaatgagtatgtggcatgagttcagagtgataagggacaagctaggagccacagagcataaagctccagggctgccttagggaatgaagtggccagcaccttgactcttctgtccagccttttaaccatttaattaatggtgaaagctttttcattttctttcagctactcttggcagtggtggggacatggaatttttgcaaacaatgtggtggaggaaaataaggcatctgtgcaagtctataaccactttacctctgtttttagtcctctccatggtcaccctagaataagatctgctccccaggatcttctatttcctggcgagtgtttcctgcaatcttggattggccatgatgggctggagctgccttgtgacaggagcaggagggtttccgggtcagaggattgtcaacctcttggtgaaggagaaggagctaaaggagatcagggccttggacaaggccttcagatcaggattgagggagaaatkttctagtaagtaaacttgagtcatgggtgtgtggctacattttaaaccttgcatgggtgtgggaaggtggagcttttctggcaagttatggcaagttgtagccaaacctaagccaatcccacatccaaagtcatcaaaaaaagaaaattaaatagtataaaatggcatagtgtgaaagatactggacaggctgtccagagactggattctggccctgacccagaacttgagaggcagccacctcagcctccaggcctcttttcatctagaaaatcccacatcagttctcattcttgtctacaagtcttttatgctctgaagctttttgtcttggcaattgctttacaacattcacaaaggacagcatttacctggagacctcaccagtgggtccctgcctgtctagactgccccaagctttgttttgtttcatagcatcctcagcatctttagtggaggtaaaataaaaggaagcggaggtaaagatgagtgtttaagtgtgtgtatgtgtgtgcatatgtgcctgtgtgtgcatgtcagagagtgagaaagagagagaaaatgaaggggagagaaaaatcagagagagaaaatgagaaagatggagaacgaatgagaaagagtgagagagagagcagcagtgagagggagacagtgtgcacaagcacacagcacagagcagagacagagtaagaggcagtataaggccaggcatgcctcattttcatttctcacatatggcttttttttaaaaaccatttgtctctgttgctcaatacccgcccccccccacccccaccctgcaattgcagaatttgttgtagcaactccttgtgcaaataacactatgaggaaggtggtagaaaaggggtgatatccaagtggacaatgaacgcatcaaggtccagaaacaaagcgatttgccaaggccatctgattaatgtgtagcagagctcaraccaaagcttcatccagaggcttcacttggccctggggctgacacttggcaaaatgggtcttcagtctctccttttgcctccctgtgtgtccaattccctgtcctcctccccatcccatgggattgggaggactgtgtgtctacatgtgggctctgattgtgcagagggtcatgtgctgcccacagaagagtccccacttgacagcactcagggaccacacccagcactctactcttctttcactcttctctgacctcttctgatttcctccaccctctgttctaatggtgtctttgataaacaaatattaacacttcatgaattttaaatgattgtaatcattatgtctcaccaatatttgcactctaacacgtaatacaaagaaaaagcaatgcttagcctagaggaacaattcccctgtggtgaaaatgcaggggtataatggatgggcaaaagactgtatgaagataaaaacagagaatcctttcagtgttttttctgtgccaggcactgtgctacatggtttgcatgtgcccactcatttgctgctcataacagccctatgagattgttaatgttattagcctcctttcttacagatgaggaaacagtcagagagagattaatgaacttgtccaatgttccacagttagaatatggcaaagttggatttgaacccatgtggtctagtgcagcatctgtgctcttaagcagtagttcgtctagcagcttgaggagggagggagcaatggctccatccacaaagtcccctttcctggtctctctagttccctgtgaactcactgcggaagagtcattttctcttggctttagacttcttcagctttgaaatgacaattcctttgagccagtctgaagttggcagcaaatgggaagcagatgaagggagcaggaagtacagaggtggaaatactaccagagaaaattccactctcaggctgtcacccacctcctccccagcagcctcttccctgcctcccccattccagggcctccttggagttgcctgacagtgggaaggggctgggagtagacaaaacaaggcagaggcatcaggagagcaaatggtcccacctgtatcccaggaaggaatttctcctgctttgaatttttcactctgaattttactctcactgttctttggcctttgttgccaatttcagttaaactgacttattcttactctttctcagaaaagttgattgtaaacagctattcctgcacctggtgtacagggtacaagacttggaggtggggtgggcaactttgagccttcactagaaacgtgacctttaatctgtcccttaacctctctgagccccagtttcttcaccaataaaatgggattcagaacacctacctcatgagacagctgtaaaaggaaataagcaagctgtgagctgtatgcagattataaagcacaaatgagtgtaaagtatttatctgagctccatgtagcatggtgttcattttgtgggctaattccaggtgacaactttactggcagcatcactacctgtggatttcagaggagcctgaagacattgatgttgtaactgctgccctgggctacacagctggatgttagttcattggtgactgactcattttcagcatttgtacctcctttgataatatccaataagaattttcaaaaaaattcattatttaaactcttctgcaattcgctagtaatggctccactctcctcccagttgctcaagcaggaaaccataggggtgattttatcttctccttttcctctcagccaagatccaacaggtaccaggaccttcaaggtgaggtctgaaattccaacctggtrtatctctctcctcctctgcttccactgctggacccygcttccagtcctcatctaaactttggyacagacattctgattaatctcttgatcccctggctttctcatatcccctataccagtccattttatatccttgaggcaaggttaacttcctacactacaattctgcttctgtttttctttttctttttgaaacaggattttgctgtgccacccaggctggagtccagaggcatgatctctgctcactgccaccttcacctcctgggacccatccatcctcctacctcaggcttcttattagctgggagtrtaggcattcaccactatgtctggctaatttgtgtatttttggtagagacggggtttcaccaagttgtccaggctggtctcaacctcctggatgcaagcgatccacctgcctcagtctcccaaattgctagaatcacaggtgtgagccaccacccctggcctgtttctctacttgttccaaatataaataaggggttttctgtgacatggtgctggagaccgaaaatcacaattctgcattacctacagaattaaattcaaacttttccctcttatacccaactctccacaatcaccctactctccttaaaaattttggtgagtctcccatgaccctagccgtgcttatattccaggcacacctgacagctcattgctcagattacttttctgaaatgagatggggtagaaacagatgtttgctctttcccaaaaaattgctaaacgtgctgacttctgtgcctttgtttaattgttccttccatggagtgtacatcctccactctaacaacccaactctaaccatcctcgaacacctatgtaacatcatctttatcaggaaacttccaagccagattcggaaacccttccaatgacctgacctatgttcttgcagagctccagaacaagaccaagatgacagtgctagaaggagacattctggatcagtcatgcctgaagagagcctgccaggacatctcggtagtcatccacaccgcctctatcattgacatcttcggtgtcactcacagagagtctatcatgaacttcaaygtgaaaggtacagtagcctgaggaggagayggagcaaggtggagcaaacaaggatcagaaagataaacaatgaasgaagagaagtccctccgctgaacacctgctatgctctgggccaagtgtctttgctaatcactaccaactgggggagttcaaagctgctaccttcagttttttacatgagaagactagggctgagagatggcaagtaacttgtccaaggccccccaggtaagtaagtaagtaggagaatgagactttaaactcacccctgtgtgactccaaaggctgtggatgctctttctactgtggctccaatcaaattcagctaaactccgacttcagactcttgatatccagccaccccttgcctctgtgggccagaatcaaatcttccaagtgccactatagtcatcattttaaatcttgttgtacactgatgagaatgaaatgggaaaaatcccttgtccccttcacagtgcgtgtgatgggggtgtggctccctccttcagtgcccctgctcagaccactaggggagcatacggatgagcaggctggagggctccaactccaaagcagcatctaggggcaaatgttcacagctcctgaagccccagtgggcatgtgttacatggtgctcttttagttttgctcttttagttttgccgtctataggcagcttgtgttaaccagctcaattagaccttagaccgtccagcttgccacaaggacggagggctttctatatcctgggttcttctcttagtgtaccagaaaaattgaatcacacctgagcttggagaatgagtgcaagcttttattgagtggaggtagctctcagcagatggaggaagccagaatagaatggttttccccyggagtgtgctgctcagtggcctgacacttccctaactgcttggccwaactctgcatccttctgctggtcagtgcatccctctcaacatccagctgccctgtgtttcttcactgatgtgcttccctcaacatctagctgcttctgtcttcttcccctgatctgctcctcttracatccagcagcttgtgtgtgtctgctagaatcttgggcctttttaacaggcacagaattaaacatgtgtattawacaaggaaagaatttagtgccaaagattacagagacaagaagtaaaatatactaacaacattgtacgagctgtttcaccctggactggttaaactttagaagagacataactgttcttggcatatctttagcagttaacagatgcaccccaggaattctggggtttgtgggcttgcaccaaggccagtaaagcttttggtttttttctgtatctcctctctctttcctgggcttttctgtctctatgaggaaagaccgagatggccactttcaggagctcctctaatgtactatctgatcccagagcctgtttctgcaacttcctcctgatgacaggagctgcctgagtaataaatttatcgtttagatgtctctcgactgaggcaggagatagagaggtgtgctttactaagacctcacttagcctttccagtaggattttcatttttgtgtttttcctatggctgtagcatgacccaatctcagtcagatccactgaagaatgtacctcgagtctattacaaccactgaacttgggagtggggagtgagacacatggatctgttcasgtggttggtcccccttagggatatttcctgacattgacagcatgctcttcatgggcaggtacccaacagctgttggaggcctgtgtccaagctagtgtgctagtcttcatccataccagcagcatacaggtagcctggcccaactcctacaaagagattttccagaatcgacacaaacaagagcatctggaaaacacatggtctgctccatatccatacagcaaaaacttgctgagaaggctgtgctggtggctaatgtgtggactctgaaaaatgctggcatgttgtacacttgtgccttaagctcaatgcatatctatggggaaggaagcccatttcttactgacaatataaataaggccttgaaaaacaatgcgatcctgtcaactgttggaaagttctccacaaccaacccagtctatgtgggctgggcccacattctggccttgaggccctgtggggccccaagaaggtcccaagtgtctgaggacagttctactacatctcagatgacacgcctcaccaaagctatgataaccttaattacgccctgagcaaagagttcggcctctgccttgattccagatggaggcttcctttagccctgaggtactgaattggcttcctgctggaaatagtgagcttcctgctcaggtcaatttatacctattgacctcccttcaactgccacacagtgacattgtccaacagcatggtcaccttctcttacaagaaggctcagcgagatctggcgtataagccaatttacagctgggaggaagcccagcagaaaaccatggagtgggttggttcccttgtggactggaacaaggagaccctaaagtccaagactcagtgatttaaggatgacagagatgtgcatgtgggtattgttaggcgatgtcatcaagctccatcctcctggcttcatacagaaggtgacaagggcacaagcccagatcctgttgcctccctttcacacaatagccaacttattatcttcctgtgccatcaaaacctgtgcagtcagtggcctaaccaaaagctttctgtcctaatcacatgccagaggacacacaaggtgatttgctgttaccaaatctcgtggcctgattctgaacaatttgggatctcttttaacttgagggtctctttcgactactacagctccatttcccctcttaaatgagaagggatttcttttcttttaaatctcctatttcttcacagagttcaatgaaaagagtaataaatgatttaatgcttaaagtggagaaaagtgtggttactgttaatacatacttttctcctttcttttacatttccaggtatcaccatctctcatttagaagagtaggctgaaacaggggttaggaggtgggcagagtagtgggagggtcagggagggcggatgaagactgaatgaataagctctactatgtttcacacatgtacaacataacctacatatgacatatattatctcatttaatactcatcagaaatctatgaggtagagtgacaatttccattttattagcaaggaaacttgtgcacagtcacactgattagtgactaggcctgctatgagggagttggccttgaaagtccttatctttccacccaattacacagcctgaactggtcttgtccgtggtacagcagagcactgaagcatggggtgccgatttatgggagagccccggctaccttggattacctccttcttgcccagtcccttgcaggggactctctagaatccaggagaatcctcgaggagtatctggaagggtttgcatgccttagcaaatggccctgagcagggcagagagaagcaaaaatgcatccagcctccaccttcagtgccaatttccttgaaggtctgtagaacacacctggctatatgtgtgttgatcattctggttattcataaccctgcatttcacccttccaatcacacaatgaagccacatcatgggttcctgggcaagtaaagaaaacaagtgtgaactttccccaaaatataccttctattcagcctcaaagtagaagtctactatcccatatccccagatttaatggtctctctctcctttctctttttcattttaaattacatctgttcttccttcattcttccatctccttagccactttcttctctctatctcccctttaatcactggtcctctcatttgtctcaatttccatgaagagatgaggccaatcaatataagtttggggacttcaatgatgacatagttattaagcaaccaacaaaaacacagtcaaaagaaacactgtcaggggcatcagggacagaattgagcgggagcaggtgaggaggttgctgtgggtcaacagtgtggggaggggaagctatctcctctggacctggatgtatcacagcatgattagagtaatacacaacatcaagatgacttctttcttacagaggaaatttacagatcattaatcagttgaatttgattaccacaaaggaattagtttcagtgttcatcctgtagagtaaaggaaaccatattctggcccagatgaacaggtttccaccatcgtcaaaaccacaggggacagatgatcagcactagcatcagggggtgtggccccaggcagtggggtaacgtggaaaatggaacacccatccttccccggccactgcacaaaatgcaagagccagcatctgtccagctcttgaaaggcatgcacaccatccgtatgttaatgtcaaatagaatgggaagaaaaggagagtggtggaatctgaggaaagagcccttccccctggtttttcagccttgcgaaaccccacgcctataaaaccaccagggcacttttcacagggaaggtaaagaaaaggacatattttcaacgggcagcaagggttgcttaaagaaagagacgagggaatcggatgggccaggattctcaactgaacaagcaataaggccttgttgtgttgtggccaacaaaatgtgccatcacttcttatacctgagggtgtgaggctggcggagctcctgcaccaaactctgctgcacctcacgagactcaccacacagcggcagcaaagtctcagagggaagaacaaggaaggaaacctgacccagcacggacttttaggtgtcttttctccaccggggtggctctgcagggtacctggcaaaggaatgaatgaaaacacaggcaagtgctcagccaccagcttaagggtttaggtatatgtgagtacagagaatggagctgagctgaagtcactgggaaaagccacaggagccagtggggcttgaaggaggccttggattcctggttccaaggcagggggcacagtttgggcagtggtgaagaggaggatgagggacatgaggatgcccacccgccttctgggaaacgtgtacagagggcagatgaggagctcaggtgcaagactcagccatggacccgacaggcaggctcccaggccagggatggagtggggagcccacagtggcctagagagatcttgcagaaaagtggccaaagtccaactcttatgtgaaatcttttcatttctaaatattagtgactaaccctaaatttgaaaaagcagtgtgaagaccagctccaggggagggatatgtgggctagtgttcaaactgtatgtgtaacattttgtatcttaaaaagtgggtggcgaggtgtcagcagcaaatctgttcattcttggtgataagtcccaaatatacattattatataatattctcagtttttctgtatgtttaacacaggtcatgattttttaaaaaaattaaattctgtgagggaaaaatatgcaaattaacaaaacacattcaaaggttgaccccaggcttaaggcctccgattttccacttctgctcctggtctagcggtccagtgggggagataaaatacgagacatgttagatgctgtgcacagtaaatgtgcggtgtcataagagaggatagtgcttctggaggatccattcccctgggcattcatggggttcttgcatttggactggatatcaaaagatgggtaggatttcaacagacaggaatgtgagtgaaagtattccaggcagaggcaatgcagtctgcaaagacccaggtgggaaaaggggtcacttttaggcaacaatgaaaccagaccagagagcacaaggccaggggagaagtggaagatgcacctggaaaaaaatgatgggcacagaccatgatcactcatgatcacccctggagacaccctgcctccttccttcagttgccttcagagtaggaattctgtgacccctcttaaagaccacttgacattcaattacttcacatataatatgcctcatcttctctcaaaaattggactccaaggaaaaagaatgtctcctctagctgtaaatattgatggtgatactaaaagatgggacatcattcactatgcaatgggaattgttcagctgtccctggaagattatgatggcagtatttcgtaggatggactgaaagagatgctgaggatacttcaagaatctaggtaagaaatgaaggcctgatttatatgttggtaacaaaatggaagacaggggcaaccgaggtaggcctgaggcagaatggccactagtttagacagcactgggtgtgggcacaaaactctcatgcacccactttctcaagccagaaacctagatggcagtccccactcctaccacctatcattcagcgctaccaactttacctccacaacacctcttgaatgtgtcgtcttcctccctggtaaygtcattcctacttttacaccccataggcctccctgtcttggagagtcacccgtgaaacgtatcctcagcagtgttgccagagttgtctctccaaactagtctcaccatgtcatgaccttccctaaaaccaaccactgggtggaggcccaggactgtcaggatgagcctgagagcctcagcataacatagagggcctctgaagccctgggccctgcccaatagtccagactaattctcacaaatccctgccctatccccagattctcctactttgtgcctcaacaattttccaaacagcgcttcctacatgcagcatgcttttacatccacccaggccggtgcacagcattccttctgcttaaagggtccccagatctcttgccagcaccttattgccttcccagctccttattcaccatccaaacatctctttttacagcctctgtgccttgtgcatatttaattgcactgctactaatttttcttgtatatatcctgttccccacccctaagctgccatgtcacgaggacagtaattcatcatgtcatctctctgtccccagtgcctgattcaaaataggcacatgggtaggtgggtggatggatggatggatggatggatggatggatggatggataaaacacaagcaaactcaactgttagaatggagcgaagaagggctggggagtcagggaacagaatgctttgaatggcaaagtaagaacgaattcaaagatgactttttaatgtgtcaatgaagctgaagaagctggattatcgtgttgaaaactggaaaaaaagagaagacacatggggtgtatggggctgagaatgaactgatttgtgtgatatgaagagggagtggggttgtgagaggccaatgagcagggaaagggaaaggctaatgaaggtgaagcccagctgccaaggttataaagggactgggaattagatccaaaacctgaaatcatgcaatgctcagagcatttttatacaacaaaaaaaatgaaaatctgcttttgaaaattgaattcagaagagaatctcccactcttaggtgatacaggtgagaatcactcaacatctctggttgcatgtaattcttaagatatcaggggactctggtgcatattttgagaaagttctttttctttatcatggcccaagatgccacccaagggtaatgagcagagaatggagtctgtgttttgaagcatgaaagaagattgttatgaggaattggagggggaaggccagatgaacagaacaaaatggcttggccactctctccccaaaggtagggggcactggggtcagttgcagactccaaaacagtcagtaatctgttctggaaacctgaagctccctattgaacagcgcactctttcctcgagaaatggaagaaccagcactagtgaagtcagcccttcttctaaaacaggtactggtgatagagaggtgggcatgagatgggct

SEQ ID NO: 93735 - DNA, 15958 bp, Homo sapiens
acagtagtatttaattagaaattcaaaacaataagatatctagaagattcccaatttcagaaaacaagctacatactctgttggtatcggtcacttgggtcaaagacgaactcacaagaaaaaattcaaaacatcattaactgagtgatgataacccgatgcatcaaaatgttggctgcagctgacacagtgcttagagagaaacttacaactttaaatgcctgtagtggaaatgagcaaaggactaaagtcaattatatatgcttttataataagaaccctgaaaaaaaggagtaaaacaacccccaagttaataaacataagctgataataaaaacaaagaaaatcatgaaatagaaaaatgaacaaacaatagagacaatcaatggtcaatccttctgtactccatgcacaaaaattcatttcagaatgattttatatttaaatatatatccagaaccacagagatcttagaagaataaataagaaaatatagggataaaataagaattctgtgggaataaaaatcagaaagtagttgcctaccaggtagattgggagtagggcagggaattagccaataacaggcagaaaagaactgtctgcagtgacgaaaatgacctatacatttttgggttgctacttacatggacatatataactgtcaatgttcattgaactgaacacttgagatctgggcatgttaatgaatataaattacacctctttttttagatagaggaaagtgtcttggagagcttatggtggtgaaatttgggcagttctctggcataggctcaaggagcattcacaacatcttcagttcagaaatttgctgagaatggttttgtacccaaaaatatgggaaaagttcaaacatctatgataagagtcattggggcatacaaccacaaatccccactcttgtggtacagtgttacaggccaaaaagaatgagggtcgtgaccaactcagtataccactggaggctatttgagcaaacagaaaactgttctcatgaaagcaggacgttttaaaactgacaaactatgtctgctgccagaaggggtgctgaaggccgtcacacccccagtgcagtgttccttgtgattatctataggaacctctgaagctgttgtataaagaaagcaattatgtgtacctgtgataaatcaagcagctgaccaaccattatctctccctacctgctctttctacctcataaatacaaagggctttagaagctcagagctgcctttgctcactagaagcaaggagccccctgacctcttgttttaaaacatatccttttgtctttgtcttcctttctacatttgacccccttcgttcatgccgtagtaactgacagcaacagtacaggccatataattaagtggctatcactagacagccttccttcaatgatgttcttcatctaggaacccagagctctccagggtaaaatggcaactgaggttttggatatattgagtgggaaagaaagtcaactccataaaacagtaattggagctgtcaccattacaaatttctaaactttgcaagactgcagcagcatttcaaatgacactctgagagaggagagaatgggctcatgtggatttccctccaaacatatttactgcacaaaggcaaagttcacattacacttggagatttctctcagtctagtttaagatcacagattgcagatcccagacaactggaatcaaccaactagtgtcctgttaaggctaaacctaagaccctttaccacactacagccttacaattggacttctcttcctgttcctgggaagaattagagatatacattaaaggtcacttttcttctgagaaaaggcatactggaagagacaggagcaatgagtatgtggcaggagttcaaagtgataaggggaaagccaggagccacagaacatagaactccagggctaccttaggggatgaagtgaccagcactctgactcttctatccagctttttaataatctaacagttggagtttctttattttcttttagctacttctggcaatggtgaagacatggaatttttgccaaaaaaaatggggtggaggaaaataaagcatttgtgtgagtatataaccatttgatctcgttttcagccctctccagggtcaatctagaatcagatctgctccccagcatcttctgtttcctggcgagtgtttcctgcaatattggattggcaatgacaggctggagctgccttgtgacaggagcaggagggtttctgggttagaggatcatccgcctcttggtggaggagaaggagctgaaggagatcagggccttggacaaggccttcagaccaaagctgagggaggaattttctggtaagtaaacttgattcatggatgtgtggctccattttaaaccctgcatgggtgcaggaaggtgaaccttttctagcaagttacagaaagttgtagtcaaatctaagccaatcccacattcacaatcatcataaaaagaatattaaatagtataaatggcatcatgtgaaagacactggacggggtgtccagagactggattctggccctgacccagaacttgagaggcagccactttggacaccagacccctttacttctcatctagaaaatcccacatcagttatttttcttgtctacaacgtttttatgttctgaagctttttgtcttggcaattgctttgcaacatttataaaggacaccatttacctggagacctcaccagtgggtccctgcctttctagactgccctgagctttttgttttgtagcaaccttggcatctttagtgaaggcaaaataaaaggaagtgaatgtataggagagtgtgtaagtgtgtgtgtgtgccagaaagcgaaacagagagagaaaatgaggggggagagaaaatcagagagaatgagaaagacagagaatgcatgagaaagagtgagagagaaagagagcatcagtgatagagagagcccgtgcacaggcacacagcacagaacagagatggcaagaggcagtatgaggccagatatgcctcatttcgatttttcatatatggctttattttttaaccatttgtctctgttgctcaatagccaagaaattgcagaattcggtgtagcagatccttgtgcaaataaccccatgaggaaggtagaaaaggggttgcatccaactgaacaatgaaccatcaaagtccagaaacataaagcaacttgccgagaccatctaattaatgtgtagcacagctcagaccagagcttcctccagaggcttcctcacttgactctggagctgatgcttggcaaagtgggtcttcagtctctccctttgcctccctgggtgcccaattccctgtcctcctccccaacccagggtactgtgtgtctacatgtgggctctggctgtgtagagagtcatgacctgccctcagagaagcctctacttgatagcactcagggaccacacccaacacactgttcctcttttgctcttctctgacctcttccgatttcctccaccctctgttttaatggtgtctttcataaacaaatattaacacaaaacaagattaaatgtttgtaatccttatgtgtcaccagtatttacaatctaacacgtaataccagaaaaaagcaattctcagcctagaggaattgttccttatggtgaaaaggcagggaatataatggataggcagtggcctgtatgaagataaaaacaaagaatcctttcagtgttctttctgtgccaggcactgtgctacatgttttgcatgtgctgactcatttgttactcatagcaaccctatgagattgttaatattattatcctcctttcttacagatcaggagacagacacagagaggttaattaactcaccgaaggtcccagagttagaatattgcaaagctggatttgaacccagacagtctagtgcagcatctgtgctcttaagcagtagttagtctagcagcttgaggaaggagggaactatggctccaccacaaagtcccttttcctggtctctctagatccctgtgaactcattgaggaaaagccttttctcttggctttagacttcttctgctttgaaatggcaattcctttctgccagcctgtctgaagttggcagcaaaggggaagcagaggaagggagcaggaagtgcagaggtggaaatacaaccagagaaaattccactctcaggctgttacccgcatcctccccagcagcctcttccctgcctccccaaactgcagggcctccttggaggtgcctggcaataggaaggggctgggagtagacaaaacatggcaaaggcattaggagagtaaatggtcctgtctgaacccctggaaggaattgctccggtcttgaatttttcgctctgaattttactctcactgttctttggcctttgttgccaatttcagttgacctggtttattcttactctttctcagaaaagtttattctaaacagctaggcctgtacccggtgtacagagtacaacacttagaggtggggtgggcaagtttgagtctccactagaaacgtgaccttagatctgtcccttaacctctctgatcctcagtttcctcacaataaagtgggactcagaaaacctatctcatgagattgttgtaaaatgaaataagcaagctgtgagtcatatgcagattataaagcacaaacaagtgtagagtatttatccaagctccaggtaccacggttttcattgcgtgggctaattccaggtgacaactttactgtccgcgtaatgtcttgtggatttcagaggagcgtgaagacattaaagttgtaaccactgcccttggctagacagctggaatatcagttcattggtcactaactttcagcattgctatctgcttttgatatctgataagagtttttcatggacattcctcatttatgcccatccacagttccctagtaatggctccactctcctcccaatttcccaagcaggaaaccataggggtgattttgtcttctttttctctcagcccagatccaataggtaccaggaccttcaaggtaaggtctgaaattcaaacctgttttatctctcccctgctctgcttccactgctggaccctgcttccagtcctcatcgaaactttggcacagatactctgattaatatcttaattaccttactttctcatatcccctataccagtccattttatatcctcaagccaatgttgacttcctacttcacaattctgcttctgtttctctctctctttttttttttttttttttgaaacagggtttggctatgccaccaaggctggcatgcaaaggcatgatctctgctcactgccaccttcacctcctgggccccattcatcctcctgcttcagccttccaagcagccaggactatgggcatgcaccaatacgcctggctaatttttgtatttttagtagagatggggtttcatgaggttgtccaggctgatcttgacctcctgggtgcaagcaatctgcccacctcagcctcccaaaatgatggaattacaggtgtgagccaccatgctctgcctgtttctctacttgttccaaatataaataaggggtttctctgacatggtgctggagacccaaaatcatgatcccgcatcaccagcagaattaaattcaaattttccctcttataaccaactctccacaatcactctactccttttaaaaattttgatgggctttccatgaccctagcagtgcttatattccaagcaaacctgacagctcattgctcagattacatttctgaaatgagatggggtagaaacagatgtttgctctttcccaataaattgctacacattctgacttctgtgtctctgtttatttgttccttccatggaatgtacaccctccactccaacaccctgactctagccatcctcaaacacctatgcaacaacatctttatcaggaaacttccaagccagtttcagaaaccattccgataacctgtcccgtgttcacacagagctccagaacaagaccaagctgacagtgctggaaggagacattctggatgagccattcctgaagagagcctgccaggacatgtcggtcatcatccacactgcctctatcatatatgtcatcggtgtcactcacagagtccatcatgaatgtcaatgtgaaaggtacagtaacctggggaggagatgaagcaagttggggaattaaggatcggaaagacaaacaacaaaggaagagaagtccctccactgaacatctgctgtgcttttggccaagtgtctttgctgatcactaccaactgggggagttcaaagctgctatcttcagttttttacatgaggaaaccagtgctacagatggcaagtaacttgtccaaggccccccaggtaagtaagtaagtaggagaattagactttaaactcacccctgtgtgactccaaaggctgtggacactctattgtggctccagtcaaaagtcaactaaactccgacttcagactcttgatattcagccactctttgcctctatgggacagaatcaaaccttccaggtgccaccatagtcatcattttaaaccttgtgtgtaggcttataataatgaaatgggaaaaattccctcacccccctcaccaagcatgcaatgggggtgtggcttgcttcttcagtgcctcactgctgaaacctctatgggagcatacaggcaggcaggctgtgggactccgacaccatggcagtgtctggggygaaytgtacagctcctgaagccccagtgggtgtgtgttacatggtgctcttttagtcttgctcttttagttttgacatctataggcggcttgttttaaccagctaaattagaccctctaccttgtyggaaggtcagagggctttctgtatcctgggttcttgctttggttaccggaagaattggatcacacctgggcttggagaatgagtrcaaggttattttgagtggaggtagctctcagcagctgggggatgccagaaggggagggttttcccctggagtcggttgctcaatgacccaactcttctccaaccaccccagacaaactccacatcattttgcccatgggtatgttcctcccaaagtccagctgcccgtgtattcctttgctgatgtgttcctcygctgatgtgtkcctccrctgatgtgcccttcctgacatccagccccttctgtcttcttctgccaatctgctcctctcaatgtccagcagcttgtgcatgtgcctgctagggtattggggggttttataggcagagaatgggagcatggcaggccagggtggtcttgggaaatgcaacatttgggcagaaaatgcttgtcctcatctaggtccctgagggtgcagccctagccagaaaccacaccctccttcacccagcacttcccttccccgctctcatatcatttaaagggaccacactcttcccttcccagcactcccatatcaagaacattcaaagccctcctgcccacctcaaagaagttctcttgagagaactagcaaagctggttctcagaggtctgtcaggacagaattatccagcacatgctttctcacaatattttcttaacaaaaagagtttcccagtatgcagaatatgatctcttcagctcaccaaagggcctgctattacagaaccatttcaaactaggtgcccaaagtgcaccttcattcaatcctcgtcccttaaaagcttggtggtctttccgaattgcascttcccaaactactttaaattcagacacattcccttaaggaatctcgtcatgcagtctcaccctctgattcccagagtccagtctcttcagcaccatagcacccaaccacaggcctggccctccacattcagtctactctgatgccttttctcatgcaactaattgcttttgagtctccagtaccaaaaaaaaaagagaagaaagaaagaaagaaagaaagaaagaaagaargaaagaaagaaagaaagaaagaagaaagagaaagaaaggaaagaaggaaggaaggaaagaaggaaggaaggaaggaagaaagaaagaaagaaagagaggaaggaaggaaacagaaagaaaaaaacctttccagtttctactcgctcatttctttcagtacccctacagtgcaaggagggtgttaagagtaaccagtttttcatttgaattgttaactctccgcagctcccaacaacaagaaatgtgaaatgacaggggaagtgttagaggcatctgtttcctaaccattatcactccaagrcttagaaaatatttcacaatgttggtcatttcccccttgaaggtaaactacttccgcattttctctgccaccagattaattgttgaaaacatgaggctgtctctccagaaactcaaattccacagagactttaaacagggccaagaataaaaaaataagaaaaaataataatcctttgcctaggaaattccttccttcttcaagggaaggcactccgaacacctccatgagcttcgcttccacacagctcaggggaggcggcaaggtcctcccagtacaggtgttaccagcagagggcacactcctctccccagtcctccaccaggctccacaggaaacgccagggcagggtttaaaggaaggtttatcaccccgactttacataaccaggtaaacagagtcacagccagaattggaagcagctttcccagggaatgcacaatcaggaaaagagtgtgggtttccagcatctccccacaagccactgttcgctcaatgactccaggaatggtcctggtgacaaagttttaccagtccactcaaaatgagaaaaataccagcaattrtatgtatatttaagagtacatttmagagtgtatattgcttatatacaattgtgtatgggtgtgtgtgtgacataaattcttccagtgcccttttctgcctaaggactgggactgtccatattctcagagtataycttcctgatttkttagtttttcaataatctgccattaatggtattgatgtcacattgtaatttttcaacatcmttacttgrcaraatataaagtgataattctaggtcctttgccaaaattacagtatatacacacacacacacagacacacacatccatatacccaaaagtctagaaattcttgctccccagaacccacatgtcagtttcttttcattttggtgtttttcctatggctgtagcatggcccagtctcagtcagagtcacataagaatataccccgagtctgttataaccactgcacttgggaataaatatctatgcacgttgttggggccccttagttatatttcctgacactgacagaatgcttttcgtaggtaggtacccagcttctgttggaggcctgtgtccaagctacagtgccaatcttcatctacaccagtaccctagaggtagccaggcccaattcctacaaggaaatcattcagaacggtcatgaagaagagcctctggaaaacacatggtacgctccatacccacacagcaaaaagcttgctgagaaggctgtgctggcggctaatgggctgactctgaaaaacggtggcaccttgtacacttgtgccgtaagaccaatgtttatctatggggaaggaagcccaatcctttctgccggtataaatgaggccctaaacaaccatggaatcctgtcaagtttcagcaagttctccagagtcaacccagtctatgttggcaacatagcctgggcccacattctggccttgagggccctgcgggaryccaagaaggccccaagtgtccgaggacagttctactatatctcagatgacacgcctcaccaaagctatgataaccttagttacaccttgagcaaagagttcggcctctgccttgattccagttggagcctgcctttatccctgacgtactggattggcttcctgctggaaatagtgagcttcctgccgaggccagtttacacctgtcgaccgcccttcaaccaccacagagtgacattgtcaaatagcgtgttcaccttctcttacaagaaggctcagcaagatctggcatataagtcactttacagctgggaggaagccaagcagaaaaccatggagtgggttggttcccttgtggactggcacaaggagaccctgaagtccaagactcagtgatcgaaggatgacagagatgtgcatgtgggtattgttaggagatgtcgtcaagctccatcctcctggcttcatacaggtgacaagggcaaaagtccaggtcctgctgcctccctttcacataatagccaacttattgtcttcctcatgtcatcaaaacctgcccagtccctggcccaaccagaagctttctgtcctaatcatataccagaggaaagacaatgtgatttgctttttccatatctcagtggctgattccgaacaattgtagtctcttctaacttgaggtcatttttaactactagagctccatttctactcttaaatgagaaaggatttcttttcttttaaatctcctatttcttcacgcagtccaatgtaaagagcaataaatgttttaatccttaacctggagggaggtgtagtttctgttaatacctagttccctccttttcttttcatttccaggtatcaccatcttttacctaggagagtagcatggagctggggaaggggggttggcagagtagtgggaggatctggaagggcgatgaagactgaataagctctactatgtttcaggcatctacaacatgatctacatgtgacatatattccctcactcaatacttatcagaaacctatcacgtgggggtgactattcccattttacccttaaggaaacttgttcaccatcacactaatgattagtggctaggcctgctaccaggaagttggtcttgaaagactttatctttccctagaatcatgcagcctgaactggtcttatcagtggtacagcagagcactggagcatgggatgctgatacttgggagagccccagctttttggggttacctctttcttgcccaatctggtacaggggaatctctagaaccaaggataatccctgaggggcatctgaaagggtttgcatgcctttcctaatgggcctgagcagggcagagagaaacaaaaatgcatcaggcctccacccgcttcagtgtcaatttatttgaaggtctctagaacactcctggctatatgtgtgttggccattctgatcatacataaccctgcatttcaccctttcaaatcacacaatgagccacaccatgggttcctggacaagtacaaaaaacaagtgtgaacttcctccaaaatataccttctactcagcccaaaattagaagtctactatcccacatccccagatttaactgtctctctcttctttctccttctcttctctaaatcatatcctttcttcctttattcttccatatccttagcctctttcttctctccatctcctctttaatcactggttctctcattcttctcaatttccctgaagagaggaggccaatcaagacaagtttggggacttcagtgatgacatagtcattaaccaatcaatgaaaacacactcaaaagaaacactgtcaggggcatcagggacagagttgaactgaagcaggtgaggaggttgctgtgggtccagagtgtggagatggaagctgtctccctctggacctttgtgtatcacagccatgatgagagtcacacccaacatcaagatggcttttttcttacacaggaaattaacagatcattactcagttgaatttgattaccacaatggagttagtttcagtgttcattctgaagagaaaagggaaccacattctggcccagatgaacaggttaccaccatcttcaaaagcccaaggaacagatgatcatcaccagcgtcaggggggagtggccccaggcagtggggtaaggtgaaaaatgcaacacccagtggtcacttccaagatggccgaataggaacagctccgatctgcagctctcagagagattgatgccgaagatgggtgatttctgcatttccaactgaggtacctggttcatctcattgggactggttggactgtgggtgcagcccacagagggcgagctgaagcagagtggggcattgcctcatccaggaagcacaaggggttgrgggatttccctttcctgccaagggaagctgtgacaggcttgcctggagaaaaggtacactcctgaccaaatactgtgctttttccacagtcttagcaaccagcagaccaggagataacctcctttgcctggctcagtgggtcccacgcccagggagccttgctcactgctactgcagcagtctgagatagactggcaatgctgtagcttgatgggggggaggggcgtctgccattgctgaggcttgagtagctcacagtgtaaagaaagaggctgggaagcatgaactaggtggaacccactgcagcttagcaaggcctactgcctctatagcttccacctctgagggaaggacacagtagaacaaaaggcagcagacagcttctgcagacttaaatgtccctgtctgacagctctgaagagagcagtggttctctcagcacggcattccagatccgagaacagacagactgcctcttctagcaggtccatgacccccatgtagcctgactggaaaacacctcccagtaggggctgacagacaccttaaacaggtgggtgcccctctgggacaaagcttccagaagaaggatcaggtggcaatacttgctgctctgcagcctccactattgatacccagccaaacagggtctggagtggatatccagcaaactccaacagacctgcagctgaggggtctgactgttagaaggaaaactaacaaacagaaaggaagagcatcaacatcaaaaaaaaggacgtccacaccaaaaccccatccataggtcacagtcatcaacatcaaagaccaaaggtagataaaatcacaaagatggggagaaaccagagcagaaaagctgaaaattccaaaaaagagtgcctcttctcctccaaaggatcgcagctcctcaccagcaagggaacaaaactggacggagaatgactttgaggagttgacagaagcaggcgtcagaccttcggtaataacaaacttctccgcgctaaaggagcatgttctaacccattgcaaggaagctaaaagccttgaaaaaaggttagacgaattgctaactagaataaacagtgtagagaagacattaaatgacctgatggagctcaaaaccacagcacgagaactttgtgacacatgcataagattcaacagctgattcaatcaagtggaagaaagggtatcagtgattgaagatcaaactaatgaaataaagtgagaagacaagattagagaaaaaagagtgaaaagaaatgaacgaagcctccaagaaatatggcactatatgcaaagaccaaatctacatttgtttggtgcacctgaaagtgacagggagaatggaaccaagttagaaaacactcttgaggatattattcaggagaacttccccaacctagcaaggcgggaaaacattcaaattcaggaaatacagagaacaccacaaagatactcctcgagaagggcaaccccaagacacataattgccagattcaccaaggttgaaatgaaggaaaaaatgttaagggcagccagagagaaaggttcagttacccacaaagggaagaccatcagactaacagcggatctctcggcagaaaacctgcaggccagaagagagtgggggccaatattcgacattcttaaagaaaagaattttcaacccagaaactcatattcagccaaactaagcttcataagtgaaggagaaataaaatcctttagagacaaacaaatgctgagagattttgtcaccaccaggcctgccttacaaggctcctgaaggaagcactaaacatggaaaggaacaaccactgcaaaaccagccacggcaaaaacatgccaaatggtaaagaccatcgacgctatgaagaaactgcatcaattaatgggcaaaataatcagctaacatcataatgacaggatcaaattcaaacataataataaccttaaatgtaaatggcctaaatgccccaattaaaagacacagactggcaaattggataaagaatcaagacccatcagtgtgctgtattcaggatacccatctcacgtgcaaagacacacacaggctcaaaataaagggatggaggaagatctaccaagcaaatagtaagcaaaaaaaaagcagggaatgcaatctcctagtctctgataaaacagactttaaaccaacaaaaatcaaaaaagacaaagaaggccactacataatggtaagggatcagttcgccaagaagagctaactatcttaaataaatatgcacctaatacaggagcacccagattcataaagcaagtccttagagacctacaaaacagacttagattcccacacaataataatgggacattttaataccccactgtcaatattagacagatcagtgagacagaagattaacaaggatatccaggacttgaactcagctctgcaccaagcagacctaatagacatctacagaactctacactccaaatcagcagaatatacattcttctcagcaccacatcacacttattctaaaattgaccacataattggaagtaaaacactcctcagcaaatgtaaaagaacagaaatcacaacaaactgtctctcagaccacagtgcaaacaaattagaactcaggattaagaaactcactcaaaactgcacaactacatggaaactgaacaacctgctcctgaatgactactgggtaaataacgaaatgaaggcagaaataaaaatcttctttgaaaccaatgaaaacaaagacacaatgtaccagaatctctgggacacatttaaaacagtgtgtagagggaaatttatagcactaaatgcccacaagagaaagcaggaaatatcttaagtcgacaccctaacatcacaattaaaagaactagagaagcaagagcaaacaaattcaaaagctagcagaagacaagaaataactaagatcagagcagaactgaagaagatagagacacaaaaaaactttcaaaaaaatcaatgaaggccgggcgcggtggctcatgcctgtaatcccagcactttgggaggccgaggcaggcggaacacgaggtcaggagattgagaccatcccggctaaaacggtgaaaccccgtctctactaaaaatacaaaaaattagccgggcgtagtggcgggcgcctgtagtcccagctacttgggaggctgaggcaggagaatggcgtgaacccgggaggcggagcttgcagtgagccgagatcccgccactgcactccagcctgggcgacagagcgagactccgtctcaaaaaaaaaaaaaaaaaaaaaaaaatcaatgaatccaagagctgtttttttgaaaagatcaacaaaaaagatagactactaggaaaactaataaaaaagaaaagagagaagaatcaaatagatgcaataaaaaatgataaaggggatatcaccaccgatcccacagaaatacaaactaccatcagagaatattataaacacttctatgcaaataaactagaaaatctagaagaaatggataaattcctagacacatacatcttcccaagactaaaccaggaagaagttgaatctctgaatagaccaataacaggttctgaaattgaggcaataattaataggctagcaaccaaaaaaagtccaggaccagatggattcacagccgaattctactagaggtacagaggagctggtaccattccttctgaa

SEQ ID NO: 93736 - DNA, 61196 bp, Homo sapiens
acaactccttgcatatgataatgccaatacagagtgtcaaaatgctattagacctatgagagggaaggctcatttggctgaatatattaaggcttctgatggcattggaggtaacttaaataaggctactcttttagcccaagctatggctggactaaaggtgggaaaaaatatgccccgtttctcaggctcttgttttaattgtgggcaatttggacacacaaaaaaggaatgtagaaaagaaaatcaaaaggcaaaaactattaccatcaatcaacagaaaagtcctggcgtatgcccctgatgtaagaagggcaatcactgggcaaatcggtgtcattctaaatttagcaaagatgggcaacctttttttgggaaacgggaagaggggcccacctcgggcccctcaacaaaccaaggtatatctggcacattcagtgcccttacaaatgtacaacagttgtcccctgccacagcaggcagtgttgctgtagatctttgcagcacagttcccatttccctacttcctggggagccaccaaagaaggtccccatgggagtcaggggccctttaccctcagaacagttggtctattgctaggaaggtctagtttaaattttagaggtgtcactatgcatgtaggaataattgattctgattataccagagagattcaattagttgctagttcctcaattccatggtctgcttcctcaggagaaagaatcgctcagttgttactgttaccttatgcaaaactgggacgcagcatagtaaaaagaatgggaggctttggtagtatgaatccagcaggaaaagctgtatattgggttaatcaagtgtctgataagagacctatttgtacagtaaccattcaaggaaagaactttgaagggctagtagataactggagctgatgtttctatattggtttgaatcaatggccccagcattggcctaagcaaaaggcatccattggtattgttggagtaggggctgcctcagaagtttttcaaagttctttaattttgccatgccaagggccagatggccaagaagggacaattcaacctattacacctattcctgtcgatctatggggtagagacttattacaacaatggggtgctgaaatacctattcctattgatcagtatagtattaacggtaaacaaatgatgagaaaaatgggatatctcccagggaagggactaggaaaaaatgaaaatggccaaccagaacatttagaactaaaaggacaaacagatcaaactggattagggtatcatttttaggaacggccattgctgagcctccggctcccattcctcttgtttggttaactgctaaaccagtttgggtggagcaatggccactgaaacaggaaaaactggaggctttaaaataattggtacagaaacaattacaaaagggacacacagagcctactctctctccttggaattctcctgtgtttgttattaagaaaaaatcccagaaatggagaatgttaacagatttgagggccgttaatgctgtcattctacccatgggtgcactgcaaccagagctgccctccccaactatgattcctaaatcctggcctctaatagtgataaatttaaaagattgcttctttaccattcctttagctacccaagattaggaaaaatttgcttttactgttcccgctataaataacaaagaaccagcagacaaataccattggaaagtattactatttgtcaaacttatgtcagaaaaggtattaagccagctagagaacaattcaataaatgttatattatccattacatggatgatattttatgtgcagctgaaactagggaggaaaaggctgtaacagcagcaaggttaatcatagcccctgataaaatccaaacttctactccctttcagtatttaggaatgaaagtagaacaaagtactattaagcctcaaaacattcaaattagaagagataatttaaaacctctaatgattttcaaaaattattaggagacattaattggattcatcccactttaggcagtcctacttatgttatgtctcacctcttttctaccttacgaggtgattctaacttaaacagtaaacactccctgtccaaggaggcattagagaaacttcaattaattgaagaaaaatttccacaggcacaagtgactcgagttgacccattgcagtcattacagtttttagtttttcctactaaacattcacgtacaggaattattgttcaacagaatgatctggttgagcggctttttgtacctcacaatacaaccaaaacgcttactctgtacttagatcaagttgctgtattaatgtagtgtgcaaggctgtgcacaacaaagttaatgggatatgatccaaatcaaattatacttccattaaacaaacaacaaattcagcaagcttatattaattcccaggaatggcaaattaatttggcaggttttattggcattcttggtaatcattatcctaaatccaaaatattccaatttcttaaattaatatcatggatattgccttccattactcaaaaagcccctattgaaggggccattactgtttttactgatggatctagtaatggaaaggcctcatttgtgggacctcaacaacaagtttttcaaactgactttgcttctgctcaaaatgctgaacttatggctgtgataacagtgttaaaaacttttaaacagccaataaacactgtttctgattcagcctatgtagtgcaagccacacaaaatattgaatgtgccttaattcaaaatgtgactaatgaccaacttaatcttttatttcattctttacagcaagcagtacaacaaaggcattcccctttctatgtcactcatatgagagtgacatagccctttaaatttaatcaaagggtggataattatatggggaataggatttgcttgtgtctctcaggtaacaatcaggtgcctgtatgagtgcccaccaaacatctgaaaatctatcatgagctacagcaggaagagaggactctgggaagagtcctctgaagagtccagagacgtggtttcacggtgttagccaggatggtctcgatttcctgacctcgtgatccgcccacctcgacctcccaaagttttgggattacaggtgtgagccatagcgcctggccattacccggcagctttgttaaggcctgcaatgaggcaagtaatcatatagttacagaygcccagctggggtctgtgggttggtactcccaggaaggctcttcctggggaacagcagtggctcctatgggcttagcaggatcttgcccatgaagatcgtcagtgtgtgcctgtgctacaagccacactctttccttctcttctggaaggagagtatagaagagaggataatgtagagatcatgccaagtgagttcataagattgggtaagatatttaaattctttgatataagtatcaggatcggaggagaaggacctgagacgtttttcaatctgtgagagattggagagggagaaagggaaatggacacggatgatccccttgctcctgctacttcccagagaggaagcaagggaactggttgctgagtatgttgggcccaagagcgggtgaggggtggagatggagaggactcagagtcagaagcggggtggttggagagagggggacagatgggtagagccagagcagggacataccgtgaagaatcatgatgctctggtggaggatcaagatgctgtcagggaggggcaaaattggcggggtcaaagaaagaggagttgtcggctggggctgttgcgggggtggtgggagacaagtctggtgagtaggatttggaaagtggagcagtactggcagagggaagggcggttayggagagtgaagaaagcctgaacataaggaatctcagaccatttcccactgcgatggcaaaagtcgtctaagtctctaagtatattgaaatcaaaagtgccattttcaggccattgggagccattgtccaattggtattgaggccaagtggtattgcagtaaaagataagcctcttagaacggacctctgaatggaggctgagagccttgagattgcagaggagacagccaaggcgggtggtcttgggatgggtagactgagaggctcccatagtgaatggagggtggggggtagaggaagaagagactgcagatgacaaggatggcgagagagggtgtcccctgtcctgcaggccttgtctggaatagaggcagccaccgagtcaggtgtccttcaggtctcctctattctggacaaggcccttgggtgaggggtgataggagagagagaggggaggggggagagggagagagagagagacacctctaaggacacgcagccagagcctgtccccttcctgggtttcggcaccaaaatgtaacgttagctgagagaaaggacaagagagagacccaaagttaggcgagtaagtttatcctgccgggctgctccaccacagtcagaggaggcagccctggagcttataaaatgaggggttcatatgggggagagagaccctggggttgtcggttaactttaccacatatcatctcgtgaccgcttacaatataggaatttagaagagggtgtaacttaagtttatccacatttctcgtgaccttccccatgctgcctgttgggctgtaagcaagtctggtgaccttgctgtagcacctagataagggtccaggaatgcagcttcggagtattcagggtaagggtcagctgcattgtgtgtggggcggggggttcctggggcaacttgtccctaacagggtcaggattagttctatctggttctctatttgctgtccatctgtaaatgctgagaatggcagagggaggccaagtgtagataatcaggttttagcttttttggattttcctacttctcctgtacaggaaataacttattgtctaaaccccatactatcccattaaatgtcaggagtgctgtcttaggcctgaattagctcatgacgttacgtactggaagtcccaggaggaatgcccagcaagtggaatccaagacgttctcgccttctcggggacagggccatcaccaggattcggaaaggaacagggaggttcggtttgtgttccagttctgagccctttacctcatccctcgagaagctggcctttgcaccccgcagccggtgctgcccagccgaccacgccatgcaygggaggcgactgggaccccacttgcctggcagcccggccggagacccagctgcctgggagggtccgaagataatgccaggcagccctggcgggccgggaagaccctctgtccctcccgtttcccagttcttgaattaggggagccttggactggctggcggcgcaggaaagtgcaggagggcggatgtgggacctgctgccgcccagggagacggtgctctgttctttggaaccagggaaaccgtcctccagcccacttgccccaggcgggagcaggaagatcctctccgggcagagatgatggggaacccgtgcagccagagggtctccctggcaaaggtcgggggagggggcggccgtaacggccccgggcgctccggcacggagaagccaagggggttctccaagcagcctccacccaccagcctcgccaggagagcgtggatacccgagcggccccaagcgagtccccggggactggagggccgaggggcagcgcccggaacaaaggcccgcagaggggtcctggagacagcggctccccgggggcggctcccctctctcccctctctcccctcctctcctctcccgccagctcctccttctcctccccttcctcccccagaggcccggccggctcgcggcccgagcagcgccaacttcgccaacggttcccaagttgccgggcgcgcaggggtgggagctgggtggggtgaggaagaggaggaggaggaggagaagggctcccggacgccttggacgcggttcaggaatccgccgccgctagccggctcgggcctgagcggggagggcgccaggcaggacctctcgcaggctcgctgcgcaggacggcgcccgcctggcgccgcttcccttccagcgtgccgaccggccccgcagcgcctccatccctccggcccgccccggagaagacgcacagctcgggccgcgcgggcgccggggccgcggaaccgcttctgccgggatcttccaggaggaaagcgaagttgcgagcggatgctgcccgcgccggaccccagccgcggagggtcggggccgccggtggagtctcggcggccggggtaagtggggcgccggcgtcctggaaccgccgcccagcccgggggaggccgcccagccgggagcccccgccttccgcgtccaggcgcgcgcgccaractttggagggagaagggggcgaagcggacggtgggaggtggagttcccagctcggggaaaagcccaggcaggcacccacaacccgctgcaaccggatcacacctgccaggtacacacagctcatcgccactcataccccgcacacggcgcaggctgatctgcgcacacccacaccggccaggcacatgccacacaccgaaatgcacattcctgggagcgcgggggatttggcctctacagcaggcacgtcctcacacccctccgtcacatccacggcctttgtctgctgcccccgcagcccccaaggagagggagcccccaaagcgcagcgggcaggagagaggctgcctgggttttgaaaacttgtggccagaaccccgagaccaaggggagcagatgttgcagtcggttctcggagttctgcaggagcgaatttggtgtggaaactcggtgtctgggtgatgtgtgagtgtgcgaagcccttccggaggcgaggcccggagagaggagggagtgattcataaactcagagccggcgtgccagggtctgtgagcagcgtggaagaggctggcaggccgttgctgcgctagacagaagggtagtggccgtgacagtcttccagggaagcagggacccttccccccagcggatgtgcttcctccagggacttccaagggaaccgggtgagcagattccagtcctgggtgtggacggggtaaggggaggtggggggatttaagcctaaaaggttagggagaaaccaaggcaggcctgacgccttcattattttccttgcacctgaagttgtgtttggtttctgatgcgtggtgttgctgggccccaggatgtacgggggattgtcctgggcctagcatagtgcctggcacagtgggcactcagtcagtacttgcttgatgaataatgacaccggtaattatcattcattatggactcactgtgcggcaaggccagtgggcctctgctgggttgaaattgattttccagcagagaagggggcctgagtagctcctaggagccctgcctgatctgcttgggccagtggcccaggcactgtgtgttccactgtgtcccgtgggctggccttgggagactggagctcatcattggcctctgcccctctaagagggcagcaggaaaagcttcatttctgtatctggctaagatggggttgatgtgggttttggtagatggcaggctgtttggcagattctgtggggtctcaattgaagaataactttagatctgcagcagagagaggggttggttccatcaaccctcccatctcctggctgctggagaagaggggtgggtaagtggagaaagagatgggccgtgctgctgggcatgtgctgggggtaggaggaacatgggaacatgtagaatttgggggcagccgtttttcttcctggctcctgatggcctggctggagatgggtctcatgaagggtctaggagctgtgttctgcagcagtggcttggctctgtggtggcagcaggtagagcagtggtcacagtccctgtactgagtattgctgtgggttctcctgtgccagcttgcatgagtttcccagaggagcagaaacattcgtgttcctggaactggattgccagtagtcttgggattgagagtgcacaaagatgtgggggtggcctgggcatgtcatccaaaagaaatgtgtcattccccacccctgcccccttgtgaagagctctgactaggttcagtgtgcatttcaaacttctaaatgctgaaattagcaaggcatgtgggcggcaccaaggactggcctcagatgaaagaggaggtgatctgggcttgggcacccccaatttcaggtggaaccctgcagccagttccttccctatatcacctttccaccttcattatgccctctgtgaatcgagagttctgtatacattttctaattaaatcattatatccctatgaggttagcatttcatctccattttgcagattaggaaactgaggaccagaaaagttaagtaactttttcaatgtcacacaggtagtgagagacaaagccagtgtttgtgtatttggtttttttaaactttatgttaggttcagaggtacgtatacaggtttgttacataggtaaattgtatgccatrggggtttggtgtacagattatttcatcatccaggtagtaagcatagtacccaataggtagttgttgggtttgtttgagacagggtctctattgctcaggcaggagtgcagtggcacgatcactgccactcaccatagcctcgacctcctggactcaggtgatcctcctgccccagcctcccgagtagctggcaccaccatgcctgactaatttttttgtattttttgtagagacagggttttaccatgttgcccaggctggtctcaaactctggagctctagcgatctgcctgcctccacctcccaaagtgctgggattacaggtctgacacactgcacaggcccgagatgggtggtttttgatcctcaccctccccactgtctccaccctcaagtaggtcctggtgtctgttgttcccttctttgcgttcagatgtacccaatgtttagctcccacttctaagtgagagcatggggcacttgattttctgttcctgtgttagtttgcttaggataatagcckctaactccatccatgttgctgcaaaggacatgatctcattctcttttatggctacatagtatttcatggtatatatgtaccacatttctttatctggtctaccgttgatgggcatttaggttgatttcatgtttttgctattgtgactagtgctatgataaacatacgtgtgcatgtatctttatggtagaacaatttatattattttgggtatgtacccaataatgggattgcttggtagaatggtaatcctactttgagttctttgagaactctccaaactgctttccacaatggctgaactaatttacatacccatcagcagtgtataagcactctgttttttgttttttgtttttggtgggagtggtgggatggagtcttgctctgtcaccaggctggagtacagtggtgcgatcttggctcactgcaacttccacctcccaggttcaagcaattcccctgcctcagccccctgataggcgtgcaccaccatgcgyggctaatttttttttttttttgtattttagtagagacgaggtttcaccatgttggccagaatggtctcgatctcctgacctcgtgatctgctcacctcagccccgcaaaatgctgggattacaggcatgagccgcctcgcttggccagcactcccttttctccacaacctggccagcatctgttaatgtttgactttttaataatagctattctgactggtatgagatggtatctcattgtggttttgatttgcatttttctaatgattagtgatgttgaccgttttttcatatgtttgttggacacatgtatgtcttcttttgaaaagtatctgtttgtgtcctttgcccactttttaatggggttgttttttgcttgttaacttgttcaagttccttatagattctggatattagacttttgtcggatgcatagtttgcaaatattttctcctgttctgtaggttgtctgtttactctgttgatagtttcttttgctgtgcagaggctctttagtttaattaggtcccatttgtcaatttttgtttttgctgcaattgcaaagccagtatttgaacccagattgtctaactccagaacccaccctgtctccaccatgccaggctgtctgcaaggcccttattggttctccatggcaacagggaaacagccctgatgcttcttactaacgtggtcccagggcctctgcttgcattcttctttttccatacactctgccgagcctggatataccttaggctgtgggaatcaaaggctgggtggtaccaggctgctggagccttctgtgtggctctggagtcagaaaactgtggagattttgggggggcacacagggagatgttgcagtaattccagtgagacatgactcactgcttatctgagaagttgggacaaagctgcctcttgtgaccataccgtgaatagggaagaaattgccaggtagaccaaacatcctcaaatgggttactgtatttttttcccctttttggtcctctccagggtaatctattacctggggaaatcagccttcacctgacacctcctattgtcatttacctggtgaacataaggggccatgtcacagctgtccttcccacccctgccacgtgttctggagagctggactcctcagcagcacctggtccacaggagagaagaatggggcagagcsggagcagccaggggaggtgataaccacacgctcatctggtccccagctcttgcttttacatccacgccccacagggagacagcaattatctgttggccccactttacagatgaggacatgaggctcagagaggtgcagtggatgcccaaggtcacgaagccaggcatctgcaaaggcctgggacagccacgttttcagtcggggtggtattttctatccccggccccaagggctgagagtggttatccctgctggggcagggtcctcactgctccacccaccctcatctctgccctgagagcccccagtacagatgtccatagaacgggaaaggctggcgcccttcaaaggacgcaaagagcattggatgagcactgcccagctgrtccctgcccaccttccacaggaagcccacctgggtgagttcttagagccttcctagtgctgagctgcaaagaaactggagccctctccccctccactgcagaggggacacastgaccaggacggaagttgggggactgggtgtggggagaagccaccccactgcaggggccggggctgtccatctttgtaccyctggttccatcccagtgcctgaggcatgggaagttcttggaaatgtagtcagatgctgggtgaagccccaggaggggccgtgaatgcttctgctgggaactcctagagtggcggcacagagagggtctttgctgcgaaggaacactcagagmgtctctggctttcgtgaggttatgcctcaggagaggagacacttctccttttcattcgttaaacagaaatgatatttgccaccttttcttctctaaggcctaaagagatgacagaatgctgctggtcctaccctgagcgcgtggactccacagcggggtgtggggtggcccctggcaggcctggacggtttgttctgtgcttgccggtggacacgcttcagccctctgtctctattgccccaaatctggcctgtggctgctgggccgccaccagcttggagggcagggtgggccccgggagcccctgaccaccagtgacttcttgtctccagctgccctccgtcctcttgatccccctcaccccccaccacctcctcacaaagatggctgtgtgctgagggactgtggcttccctgggccctrggaaatttatcactgaggtttcagaggactctatgaaaaggatttggagaaaaagtgtggaaaataaacaagccagttcccagttcagcctctcctgaatgccgcaagtaaacaaccacctcggaggccagcccgggatgttcttatttggcctctgtggttacacctgccccctccccgcccagtccctcctccttaactttaagagcctcaaaagtcagggaacacaccctccgctggccagtccttgtgctgcagggacgctggtggctgggcacaggaggaacatgtatatgggagagaagacggccgggggtcccagctcagccctgctccctctgagtcagtcccaagcctggaccctccccagcaggcagacggtgacgtcttggttggttggtgagtttaactttgatggtgcagaatgatgagacttttctccattttgtggcatctgagaagctttgcttcttaaacattgctttagggtggatagaccaaagctaattttcccgttatgtctctccaagacggggcctacctgtgagcaaaccctcatagattcatttactttgtaggctacctggacaaaaatgtcaggtttctttgctttgggctggagtcctatcagctcaggggtggtggtgtaaggtcacaccaatgatttccagaaactcaagcactattctgagtgactaagtctgtgggataggaagcacattttccatctcttaataacttcaatttacttagtgaccaactttaaaaccaggcacccggttagaagggggagagccagggcttggcagcggagggtcctcaccttgcatccagggagtggctgagggcccttctcgttctctgtggctgtgctgagctgagtcagcgagccctgaagcctctgggatttggggagtggggcactgctggaaggttctggttcctgctttgttctgctgctgccaggcttctggagagggtggttgtggggtgagtcctgcgctccgcacgtccacatgttcgtattctacatattgggcttctgaaaaaagttctggttcataagacggcttcacagcttagccgtctgcagaccagtctgcaggttgatcagctttctgtcatgtgtgtgctgttcctgttcacacatgctgcgccgatgcccgcctgtgcctgtgccagccccagcccacacagctacctgagatttagccctgggcatctcccctaccctttcccgcttccccctcctctcctcccttcctctccagctgcctcgccatctgcaagattctggaaagtgctaatgtgtctgagccaaacagtgctatctgaggaaatattttgaaaacacactgggccacccccgtccccgcactgtgactacactgattttcagcaaggaatttcactccagccacagggcagggccgcaggtgcctggctttcctctggagacttccaggggcttgttagagacacggagagaagctgagggcctgtcctgcaggtttgatgtgtctgaagaggccccgagaatagaaatctagaacctgccagtcacgaagcagtgtcacccaccagaggatgaagaactgactgtgacctcgcaggtcacccacttgctttctttttaccgagacatgctatttctctttcacttttcttccttctcttgcatctggtgtaggtgcctgggggtagcgtgcccaggaaacaataatagtaagagcagctggtgtgcctaatactgccctgagcacctacaaggcgtcctcaccgagttctcaccagaagctctagaggtggctccggttattcccaccattttacagatgggaagacagaggcagacagctggataagttgctgacatgccacagccggtgaggggcaaagccgggcctgagccccacagctgactccagagtctgtgctctcagtaccacctgtgcgtgcgtctgtcccgttgtggctgcaccgagaggagaaacagcacacaggcattcattttcaaaccgtggccagtgcatgtcattgcgttctgactgggaagctctggcaatgttggcgttgcatggcctattgtgggcactaccagtgagcctcggccttctccaggtctgactccagtacctgccggctgccctgggcagggcattttggatcctgcctcagggtcttttgcccgctctgctgatgccactcccctgtgccctgacctggtcacaggaagggtgcagatggcagcgagtgtggtctcagttagcaagggggagctggcagatccagggacttctgcctccctagtggccattccagcaagacaggaaccccaccccgagtgatgtctggccctgtgacctttcagcaaatatttcttccccagcctcacctggactcggtatcccatgttccaaattgtcctaatttcccagacacacacaccctgctctctgtagccttcccagctgccaagaacattccctccttcccccttttccccttggcttggatgccaccttctcctggaagcctgggtggtggccctccccatggctgcccacaggtccccctcactgccctttgcccgtggtattatgattgctggttcagtgatctgtggtctgcaccaggcaatgggatgtgcaagggcaggacagctgtctgccttgtccatccttgtagcccccgacttagcagtgaatgctgctacctgattatggaaggaatgagtgactgatgtggcacagagccctcagtggggcaggcccagtccaggatgcttctgtgagggagcgcttcgagtctggggagggtggcaggagtcgtggtgagcgggaggggtggctaacgtgggccaaggaagggacagacaggaagagtgggaccccggcacatggcctcttgaggtcattaccccatgggtattgggctgggatactgaggatgagcctgaaacccttccagaagcccctccagtcctgccacttgtctgcctgcctgccctggatgcccgtttttgggctggtggctggctgcactctgggcccactgctcaaccccaccagcaagtggagagccattcaacagccccagggtccagttcccatctgcaagtaacgaggcctgccgtggctgagtcgtttccctgagcagagagaaggaagccctactggccggctgcctccccaggggtgggtagaactgttctgtggccccacctccagccctcaagctgtctgtccttgcaaaagtagtggggcacagagtgctgggttcttgggcatcacctgtccaggtcctgcgcgcctatgctcatgctgacactgcaagatggtgggataacaggagggactttcaagctggaagagaggagagctgggtgccccagtaaccacctttgagtcccactgtgatgagcccacagaggtggacatgagggaagacttggggaagccttcctagaggaggcaggcattccagtgcatgagggaagctgggcaaaggcacgaggatgggaaagttccgattgaagacagggactggtgaggagtctggctggactgaactgaaatgtataggatacacgaggagagacaggcaggatggagttgtggttacgcacacaggctctagagccgggctgccttcacgggaaccccaactccccacttactggctgtgtggccgtggccaagttgcttaccttctctgagctcagttttctcactactggtaccccccacatggggaagacatgggaataaaatgtatttctatacaagtgttgagagcagtgcctggcacactgagcatcaggaagggtgagctattattatataggtatatgttttaatgcagctagaaaaggaaatygaggtcagatcatagaggcccttgaatgtcattctttccattcactaagcacctgccatgtgccagattcttcacagtcattctcaccaagccccctacaaccyggcaaggttgttagcaatgtctccatttcacagatgaggaaactgaggctcagagaggttgagtaacctgcctaaagtcactcagtcagggagagtcagagccagtaataacacccaggtctgctgtcgcttgagtcttccctcaaagtgaagattggagagacatggcaggggcatcacagggatgagccctgggctggggccgcagccaggagcagagcaggaatgtggcaactgtgggtccctggggcagggtggagacggggagagatgccaggcgggcctggagggtagggaggactggaggctacagcatacagctcaccattcatagcccagggcaaaccattgagtcatttggggaaaacatgacatcactgagtctcactgtctgccgcccacctgctgtctgccctctatggttctcctgatgacctcagtgccccaagtcctgcaaggggacccgcacaccccatgtagcagggccaggtcagcactccagcttcctgcactgggttctcctccccagccactgtctcccaccttcccaccactcccttccctgcctgggtcccctgccccagccctactcatacacactgctgaggcagaagcttctggaagtggtgatgggcatgaagagcttccagaagggcttccatgccaagcccttgattggaattctgggtggggaggggacagctcagaagcctgtgtcgagcttttagagttgcttttccttgagaatggtgcctgctgtttgggtgggatcacttttaaaaagtaaagcctggtagagctatgtgaccagcactatgccatgacctagaggagattcagactgacgggcaggccctgccttcctgcagaatacagttgagtgtctgagagttctttctgtactaagcatctttgaactgagtgctttattttcgtccatctgattgcgcgaggtagtcttattttacagatgccatccccgaggcccagagaggttaggcaacttgtccaaggccacacagccaggattcacacccataactgtccaactccagatgtgctcttagccactctgccatccggccacaaataaagccaccagagaaccacagaaggtggaacatatccaacatttgcccgataaattgtatagtgcagacaggaagtacagggagttttcatctcaaagtgtaggtcactccccagagtggcttgaagtctgtagatccatttaggagaacatccagcttcactggctgtgcaaatcccacccatgcggctgtttggggtgagaagtttctttaaatgtctgttgactctcttctctggaaggagcacgggggctcagggggcgcctgtcctggcattggtggccacacctagaaacggactatgaatcaagccaggggcccagtgccagcttccttggcctgtctgtgggcgcagatgccagcctttgcagctgctgctgcaactcacagctctctcccggtgccgccctcagtcaggccagctggagtggaggggccagtggccgtgccctgtgcagaatgacatcctctcaccttcacaagggaagcgtgattatccttgctttccaggtgaggacactgaggcctagagaagttttctggctgtctgagctcccttggcctgagctcccgcggtagaaccgagactcaagtcttctttctgcaggcagatggccagtttcttcctggaggagggaggagccagcttgccctctgacactgggtagcacagccctgttcgattctctgttcggggcttgcacttctgattcattctgcagtcactggctctttgtggttcgggaaaatgaccctctagggtaggagaaaagctcttggagcacttttgaagccatagaggccctttccaggctttggaaaatgttccttctccacccagatgccaacaccaccctggtcctggcagtacttgtccctggaagggcctcactgcggtgactcattacccagcatgcagcacattgccattgctctcagtgggcaggtgctgtggggacacgggtctgcgggcctgctgtcttcaggggtcccccatgccttttaacgcgtgtatcagtgtaccccaagcctcagttctgtgtagtttgtacaactctggcccctaccccaaggatttctgggaagcccccaggaatgctgataagttcacagtctgccctccccagccccagtctcatcaggcttcaggggtggccattcctcccctccaggagagagagaactcaaaccagtaactacccctcctcaggctcaggcccaatggttgctgtaataatttctggggagctgtctttgctcttgcagagaaggcaggccttgaattcagactggaggggccatttttcttccagttgccctcaaattttcctttctgtgataggatttgtcctttgtctctgcttaaattcaaagacttgttaaaatgacttttctcaaacaagaggctaccctcaaaagaactttgcctctacggatagaaaactggaacctacttttattttggttttagttttattaaattgtataaaatcaataatacatgtccatggtgcaaagttgaaaaggcacaaaacagtctatgtgtggtctctttcccatgccggactcagacactcagcattgttagttttgtgtgtgtgtgtaagctgtgtttaaattgtccagctttaaaacaaaacccttccctgtttcacaattaggttgaccgaggcacaacctgaaaaataacctggaaatagcatcgggccccctgcagcgtccagctcttcccgaggactgttattatgataacgatcattgctaaggctgtcccttcccaaaaagtgttgctgcccacagtcccagcccccagacctgagcagtcacccacacagcatgaatggggccagccccagcctgcccgctcagcttccaagcctagcagtctcaggctctgggctaaccctggcctcccagctgccccttcaacattgtcccctcttgtcttgcagggcagtagccacagctggggctgtsgggtcagggcatggcaagggtgatctgaccaaactatgctgcctcttagccagactgtatattcggagtcccctaagctcgatttttttttttttttttgagacagggtctcactctgtcacccaggctggagtgcattggtacagccatagctcactgcagccttgacctcccaacctcaagtgatcctcccacctcagcctcccaagtaggtgggactacaggtgtgctccacctaatttttaaatttttttttagagaaggggtctttctatgttgcccaggctggagcttgattgtttgtttgtttgtttgaagacagggtcttgctcagttgcccaggtttgagtgcagtggcgtgatctcagctcaccacaacctctgcctcccagattcaagtgattctcctgcctcagcctcctgagtagctgggattacaggtgtgcaccaccacacccagttaatttttgtgtttttagtagagacagggtttcatcatgttggccaggctgatttttttatttttttaaagaaggtctcccaccagctggatctgagccactggctgagaagtgaagtccatgaagcattcagcaatagtaacagcaccaccacctcctcatattgaacctgcctctgtgcttcttcctacgccttcctatgcctctatgctgacttctggagaagccagtcacttgcccggtcacactgtacaaagtggctcagggctggactcactggcttatgcctgtaatcccaacactttgggaggccaaggtgggyggatcacttgaggtcaggagtttgagaccagcctgaccaacaaggtgataccccatctctaattagctggacgtggtggcaggcggctgtaatccagctactcgggaggctgaggcaggagaatctcttgaaccagggagacggaggttgcggtgagccgagatcacaccattgcactccagcctaggcgatagaccgagcctccgtcttaaaaaaaaaaaaaaacaaagtggctcagctgggcttggatctccaacatgctgggccccagtcaccagattcctaaccccgtgctgccaggcttccccggacaatatcatgaactcaacaatccgctcccttcctctgcagggcaacctctcattccccagagctcatttaataacaagagtagtaatcatagttaaccttctttaccctttactatgtgcaaggcattgttctagaagcgcacacatcgatcatttagtcctcacagcgctcccatgtggtaggygctgtccttatactctttttgcagataagcccaaggcacaggagcctgcctggtaagcagcccatgtctaaagggcagtgaagaaccggcctctagggaatgcagggctcctcttgtacccagaggggaggcgccctgcctcttctctgttgagcctttggaaatggcctccgaggggcccctgctcagcacagctctgtgggccaagagcaggagtgtttgaggcacagatagacgatgtctggacccctccccaggatgcctccccatgtctgaccttggggagtccagtgccaagggggaagttcaataacataccaggtttctccttggccctgggacaggttccttccctttccttccctcctccctgcatccttccttcctttcttccttctttccttacatatttattcagtgccatacagcgatagcgcacacgtgttacctctaatacaaggtgaaaagtgatatgaatggtgcaaggtagagagaggaatggtgctgggagaggaacgtgtggtaggaggccctcccttcacatcctggcctcaaacctccagccggtggccttgggcgggtcgctcagcgtgtctggacctctgtttctcatctggataatgaaggagagggtggaggtgaggacccaggttgcctgccaggctcttgtgagaattggaggtgtaaaagggctttcttttttgtttttttagacggagtctcgggaggggggttagatggcgggagaggggttagatggcaggagaggggttagactagtcccctgggggattggttatggctgtgggggaagtcggagggaggctctggggatgtgtagggtttgggctcggccttaagggatgggtggaatttggccaggcacagatgggggaggggtggtgctttgggcatcaccagccctaggctcatggttgccaccctcccttccggtaccgccttcccttttctgcatttccacccagagatggactctcagctttgaattctttttaggaagtgactttattgtttttattttttttctctatctaaggtagtcagaatattatttttgtgataatgctagatgcttagtatgtaaaattcaagtacaatgggtaaatacagagaagaatgcagcaaatcaccaccactcccaccacccagatggaactgtttagttatttggtccgtatgcgtatagacacctcagtaggcctacccggtgggtgggagtgggagcatgggggctggagggccagaaagttttataagcacagggaaaatgcacagtttaaatttaccttcaggccagagttggaaagattgtctcacctgaaacagtccttcccttctgtccgctgcctacatgactgtatcggatggggaaagagggaatggggaactttcaggccatggccttcaaaacctccccattcagacaaattacagaaaaggagccagtctcagtgagcatattccagctctagaacagtggctttccaacttttagactaaaacctcagacacagacacccmcacataactgaaacaaaagccttatgaaacccatattttagctgggcacagtggctcatgtctgtaattccaaacactttgggaggccgaggtaggaagatcacttgagcccaggggatcaaggctgcagtgtttgcagcgttgtactccaacccgggcaacaaagtgaaaaaagaaactcatgcttatcaactcatgcttatcattatgatacagaggcattctgatattttctaatctacacaatgctgttgtgtttaaaaaagaaaaaaaaagcttatcttaacctaccaaattgttggcacagcctgcagtttgagaaatgtcactgttgaccagcgattttcaaacgttcgtgtgcatcagactcaactgcagagtgtgctaaaacaatctgctcccctctcctgaggttctgagtcattagttctggagtgggacctgaggattcgcatttccaccaagttcccaggaggggctgatactgccagtctggggaccccactttgagacccaccctcctggggtgtttttaaggcaacatgctcccttggcaaagaccatcaggggatttgctttattgaatggatgagaattgctgattgctaacatccgaacggtggatctctgagatacttgaggatgctggtcaggcattgtcattgggatctttaacaccaccctcctaaaatccagctcacactattaatataaagtgttgcatgtagaaaaggcctgctaagcaaagggacatttatgcctagccctagttgaattccctgcctctcaaatcccagacctgcagaacataaaaccctcccagcctttctgaaaacactgttcttctaaaggcaatgaaaggcgctatttagcatgtgggtttcamctttctgttttttcaaagggaagaaggtaggtcaagcgtgactgccccatggggaaggctgtccccgctggctctggtaggggtctggtgggtttcactggcggtccccagtttcccagctttaaccggaaattttcctggcattgtatcacgcggcagcacctcggccttgcagcctgccagctttggagactggcctgtatcccaaactgcttctgctctccaaccagggactgtcagcccccacccctaagcctcctcctctgtagccttggggcctccatgggcccctccccagcctcgcagccctccagaagccagccctcagctgggagcagctttgcgagggaggggaatgttcagtgggcacagagcacttctgttccagtaacaatggcccgttgatgactagattctgcccaggtcagctccctcaactggactttgaggaggagaaaggactccagcccccccaggcagccatttctgggtgtgaggttgattcagaggcctgagcctctgtctgcccacagaacctcattcttcaggccctggtgcagcagggagaaacgcccatcccagggcagtgtaaggccccaggagtgattccgttctgtccaattcaacagtcagttattgaatagtcctggccactgaggtttggtgctaagtagctgtggggaataagaataactgctgacatgaattcaatgcttcttactgtcaaccccgcccctggctgcccagtagtctctagggaacttataaaaattcccaggcacagattcctcccacctcagaatcttcaggggtgaacccttggcactgatattttttaaaagctctcagagtgattctcatgcccagcrgggatgcagcatcactggcctccagtctgtcagatgctgtgctaagcatttaacttggagtaccccatttaaggaagcaggtgcttatgggatgctgaaatgtggcccccacagatgtccacgtatgagccaccagcacctgtggatatgtgagcttgcatggtaaggactgtccagatgggattaagttaaggattttgagttgagagattatcctggattatccaggagagccctaaatataatcacaagygtccttataagagggaggcagaagatttgactacagaagaggagtgtcagaataatgcatggtgaaaaaaactatcagccattgctggtttgcagatggaggaagggggcatgagccatggaaagcagatagcctccagaagctgggaaaggcaaggctgcagactctccagaaggaacccaggccttttggcaccttcatgttaagtcagtgaaactgacctcacacttctgacattcagaactgtacgataatcagtgtgttgttccagctgggcacggtggcttatgcctataattacagcactttgggaggctgcarcgggaggatctcttgaggccaggagtttgagaccagcctgggcaacctgatgaaacccctgtctctacaaaaataaaaaaattagctgagtgtggttgcacgcatctgccccggctattcagaagctgaggtgggagaatctcttgaacccgagagattgaggctgcagtgggccatgatcatgccactgcactcagcctgggcaacagagcatgaccctgtctcaaaaaaaaaggaaagaaagtaagtgttatttgaaggtactaagtttgtggcaatgtgttacaacagcagtaggaaacagatacggggctgtcattaaccctgctttacagatgaagtacgggggccaggcagtcacctgggctcacccagctagtgggctaccgagctggaagaaccaggttgtccgaccccttcttcactgcccaccacacctcaccacactgccccctcttggcagtcagacagacatgggttcaatctcagctctgtcatcttctgtctgtgtgtcctgtgctgctggtgaggcttgtttggccagggggaggccccaggaaggggaggggtggagaccagttggaaagatagggtgggccaggttgtccccaggtggaagagtttggacttgattttggaggaatggagcccacagggcactgtctggtctcctctgccatatttcttgatgatgcctcagacccgcaggcctgctcagtctttgagatctgacataatgcagcaacccagctcccattgagaacctcaggattgggaccagaatcatcattctactccttgtcacccacagccagtgacagccatttatctgggacggccagtgagctcctgtttcccaggaagccagcagtggcctggtgcctccaaaatgtttcttccaagattctcctagaaccatgcatttgggaccatgcctttttttttgaaaaggagtcttgttctgttgcccaggctagagtgcagtggctcaatcttggctcactgcaacctctgcctcccgggttcaaacagttctcttgcctcagcctcctgggtggctgggattataagcacatgccacgatgcctggctattttttgtattttcagtagagacggggtttcaccatgttgttcaggctggtctggaactcctgaactcaagtgattcacctgcctcggcctcccaaagtgctgggattacaggcgtgagccactgcgcctgcccaagaccatgcatattttttagagtaaaagtatgaaatacaaacaaatacagagagttttccagatgaggcaggaaaatagggtctagaggcagggaatgtaaggccaatcacacttcagctataacaggaaataccctctccatagctcgtgctctgtaaatgactttgtaactttacttcatcctctccatttacatagggcgtacccaaaataacaaatggaatcctctagagggtatttaaactccccaaaattctgtaacgggccttttgtttgtttgtttgttttgagacacagtctcactctgtcacccaggctggagcgcagtggcgcaatctcagctcactacagcctccgcctcccaggttcaagcaattctcctgcctcagcctctcgagtagctgggattacaggcatgcgccaccgcacccagctaattattgtatttttagtagagacggggtttcatcatgttgtccaggctgggttcgaactcctgacctcaagtgatctgcccgcctcagcctcccaaagtgctgagattacaggcgtgagccaccatgctcggctgacggccttttgagctcctgtgctcgggccgccccacrctgtggagcgcactttctcagtaaatcccttcatcccttccttgctttgtgcgttttgtctaaytctgtgttcaagacaccaagaacctggacaccctccacctttaacacaaagccacaccacaagttggtgacaggtcctgaaagatcagttcctgactaggactctgatctgtccactgctgtacagctgctcccttctggctaaatcagcttgctcagacacagagcatagtggttgaatttgtggactgtggagccaggcttcctgtgttccgatcccagctctgcctttaactcagggtaagttttctcatccccttgcctttgatggggatggtgactattatcyataagcattatccagggttcttccaaagattaagtacatttatgtacatgaagtacttggaacaattccttgttcactgtgttaacttctgttactattcagctcctctagggcaggggctgtgtcttttccttcctgttcctagtgcctggttccatgcttggcccagagcaagtcctcagcaaatgaatatacttgtttcatgtgagcttttgtcactcagagattctttaggtactttcccaaaagcttgcactcttacaaatttccatcttagttcttcaaatctttcttctcctccttcctgccgcagaattgccatagagcagcctgaagcttgctctgccccttgcaaagtccagtgagccgttcaaagataacccagatgtcccaagcctcccagccagagtgcctgtgctgcgcagctggcgtggttgccccagtctccttcgccccaaggccatgcttggccgacccsctgacccgctgaggttgcgcagagctttttgggccctgyagcagcactgcytgggcaccaagccttgcatggtctcatgggactcactgcctgcagccgctagtcccagctcccctccttaccagaacccacaccatgttgtccagctgatgggggatcacatatcatgctattccctccaggatcctgtcccctgtttttctccccctgccatgaggagtagcatcctcatttagcctttccctcagaaagtccccacgcttatcactacacatgaatagatcccaggaaggtcactttctcatggttctgcaaaaagccaaactccagttgaggtccagtttgaacccaactagttcactcctctgccctagaaaggccatttctgctcaatcttactgccccacctctacttccaacttgcaaagatctcttgaaaccctgcctcctgttgtgggagctagttttcttttcttttttttccttttcattacacagtttcattttgacataacagtagattcacaygcaattttaataaattgtacagagaggtctcatgaatctgttacccacttccccctatggtaacattctgtgaaagcctagcctaatgtcacaatcagaatgttgacttcatacagaatcccytgtggtgcccttttataactacactcacttccctcctgcccccaccccttccttgacccttggcaatactagtctgttctccattcttacagttttgtcatttcaggaatgttctataaatggaattatgcagtgtgtaaccttttgtgattggctgttttcactcagcacagttccctggaaattcatccaagttattgtatgtgtatcagtgttgtttttttttactaagtaggtaaaacaagggacacagacctgttctcctggcatccctccctggttagcaagagattcagcaggccgctgccactctggccttgctgatagctagtgtgtgtgcaggcagcagctcccgctgtctgtaagagcgccagggtagtgaagttgggtgctctaaaagtagtggctctccatctttgctgattctaggttagaatcacctaaggagctttaagtaatcttgatgcccaggccacaccaatgcaatctgaatctggaggtggcacccaggcctcagtgatttgtaaacttctctggatgattcttatgctgtcagagttgaaaaccagtcctctaaaacagccgcagcagattcacaatagctgtgccatcctccacccatgatagatgtcacagagcaatcgcagcactcgtattttcaaatacggcgctccaggcagccccttcccatctgtcagctttggcccggggtggaaattgacttgccctcttagctgagaaaccgtttggccatggccatgtccaggtgtgcccaggcccgaggcctgacatgttaggtgagtgtccctgtaagtaatgctggaaaggtgggcccttgaccgataggaatagttgcagcaggcagagatcgcctgggctggttctataagataaacccgaagtggatcagccagtgtccctcccctgcagcccagcatggggagagatgtacccaagaaataccaaccaacagtgccattggcatagacgggctctggctgacatttgttcagaccagcaataatgcccagcctgtgtgcaatcttcccaattttcggagctcacacagcttccttgatgctcacaacaaccctgtggggccagcctaagctcagagaagttaaattcctcacccaacgtcagcagagagtaagtgggagagctgggacccactccaagtctgtccgagttcagggccatctgtccaacgctcagagcagttagacaattgacctctgtttccactggcagaccgagtgtagatgggctcctctgtggccatagatcagtcagaggatagcagcagacacatgcggaccaagcctcctgctgcccaagacccctgtggcccctctctccctaaccgctgcttctcctacagatctagtgcagagatgttggacagaacacaagaggttgaagtcagggcgggagcaggaaaaaaaaaaagaataagaagaaaagaggctggagttcctcctttcatcacaggaataaaaccccttcctgctgtcaatgggaccattaagtgggagtttgaggaagctccagaggattcaaattctgttgccactgtatagaaacagaggagaccgacgcagtgactcacatctgtaatcccagcactttgggaggctgaggcgggcagatcacttgaggtcaggagttcaagaccagcctggtccgcatggtgaaaccctgtctgtactaaaaatacaaaaaaattagctgggcgtggtggtgcctaactgtaatcccaactactcgggaggctgaggcaggagaatsgcttgaacccgggaggcggaggttgcgttgagccaagattgtgccactgcactccaccctgggtaacaagagtgagactgtctcaaaaaaaaaaaaaaaaaaagacagaggaaatagaagtagggttggaagaaaacagggagcagaagaaattctcctctctgtcctgtcccttacttgatcattctccaggatcagaaagyctccttagaaggtcaggaaggaggatagagcaagaattagggatcctagacttatgcatggagagtttttctctacccggttatctcagaaatcctgtaatggagccgtctttccagaggtgcagaacaaaatgggaagctgtggccattgtgtagccattgaaggctagcccatggtcccctcacagcttccatgggcttctcccgagcatgtgcacgtatgatgcacccattgcatgtatacgtacatgcacacatttctggtcaaaaggttgatgattgataaaactgacaaaagctccaaaccccacaaatgagcacagcgttttgtaataatgagcatgaccaaaatgggaaaaaatagggcacatgagggatgagggaagaaaaaggactccagggcccagaagattcctaggcttccttagccacctcctcctaaagtaggggtaataagtacatggcacatgtgccagcccttcccctgtgatatagttgggatatttgtccgcacccaaatctcatgttgaattgtaatccccaatgctggaagtggggcctggtgggaggtgtttgagtcatgggggtggatccctcatggcttggtgctgtcttcctcatagtgagttcttgccagatcaggtcatttaaaagtgtgtggcacctccccattctctatctctcattcctgcttttgccatttgaagtgcctgctcctgctttgctttccgccatgattgaaagctccctgaggcttcaccagaagccaagcagatgccagcaccatgcttcttgtacatcctgcagaaccaagagccaattaaactgcttttctttataaattacccagtctcaggtatttctttatagcagtgcaaaaacagcctaatacaccctatctatacacrcagcagacatcactactcaactgccatgttctttcccacagaaaacaagcctgatctcaggattcttctcatcaaagtgctccaggctgccaattaccaacctattagcttttactcatgagatgaaaatgatttgccaggccgggtgtggtggctcacacctgtaatcccagcactttgggagtccgaggcaggtggatcacttgaggtcaggaattcgagaccagcctgaccaaaatggtgaaaccccatctctacaaaaatgtaaaaattagccgggcatgctggcactcacctgtaatcccatctactcaggaggctgaggcaggagaatctcttgaacttaggaggtggaggttgcagtgagctgagattgcgccactgcattccagcctgggcgacagagcaaggctctgtctgacagaaagaaagaaagaaaaagaaaggaaggaaggaaggagaaaataatttgccagcctcagcttgagcccaggagttcgagacaagcctggacaacagggaaagaccctgactctccaaaaagctttttttaaaaatagcgaggtgtggtggcacatgcctgtgatcccagctatttgggaggctgaagcaggaggatcacttgagtccaggaggttgaggctgcagtgagccatgatcacaccaccgtattccagcctaggcagtggagcaagacccgtcctcaaaaagaaaaaaaaaagttggaaacctgatacagtcaccatttttgtcaggatccctcttgcttgttctgggttaggttcatcacaaagctgcttagatggacttggttattcaagtaaatattaagcgctaactgtgtgtaggatgatggattgggacacaactccatatgctttttatttccattatttttataactttctcttatattgatattttagtaacatggtaacaaatttaaacaatagaagaaagtagaagttaaaagtcagtgacagttcccacccattccccagttccctcaaccactcttgtcaatctcttctttccatctccaaagatatccagcatttgcatggatccagtccagtttgtaggcagttggtagcatgccacgcatactcttgcccttgcttttatcactcatgtcttgaacagcattttatgtcagccctccagaacttcctctttctttttaatcattacagagtattgcactgataaatgtacctaacattgagctaacaagttgctgttttttgttttggttttggttttgcctattaacatgcattaatgtcatggttagccttttgtaattataatcgatttattgttgtatatgtccttgttgtatccatgcaaatatatcagcaagattagttcctagaagtggaattcctgggtcgaagagtgttatagcagtcctttggggctgctataacaaataccatacactgagaaacttacaagtagcagaaatttattgctcatggttctggaggctgggaagtccaaaatcaaggagccagcagatttgatttggggagggctgctctctgcttccaagatggcacctacctgtggcrtccttacctggtggaaggagcagacaagctcccttagggctctaataatttttctttttttttttgacacggagttttgctcttgttgcccaggctggagtgcaatggtgtgatcttggctcaccgcaacctccacctcccacgttcaagcaattctcctgcctcagcctcctgagtagctgagattacaggcatacgcctccatgcccagctaattttgtatttttattagagatggggtttgtccatattggtcaggctggtctcaaactcccgccctcaggtgatccacctgcctcggcctcccaaagtgctggaattacaggcatgagccaccatgcccagcctctaaaaagaacactaatcccattcatgagggctccacacyggtgacctagtcacctcccaaaggccctacctgttaatgccagcacactgggattcgattacaacacaaaaattttagaggggcacaaacattcagcccatagctaagagtatgcatatttaaaacttgtgatggtttggccaaatcatccttcagaaaggacactcccatgaacattatgtattaggacgggacgggctatgctgtaggaacaattagtcccccaaatcttagtatttaacacagcaaaggcttgttttttctcttgcgtcacatctgatgcagatggggtggctctctaagcagcatcccagggatccaggctgcttccattgtgaactaagccagttggaacatgtggcctccactgttgccacagccaggggagagaggcctggatgaatgtgtgggaaaattttaagcaaagtggcttacatcactttcacccacatcctacctgtcagaaccagtcatatggcctcagcctgactgcaaaagagtctgggcaatgtggaggagcccctggccactcgatgagcctcacgtctctgccagtcggttccccagaaattcacccacacagtatattccagggcgttttgttcttcgctaattaaatatatgaaaaatggcgtcatgtagactgtcgttctgccctgcacgtctgtgctttctttgggcrgttgccctccgcctttttctgctgaaatattcataggggattatgttcactccagacacactccagtggccttccccaaattttcccaaaaccccaaaaccttttgtggggaagccctaagacattctatattttggctgttacaggcatacctcagaggtattgcaggttcagttccagaccactgcaacaaaattaatatcacaataaagcaaatcacacaaatttttttgtttcccagtgcatataaaatttacatttacacggccgggtgcagtggctcgcacctgtaataccagcactttgggaggccaagtcaggcggatcacctgaggtcaggagttcgagaccaccctggccaacatggtgaaaccccgtcactactaaatatacaaaaaattagccaggcatggtggcaggcacctgtaatcccagctactcgggaggctgaggcaggagaatcgctggaacccgggcggcagaggttgcagtgagccgagatacatgccattgcactccagcctgggcaacaagagcaaaactctgtctgaaaaaaaaaaagttacttttatactatactgtagtctattaagtgtacagtagtatgtctaaaaaaagtacataacttaaaaatactttatttgctgaaaaaaatgctaacaatcatctgagactttagcaagcgacttgtagtctttttgctggagagggtcttgcctcagtgttgatggctgctgactaactgctgaagagtagggtggctatggcaatttctttctttctttttattttttttgtttttgttttttgtgttttgagacagggtcttgctctgttgcccaggctggagtgcaatgccacgatcatggcttgcagcagccctgatcaccttggcaatgccccgacctcagccttccgagtagttggaaccacaagtgcatgtcaccacacccagcctatgtttttattatttgcagagacacagtctcactatgtttcccaggctggtctcgaactcctgggctcaaggagttcctgggcccgcttgggcctcccaaagtgatgggattacaggtgtgagccactgcacccagccacaatttcttaaaataacacaacaataaagtttgctgcatcaattgactcttcttttcatgacggatttctctgtagcatgcaatgctgtttgattcacagtagcacttctttcaaaattagagtcaattctttctaactctgctgctgctttatcaactaagtttatggaatattctttttttttttttttttttgagatggagtttcacttttgttgcccaggctggagtgcagtggcacgatctcggctcactgcaacctccacctcccagattcaagcaattctactgcctcagcctccagagtaggtgggattacaggcgtccgccaccacgcttggctaattttttgtatttttagtagaggcagggtttcaccatgttggccaggctggtcttgaactcctgatctcaggtgatccacctgccccggccccccaaagtgtggggattacaggtgtgagccaccactcccagacaatttatagaatattctaaatcaagcttgtccaacccgcaggccacgtgcagctcaggacggctttgaatgtggcccaacacaaatttgtaaattttcttaaaatattatgagattttctttgcgttttttgtttgtttgttttctcatcacatatcgttagttgttagtgtattttatgtgtagaacaaggcaattcttcttccagtgtggcccaggaaagctaaaagactggacaccctgctccaaatcctttgttgtcattcacagcatcttcaccaggagtagcttccatctcaaaaaccactttcttgactcatacataagaagcaactcattcattcaagttttatcatgagattgcagcaattcgctcatatctgcaggcttcatgtctaattctagttttctcttattacttccaccacatctgcagttcatttctccactgaagtcttaaacccctcaaaatcatccacatggatccacttcctccatccacttcttagcatccacttcttctaaattagcatccacttcttccacattcctattcatgttgatattttcacctcctctcctgagtcacaaatgttcttactggcatctacaatggaaggttttcagtttactttgcccagatccaacagaggaatcactgtctattgcagctatagccttacaaaatgtatttcttaaataatgtaacttgagggtcagatatggtggttcacgtctgtaatctcagcactttgggaggccaagggaggaggattgtttgaggccaggagttcaagaccagcctgggcaacatagtgagacatctctacaaattaaaatttaaaaattagccaggaggccgggtgcagtggctcacatctgtaatcccaacactttgggaggctgaggtgggtggatcacctgaggtcaggagttcaagaccagcctggccaacatgatgaaaccctgtctctgctaaaaatacaaaaattagccaagcgtggtggcgggcacctgtaatcccagctacttgggaggctgaggcaggagaatcgcttgaactcgggaggcggaggttgcagtgagccgagatcacgccactatactccagcctgggtgacaaagcgagactccattcaaaaacaacaacgaaaattagccaggtgaaataccatgcacctgtagtcccagctacttgggaggctgagacaggaggatcacttgagcccaggagtttgaggctacagtaagccataatcatgctactgcattccagcctgggtgacagagtaagaaaaccctgtctcaaaaaaaaaaaaaattaattaattaaaaaacagacttgaaagtcaaaattactccttgatccatgggctgcagaattaatgttgtgttaacaggcatgaaaacattactctcctcttacctgtccatcagagctcttgggagaccaggtgcattgtcaatgagcagtagtattttaagcagtaggtgtcaacagtgggcttaaaatattgaataaatcatactgtaaacagatatgctgtcatccaggcctgttccatttacaagcacaggcagagtacatcttgcttaattgttaaggtccctaggagttttagaagggtcaacgagcattggcttcagcttaaagtcaccagctaccttagcccctaacaagagaatcagtctgtcctttgaagctttgaagccaagcattgacttctcctctctagctatggaagtcctagatggtatcttctttcaatagaaggctgtttggtctacatcgaaaacctgttgattattgtagccaccttcgtcagtgatcttagctagatccttgggataacttgctgccaattctccatcagcacttcctgctttaccttgcacttttatgttatggagatgtcttctttccttaaacctcatgaaccaaccaacgctagcagcttccaaattttctgcagcttccttgtctctctcagctttcctagaattgaagagagttagggacatgctctggtttaggttttggcttaagggaatgttgtggttggtttgattttctatccagaccactcaaactttctccatatcagcaacaagtctttttcacattattataatttgtgtgttcactagagtagcccttttcatttccttcaagaacttttccagccgggtgcggtgactcacacctgtaatcccagcactttgggaggctgaggtgggcagatcacttaaggtcaggagttcgagaccagcctggccaacctgatgaaaccccctctctactaaaaatacaaaaattagcctggtgtggtggcaggcacccgtaatcccagttacttgggaggttgaggcacaagaatcacctgaacccaggaggtggaggttgcagtgagccgagatcacgccactgcgctccagcctgggcagagcgagagtctgtctcaaaaaaaaaaaaaaaaagaatttgtctttcgcactcacagcttggctaactgtttggtgcaagaggcctcacttttagcctttctggctttcagcattcctgcctcactaagctccatcatttctagcttttgattttaagcaacaaaagcgtgactctttctttcacttgaacacttagaggccatggcagggttattaattggcctaatttcaatattgttgcatttcaaggaacaaggagaggcctggagagagggaaagagaccagggaatggctggttggtggggcagtcagaacacagacatttatcgattaaatccattgtcttctatgggtgtggtttgtggcaccccaaaacacttacaatagtaacatcaacaatcactgatcacagatcaccataacagatataataataatgaaaaaatctgcactattgcgaaaattaccaaaatgtgacacagagacacacagagagctcatgcttttggagaaatggcactgataagacttgctcaagacagggttgccacaacctttgatttgtagaaaacacagtatctgtgaagcataataaagcaaagcacaataaaatctgtcctgtttgtattcacaaaaacatataaaggcatgtgagtaataatataaaattagctgggtcaagatcgttgccagctgtggtgtggaatggattggcagcagttctgtgccatttcccaggctctctgtgcctccacctcctccctcattcatgaaagacaagccaagcaagggacaaaggtatacaatagttgctgtaaatgtccctatttcacctatgagaaaactgtactcaaagaggtttaaattccttgcctaaggtcataggacctcaaagacaataagcaaaagcaaggaaactgaacgcactcatagctacacagagattcattgctaactttgtcagacgttgtgccaagactctctctctttctctttctctccctctctctgtctctctaccaacccccccccaacgtatgtgtctctgcgtgtgtgtgtgtgtgtgtgtgcatatgcatgtatacacccacttttttttttataaaatagactgcaactggagatactggtgtgtcctattttttggtgcagcgtcataacataagcatctttctaggcaataaattaactttatgctggccttcttttttcagtggagtattaattaagcatcttgtatgtgcccaatattctgctggttctgggggaagaaggccagcctacaggaaacaacagctaactctttaaggcagtgcataagtccattcatttgcttcacaaacattcattgagccctgccacgtgccaggcactgtgggtatcgtggagaacaagactactgtccgaggcaagagctgggctcctcctagcttcctctgtccccctaacctcctctcacccacaggcattgctgggggtattttcctgggttggttggtttgttttgttttttgttttgttttgttttgtttttttgagacagggtctcactatgttgctcaggatggtctcaaactcctgggctcgagcaatctcctgcctcggcctcaccgtgcctggccgttgtttatttatttattgtggtcaaatgtacatagcataaaattgaccgttttaactattttcaagtgtacagttcagtggcactaagtacattcacactgttgggtaaccctccccactcttccactgcagaacccctttcatcttgcagaaccgaaactgtccccattaaacatcaaccccccggcccttcatcccagcccctggcagacacccttctgtctgcctctatgattttggcgctctgggtacctcatagataagtgagattgtatagtatttstcctttggtgaccagcttatctcaccaagcgtgatgtcctctgggagcatccgtgtggaagaggtgctagcatcattttgacttctcaaacatctcgtgggtgtcacctccccctctacctctctgccactgcctcgctcagccacctgctctctcctggacccttgcagaagggactgactgggctcctggcctccagtcctgccctcttctaatgtatttttcataccacttccaaagtgataatacattcctcttttgaaattttagatttggttactaaagcaatacaggtgtatggttaccaaaaattcaaacagtgtaaaagagaataccagcctgggcaatgtagagagaccctgtctccataaatttttttttttttttttttgagacggagtcttgcagtggtgggatctcggcgcactgcaacctccacctcccgggtcctcattcaagcatttctcctgccttagcctcctgagtagctgagattacaggcatgcgccaccatgcccagctaatttttgtatttttagtagagacggggtttcaccatgttggccaggctggtcttgaactcctgacctcgtgatccacccaccttagcctcccaaagtgctgggattacaagcataagccaccacgcccagtctccataaatgatttaagaaaaaatgtagccaggcgtagtggcacrtgcctgtgctcccagctccttgggaagctgaggtgggaggattgcctgagtgtgggatgtcgaggctgcagtgagccaagatcatgccactgtaccccagcctgggtgacagagtgcgaccctgtcccccccaaaaataaataaatcaaagggcataaggtgaaaagaatcgtaacattatgtttttgtagctctgcctctgtgatggtgccccctgcatggcttgctttcactgtgccaatgcaccacagttacccagcctgccggctctgataagatgctcgccatgcttctcccatgctggacttgggccacgtccttggscatgaatcttggtctatgtccaggtcggttctgaatgagccagcagactcctcccggggctgcccggctacatggttgagggcatcctggacaccagcttcagccacagctcctgaccaggcaggtgcagtgaagccgggaggtgtaggtcagttcctacctctccaacctgaggtcctgcacttcctgcagctgttggaagggatcgtatccaatgggagcaagaaagtgtgctccccyacagccccactcaggcataaagggccgaggggcagccaggcctgtcctggctagggctggctcagagtctgtggcagccccacccctgccaggctggcccttagccccaagatccacctatggcactcgcccctttacagctacgtggacatccactgacactcaggtgacacacctttgcctgcttctactcagtcttggcagcagttggacaaaaggaaatcaaagatcggttctttcttgggagaggaagagcaagctggagccctggggtgctcagatgctcttgggagtaacatagccccatagccccggggctatactgggtgcaggggggtggaggtggtgggggagctgcagccaggcattcattcacttcccgttctttcattcctgctcttcttttgctcactgactcattcagcagcctctgggctgggcgtttactctcctgtcaggcaacacactcctgattgggtggccttggccttcccaagctgtctctggctgtccccaagtgaaacggaatctgggctggacaggccaccggatggacaagctcttctcatctaaaaccaaggcagttgacattgtgggctaaatgataagaacaaaattaaaaaataaaaaccaggcaggctggcataggagctccatttccctgccctactgtgccagtggcctgggggctcccctgccgcctctctccactctgcagattctgagaaaactcacaaaagagcccactccaaggtgtttggcaacaaggtgggggcagcctcccagcacccagcacacatggagctttcccrcagtgggtttcagcgctcccactctgcctcggagctactctgtcaccagctcttgccctcccttggctcctctttcccatgcagctcctcctccagctcgtgggaaaggccgagaggccgggccagcaacagctgagcatcccctcaacctctccctaccccaccccaccccactgtgctcttggccccaggcaggcgaggggagtggagttttgctgcctgatgcaatgtctggcagggccgtcccttatcacagccgacttgctgggacccccaccttccccggrggaggccggaacaggccgcagtccattttgggcctcagtggaagggcctggttggaggccatccaagtagaaaactcgttctctgggaggcaccttgccaagtcacgagggaggcctgagcagaaagacccctgggggagagaagggagggaagccgaagcctcacttgctggggcttgcctggcctcagctcgcagccccctttttccacagcgttctctccctcacatttgtctgcagatggcttaggctgttttctgccctcccccttgttaccccacagctgtgagaggctggatggaaacaagaattcaagagactaaagttatgtgcggtcccaagtgtgaagttttgcccacagtyggtggccatggttcgcaccgtggtcccagcacacgccctcagcatgcacctgtggcccacacgctcatgctcacagccactcatgtatggagcaaytgcctttttttcttcctcttcatatcttctgtcaacttagaacgattaagcatcttgcagtaggctcaatgctttgggaaggacattgattcgttcattcattcattcattcattcagcaagtatttatgaagcacccactctgtgccaggtacagttctgggcactggagatgcaagggtggagcagacagatgaagctctcctctcccggagtcaacgttctgggggatgagaggccatcagcaagtgcatttccatctatgaagggagtaaagcagggcgccragagggaaagtgatgggggtggcccacattaggtcaggggtcagggaagtactccagagctgggggggcatttgagctgagtcctgattgcttagaaggagccagccagagcagagcagatctggcccgggcagaggtaccagctgatgcagaagcccccaggtggggagtggcaggaagggccagggtgggggtgttgggagaagaggtgggaagggtgagcagggtctggatcttgaaggcccttacagggcttttattttaccaagtagtgcatagagtgtttgaagcagaagctgccttattgtctgtgcctccgagaagtttccatgtggctgagaagctgggtggcagcacagttataatcagtgctcaggtgttcccctgtctgggtggctgcccacatgtgatcccatagaagaggctgggcctgaggaagccagggaagcaggagggggtgtggggaggccagcaggggtgtgggcctcagcggggagggaggaggtgatgcagcatggaagatgagaagcccacaccagccacactaggcccccaggagattgtggacgccgtcgggagcattattcggtggaggggtgcggggcagaagccagatgagacagctgggaggtggcaggcaggtgagaatgtgagacagagggaggacagtgatttgagaactgtatcgtaggtgggataggagtccacatcccagccagcacctagaaggttgggctggctctgcccagggcctggcacgtggtgtgcactcaccagatggtcgccgccctgaaagaactcagcactgtgcctcttttcctgcctctggtgtttgctgtcaatrtgcagagtgctggacaaaactgggccaagggagctgtcccactgcctgctgccctcaagcagagctgacctggcacatgcctctggcatacttcctkttggccctggcaccctgcaaagaggcccccagtgggcccaagcaggggataccacccgttccttgggctgttatgtagttgctggggcattgaggggatgaaaggtttttttgttttttgggttgtttttttttttgagacagagttttactctgggtgcctaggctggggtacaatggcatgatctcggctcactgcaacctccacctctcaggttcaagcaattctcctgcctccgcctcccaaatagctgggattacaggcgaccaccaccacacctggctacttcttgtatttttagtagagacagggtttcaccatgttggccaggctggtctcaaactccagacctcaggtccacctgccttggcctcccaaagtgctgggattacaggcgtgaaccatcgtgcctggccggatgaaaggtattgagtactaggggctaggagggaccaagagaaggaggaagagatttttcggttctacccatgaactaagcaagggaggcaggcctagcccttgcaccatggaagtgggagagaagtgatacaaaggtgtatctgatgtcacaggtgtcacaggcctgcttcttgtaaagggcctcctgcatrgtgagttctgcgtggggctttgctgagtaacccccatccgggctctatccccttccctcatggccctgtgacttcctggcaccatgaccctctccccgcttctggctctgggaagctccaaacctctctcacctgcctgcccacctgcctgctaggtttccaaagctaaacagaggggcagctgtctgggcagggcaagggagccaacagcctgcctgggtttcctgtccaagtgtccagctttgcttcttcctcttagggcagcgtcaagaaggatcttaggaaagctgtgttgctctggggatgaggaggctggaacagcaacttaaaaatagaaatagtccctggaagggagggaaggagaaggttcagaggcttgtcatttaggcaycccaacttctataccttaccaaggtgccaggcccagagggaagggggtagccagggcagctcccygaccsgcasctgccttttcacccctctcctatttcacaagcatttaccatgcatcaacagatatgttcctcacagcacctttatcagcagggactgcccttttcatgctacaaacaggcccagagaggttgtcacttatacaaggttgcacagcatggtagagacacaggaaggactagagcccaggacttctaaccctagctccttctgcttccctcacatcatcagctccagacaacctgagattggagaggacagaaagtcaggatttcaacacctcgtactctgaaaactcagtggtggttctcaccctgtcagtggggcaggtggcctcacaccccaccacaggctaaacagggtgcatgggggacgtagccccactggccattctacacattcatgccaacagctaccaggcaccagcctcaccattgatttttggacagctggtctgtgccaagtgccattctagatgcgagtcccgactttggggygcttgcattctgggaagggagatggtcagccagaaagccccaccataggagctaggttgggggtccccaaggtacaccaagaagctcaagtgacctggacctgggaggggtggccagaggcttctgctggaggaaccttaggtcagttacctaacctgtctcaacctcagtttcctcacctgtaaaatgggctagttgctgcctcacagggctttgctgaggatttgatgagtgcaagtgcttagcatggcacctggcacagagaaatatgcactcagtaaacttaagctgcccatatcattggttggccctcccaaccagagtgcaagccccgggagggcacagaccataccttcttgttcaccgccatattttcagtgcctaggccagaagccagcacaaggtaaatgctcagaaaatattaacttaataagttcatgagaaaaggcccaggaaaattaggaagaggcaggactattccagttaggaatagactctcctatgccaggcacagtggctcacacctgtaatcccagcactttgggaggccgaggcaagcagatcacctgaggtcaggagttcgagaccaacttggccaacatggtgaaaccccatctctaccaaaaaatacaaaaattagctgggagtggtggcacacgcctgtaatcccagctactcaggaggctgaggcacgagaattacttgaacccaggaggcggagattgcagtgagctgagattgcaccactgcactccagcctgggttgcagagcaagactctgtctcaaaaaaaaaaaaaaaaagggaatagactcttctttctgcagctgtatttgctctagctgtaaacaactttgtagccaagtgcagtggcacacctatagtcccagctactccggaggctgaggagggaggattgcttgagcctaggagttggaggccagcctgggcaatatagcaagaccctgttagatattatctatttagataataataatgacctgtaatcccagtactttgggagaccaaggcaggtggatcatctgaggtcaggagttcaagaccagcctgggcaacatagtgaaaccccgtctctactaaaaatacaaaaattagctgggcgcagtgatgcatgcctataatcccagctactcgggaggctgaggcaggagaattgcttgaggcagaggttgcagtgagccaagattacgccattgcactccagcctggacgacagagcgagactccatctcaaaataataataataataatgatacatactatttcagtcgagggtcattttttcctttatccatctgttgttcaccaactgtgtatctcttgcctggcccaggattgagagataatgaggggcccagatgmactccctgtcctgcctgaagggatgttcagtattgaacaattgttgctttatggctttatgacaaagtcccaggtgctcatgataatctttgtacagtggtggggctgtagggagccctaacatagcctgggggaggctgcctagaaagtggagacctgaaggctgaggccatgttaaggatttaggtagaatttatgcgctatgatatttttttctttcgttaattttttataatttacgtatacacatggtaaaatgtgtaacaaggcacagtgttacatagcaaacataagcctcactccaccttctctctccacctacctgtccaccttctagatgcagccattgttaccaggccttgcgttttcctgcagccagagtccatttgtatcccgcatctatattttcttcccggcatttgtttctgaatgggagcttgctacatcggagtttctccaccttggatgatttgtcaccccccaccttcccaccccaggagacacttagcaatgtctggagatatttgatggttacagatgagcagtgggggccaggcgtggtggctcgtgcctataatcccagcactttgggaggccgaggcaggtggattgcttgcactcaggagttcaagaccaggctgggcaacatggcaagaccccatctctacaaaaaattttaaaaattagctgggtgtggtggtgtgcacttgtggtgactaaggrggctgaggtgggaggatcaattgagcctgggaggttgaggctgcagtaaactatgatcgtgccactgcactccagcctgggcaacatagtgagaccctgtctcaaaaacaaacaaacaattattggcaattagtgggtagaggccaagactgctgtcaaacattctataattcacaggacagtccccacttacctggtggaaaatgtcaacagtgctgaggttgggaagccccgtcctgcataagcacagggtctgcacctttgtgtgtgtgtgtgtgtstgtgtgtgtgtgtgtgtgtgttctcatgtattttctggatcattcacatttatacatccacctcattattctttgtggccacataaaaatccattacctggatgctccaccattttcatttaggtgtttgcactctttttgctattataaacayttatgctacaaaggttattcttttccgtgcacaggcctttgatgtgtgaggtcaagggagaaactgatggaggtgggatggatgaacccgatggttcattagcattttaaatgacctattaaagagaccttcagtgtctctggggcacagtctgtctggagagtgggtctggggtcctggctgctaaccagggccgagatcctcaaaagtctggtggagagacatcctctgcattcctcgtgtacagacaagggtgttctgaccacctgtctctccgcaggacaagggtgtcccccacctgaagacggcaagctgggtcctgagtgatgcccctcagctgagtgtccaaggctggcccgaggagcccccacggccccacctttccccatggagaaaggactcactttgccccaggactgccgggactttgtgcacagcctgaagatgagaagcaaatacgcccttttcttggtttttgtggtgatagtttttgtcttcatcgaaaaggaaaataaaatcatatcaaggtgagggttgcaagcccaagtcttcatcttccgttcaaggtggggtgggtggggacagggaggtaactgcagggctctctgtggacctgcaaatgcattccttcaacgagccatccccaggccccttctatgtcccaggcagtggctcctgcacacgtcctcatgactgcacaggggtgagacttgggctctggactcaaacagcctgggttggagcccccccatgttggccctctacagctgtgaaaggttaggcaagatacttaacatttctgagtcttcggttcctcttttgtaaaacatggctaataatgggaccagcattgttgtaaagattaaatgagaaaatgtaaaagcatttagcccactgcctggcacatagttggtgtccagtatttgctggctgtgactattactgttaatttacctcctggccttgcattagcagcacatcccctatagaagtcttgatgtcactgagcccatggaaaggcaaggtcctagtatggatactctgatgggcaaggctgccaatgtgcagctgccaagttgtgtactgctcaactccaggggcatgtccctcaaataggctaatctgggaacgcccctttacccctttgaattggcagcatacagctatgtgcagtgggcctgttagatgtagaaagatttcttagcctgttctcctcccaggcacaagccctgcaagaaagcattagctaagatgggtgggtcagggattgggcaatatagtggacaccgtcaatccccccccttgggtcactgagcaaggaccgttctagcttgtgcctattgggttctactgcaagcccctacagctctgcacctgagagctttctctccactggcacactggcaagccggaagtactagggagtaactgtcccccccagatccccatcagactaagcctccgatgcccacacctgctcctagcagcacatccatcatgcacctctttcctcccctgcctcacttccccatccagtacttcctgtgatcatgtcccaaataaacttacttaaacacaaatccttgcctcaacgtctgcttttggggaaacccaactgagacaggttttggtgatctgcttggaggactgcttagggttgcccaggagacggggtccccagtcagccactgaccctgatcttctttgtcctcacagggtctcagacaagctgaagcagattccccaagctctagcagatgccaacagcaccgacccagccctgatcttagctgagaacgcatctctcttgtccctgagcgagctcgattcagccttctcccagcttcagagccgtctccgcaacctcagcttgcagctgggcgtggagccagccatggaggccgcaggggaggaagaggaagagcagagaaaggaggaggagccgcccagaccggccgtggcggggccccggcgccacgtgctgctcatggccaccacgcgcaccggctcctcgttcgtgggcgagttcttcaaccagcagggcaacatcttctacctcttcgagccgctgtggcacatcgagcgcacagtgtccttcgagccggggggcgccaacgccgcgggctcggccctggtgtaccgcgacgtgctcaagcagctcttcctgtgcgacctgtacgtgctggagcacttcatcacgccgctgcccgaggaccacctgactcagttcatgttccgccggggctccagccgctccctgtgcgaggaccccgtctgtacgcccttcgtcaagaaggtcttcgagaagtaccactgcaagaaccgccgctgcggccccctcaacgtgacgctggccgcagaggcctgccgccgcaaggagcacatggccctcaaggcggtgcgcatccggcagctggagttcctgcagccgctggccgaggacccccgcctggacctgcgcgtcatccagctggtgcgcgacccccgggccgtgctggcctcgcgcatggtggccttcgccggcaagtataagacctggaagaagtggctggacgacgagggccaggacggcctgagggaagaggaggtgcagcggctgcggggcaactgcgagagcatscgcctgtccgcggagctggggctgcrgcagcccgcctggctgcggggccgctacatgctggtgcgctacgaggacgtggcacgcgggccgctgcagaaggcccgcgagatgtaccgcttcgccggcatccccctgaccccgcaggtggaagactggatccaaaagaacacgcaggcggcccacgacggcagcggcatctactccacgcagaagaactcctcggagcagttcgagaagtggcgcttcagcatgcccttcaagctggcccaggtggtgcaggccgcctgcggccctgccatgcgcctcttcggctacaaactggcgcgggacgccgccgccctcaccaaccgctcagtcagcctgctggaggagaggggcaccttctgggtcacgtaggggggccggggccccgtatgcccctcctcgtgaaaggcctgccccgtctttctgccgcagccctcgcagagggcgggtgcacagcgccatgagcgggcagcgcctcctgtagcagtagggcccccagccagcgctccagccaaagcggcggccccagggttaattgcggagaacaggacagtgcccggtccccttgagggccatcacacccagacccaacgggttgcagcctcctgagcaggcctaggcaggcccgggcctgttggcaagcttcgatctcacacacacagaaacatacattcgtgcctggagaccctgcaggccagagtccaaatatttaacaatcagaaggggcaaggctctgaccagtgacagtcagacctcctgctttatttggtgttaaccgtttcttgtctggatggtgaagtctggaatctgggtgggtccttggaggaggggctaggacagccgtgggtgtcaaaggtggcatttgaggctcgtttgaggtgacagtggctgtttaccaactagtacagagcgattcagcgttttcatgaatgggttggctgtgctggttactgatgaatatgggccccttatagagctgcaaaacacacacatgcgtatagacatacatacatgtacaccatacatagacaagcatcataaaggcacaagtgcacacacatctatgcagacaagcttcctcgctgcttatgcccacagggtttttctgtatgacacacctcagaggagcctgtgattaacatttgtaggattatttcgagggcagggcaggggaaagaaacgcgttaaagggccatgacatgacacagttccctggccgggtttggactgaacagtggattcagaactgcagcgttcaaagcccctgcccgccttagattctcatggctacctcctctgacccatccacatccttgcggctggcaggcaggatgttttgaaatggtgcagccaaaggccccgtctagcttggctggctcccgaacatgtccatatttgaaggctgcctcaggcctggcaggcagaagcagctgtggtccctggaggcaaaaggcagctcacggggccttccatttccagccaggcctcatctggggtagggccaagaggaaagtacagagtgcccgtgggggagaagtcccaccaggatgccccccctcccctgagaagcccgccttctccctcgtggacaggagtcagccagttggttgctgtggttacagccagtgcctggaattcctccttagggctctgggaagagtattgcttaacgcaggatgtgctgggtgttttgtttcgggcttttatttatggcttggtgtctttcttgttttatggctgtgtttttgcttttgtttctgtaggagcgcctcttccaagcagtggaggcctgagggcttgagggaggctggggaaaaccagcagggagcacttggctcctggcagagggagaggacaggaggaggagccttccccaggaggaacgaggagaggtggccacgtggcaggccacagtgccctatgggcttttctgtttgaaccccatgtgggatgaatctcaaagccaccagcgttcttgcctagtgtccagagcagcagagatttgcagccctcgcccctccctgagaagaagctggatttgaaaatccctcacaggccctaacatgtttcctgggtgggcaggggcctcatgacaagcgacaagtgtacccagagtagaaggccttccccactcccacctcaaacccaggagcagaactcagtatccagagcttacaaggagctgcaagggtttgccgagggctgcccagctctgyttctggtttcctggacaatttctctgtcagatacggcccattgyaaacccagagggctgcattttgggttgagtaatatggacaccatggaagtacaggatctgagtccaacattgccatgggggagggaagagtgtgtcctggcaggaagccaccattggagaaggtgaggccagtaaccatctcatgggattcgctataatcagcctatttgagctgctgggtctctgtcactgtggactccagtcattcaaggaggtctccactcttgggttttttttattttcttttcttttgctattttgcctgaacaccccaacactcttggttttagagtccaagagtaagttgtgcagagacatggttctaatttggagttcaaaggaacaccagctctgaaaacatgaccgtggggccaggatgtttctggcaggcccagaagtgctggccgttcttccccagcctccccactgctccctcctctgttccccatgtggaggtcgggggggctgggactggggagggggcagccacctccatccaaggctcttcctaggggccctgctaatgtggacagyagactttatccctccttcttactctgggccaagacctcccactccgccctctgaggatggtaccaagaatgggcctttgggacttctcaggacattgacaatgtgcacactgcaggttgacttaatttatttattttttgaaaagaagagacagaaaataccttattatctgcagggactcaaagctgtacccaaatcaagaaagacaaaataacaatagaaaccattcacacactccgttcatgcatggacaccagaagacgattcagaacacaagaggagaatgagctggagcgccagcaccacgatggccccaggacgttgtttaagatctgagatcccttggtttctctcttgttgatctgagatgctacatcagggcccttgctgctgtattacctctgcccgggtgtttgagacaggtcacaagcgcgtggatgtttcctggaagtgtattcccctggggctcagcgatgctctgggaacccttggggtttggggaaggacagtgtggtgtgactattggcttgaaacgttatggatatggttggagtcacccatgtggatatgattttcagcttggagctgggatggagaagatggaagcactggtggccgggcctctttttccagcgaggccagccctggcttctcctctgttccagcttgtctgccagaagccttcccctgcaaggtgcccacctgcccggagacagagggagcagctgaggcctctctccactggccgccagcctccctagcacaaggggaccattcagcaatgagtgtttactcatgttctttcttgttgatgagttctgcggcccagcatatagaaatggctcagaacgttccaggccttggtgagacacagcagcgtccaatgctcacaggctgtccccactctgcctgttcccatcttcccctcgggacctgtttataaattgaggaatggatgagggccctggagggtccttgggagtagttagtggagggcaggattctcaggtccccatagagagggaaagagaagaccagatgtgcatagaagccaatctctgtcacatacaccgcaggtggtcaccgagttattttccaaaagctgaggaacataaagcaaatttaggcttttgtccttctgcaatacatgcacttgaaaataaacagaaaagagatgtttaataacaagtttacttccggtctgctagcaccctcagcctgggagctactgccagaggctggcgtagtggggcagctgctgaccaaaccccacagaacagagggcaccaggcatcacacgacatctttccctcccatctctgccatctgtctgtctggcaatggaaggagcttcagcaggagrtccttcccagaaggttgattcttggcctgggtggtagaggagatatcctgaccctaaagtcttccagccccgggtcatcctctcctatactagggcctattgaccgtagaggccaggtgcggtggctcatacctgtaatcccagcatttggggaggccaaggtgggaggattgcttgagcccaagagttggagaccagcctgggcaacatggtgagaccaattgactgtagggcttgtcccttgctaagacaggagcagaagactggatggctgtgtcctcaaggcagtcccctcccatccccattcccaaagtcagaaagygaagccagatctcaagggctgatacctgaggcaaggagagctaaggggagagaaattggggctgagtggaagcagatgcctgcacaagccaagtgtgtcttattgatctgtacaagctgatagaaggaccatctgctgaaatccagggctcctgagttggtgggtttgcttgtgaagcttctaggacaaggcgcagccagatggaagggagagggtccagggcttcctaaatgcagccgcatcacctgtcaactcgctgcagtttcagagacagtggaagctgctctttacctcaaaagcacaaagcagaattsgcaacttcacwtgtctcaagagctccaagatcctttggtctcgtgtcctttggcaccccgtaactggactgggracaaatttgttacgtgtttccaaggctacagacatggygccatcctcacaggcctagctcatgtcatggatcaggtgctttgctggggggatacaatgacccatgtggtctgcgtcttctgccattggcttgaactgggcaccccctgaagtctccatctcagctgtatattctagtccaaattttcctggctcccctgctccctcccaggtcctgcacactgtctttttgccaacacctcagccctgtttgctatttcatgtctgcatggtacgagacaccccttcacrgcatacactgccatggtatgtacatatgcatccacgtgtgtgtatgtgtagcatgtagctcattctgctcagcctctggcgccgttccacattgctcccagccccattgctgtcactgtcgtcccagatgtccttgccatggccacagacaatctgccgtctcctggaaacgctggggctgcccttcagagagctggcagccccagcagtcagggcctgctttgcagaatagaatgtgaacccaactcctgatggcctacttgacttatttaattaaagatgaaatcatgcaatgagcaaaacctgcagcgtgtctctgccttttcctttgcatttgttctcagcagcaattgggtcataatttttttttttttttaattaacagtggtagaaaggaggtgacttccagcatgaagcaggacagagaatccccctgcccattcccaagggaccaaaggcactaggggaatatggggcaggatgaatgtaccttgcgtcaccaggctggcagagctgatggggactgcgctgagcggagagagagaaaacccaggtatttgggggcagagacaggagtgttgggccagcggtcagggggcctggggatgagtcccagctttgccactgtctggctgtgtgaccttgcataagtcacttcccttacttggacaccagtttccttttagaatgaaggtgtaatcagttgttcacaaacattgttcccaaaaagccccattagggattcaaaagtcagctgaaagggcaggcggcaccctctcaacaagagtcactgtgcgttttgatctgcttcacgtgttcagatagcatttcagatttatttggccttcaactaaatctccaaaaacacataagaaggttgccaaggaccctttcagctaagaaattgaatggagtcctttcaaattgcagttacatccgtcataacaactttagttcttactacatttcagccctgcttgtctcccaagagctgcctgcagagcatgggtgtttccctggggagaagggagagagctcattttggaacacagaagccagagctggtggggctttgtgggtctcaggacacaggggtagcaggaccagcagctgcaggaagaggcagaggagggctgagcacggggacagtggctcctggagtgagggaatgaagactcagagaggctcaatgtgagggaacaggcccccctccccaaatcttaacctgtgtctctgccagttcacccagtccaggcttgggaagctcaagccagctccctcccacctcttaaagtatttgagccggtgcctgtcatcccaacctgaacagaagctgcccaccccagtcaggtgctattgctgtctcccctacgctgggggctggatatagttagtttaatttctgggctgtgtttcctaccacaaatgaccccctggggaaacaaattgcactaatcacagagcagagaagcctggacacctccccacccacccacccctcagctgccaggccggaaccgtctctcctcctcctcctttcccccacccccagaccccttcaggatcgtcagtcttccttcctacaccccaatttactcaaccctggggaggagtcaagcgccccgtgggctctctgggacagggagagttggctgggactctctggaaagcagtttgatcagcagggggctggggtcagggacctgtgccattgcccacagagccctgccaggcccagcactggcccagccctggagcctgcagcagcatcctcaagtgtgtttggagaaactgtggtcacaggattgctcttgggaagttacagtgcacatttgcgattacaggctccaggtaggccgctttcctttgactcacccagcattaaggattaccttctagaaagaaccatttttatggaattcgtttatcatgaaaaacttttttccaaacaacagtctttttcaagactctggccttctttattttttaagactctgtcacccaggtgggagtgcaatgacgcaatcacagctcactgcagcctggacctctcaggctcaagcagtcctcctgcctcagcctcccaagtagctgggactataggcatgcaccacacttgctagcttttttgtattttttgtagtaatgggatctcgccatgttgcctaggctggtcttgaactccgaactcaagcaatctgccggcctcagcctaccaaagtgttgggattataggcatgagacactatacctagccaagactctgtcattctgcaaaagagttagtagctaccagcagcctgcagctggaagtgtgtaggaccaaaagccaccctaagcagccattaggtggtgggtgagttggctgggagaaaaaatctagggttgggtttaaggcccatcccccttcacaccatcctccccgagctgccaggctaagaggatccctcagagattgcagcagcctcaggggcactgagagccagggttcggggcactgagggccagggttcaaggccctgagacttgctgtccccaaacctccctggttcttggcttcctcaactcaacccacgctgtggggcctctgtggcatgacccaaaagatgtggaacaccccacagagagtgggaactctggagaaccaggccaggtataaacaccacgggatactatttatctgagaaataggggtttgagattgctcttaaaggagccatttctgaaacagtgggacaaaggttaccagcagtaaataggtttcctggaggtgtaatcctctagtagctagtaaaaccttcgctgaaatctgcgggccgtttattggaagaagaagcaggtagtaagtgcccagcaggagaggcccgcccaagaaaattagaagggggaaaaagaaggaagggagggagggggaaggaaggagagggaagagaagaggaaagaaggaaaaaagggaggaagaggctgggcgcggtggctcacacctataattccagcactttgggaggctgagatgggaggattgcttgcggctaggagttcgagaacagcctggtcaacatggcaagatcccacctcttaaaaagaagaaaaagaaagaggaaggaagggtggggaaggttgggaaaggaagggagagaggaagggagggagggtgacagtgggatgcatttcatgccaatgcagaggaggaagacagccaagttgttgaaaagaacacccttggggatagccacagccacagtgcccaagagtttagagggtcaggccaagcccaggtacactcagtcctgtacacctttggccatggggctaatttgccccatggatatgtggttcacaccatgtttgtttctgtttttaacaatcggcaggccagcacggtggctcacacctataacccccagcaccctgggaggccaaggcaggtggatcacttgaatccaggagtgtgagaccatcctgggcaacacggtgaaaccctgtctctacagatacaaaacaaaatattcaccgagtgtggtggtgcgcacctgtagtcctagctactcgggaggctgaggtgggaggattgcctaagcccaggaggttgaggctgcagtgagctgtgatcacatcactgcactctagcctgggtgacaaagtgagactctgtctcaaaaacaaacagttggcattcaaggacaacactaaaaactgaaggggttttatataaaaggcagacttggctcctcttgaaaatcaggtgtcttggtttgggttacaccggcagctgacactgggacaagggcaaaatggtttctttaggagctgtggatggtccggcaagggaggagaggaggcaggcagccagcagaaccgtgccgctgagccagctgccactttggggaactggagccgaatccctctgggaaccacagtgcaaagcaggtgccttggactcactccaccccggggtgaggagagggagtctgaaggttcctacaccagtgcctgtcagcttctggctgagactgctcttggagggtattaatttcacagcacagccgctggccccagcagaacagcattcccaaactctggaacaaaccattagactcagaggtaaagatacaggtggctagaagtttccagagcacagtaaaaggttaggtgtaggggatagggcacggtctgacaacatctacgccctggggtgctctcattcccacaggaaaaataggctctggtgggagggggcagcagcctttttaaccggagaaggtcagggtccccacctgcccatcccccggtctccccaattactgaggcagcaatgccctttgccatgtatcatagcacttgcactgatgtttgacttccaacacaatatcttctctgtgaattcatgtctgtccaacatgagaaagtgtcaggccaagagggccacggctcccaagccattcactgtgacagctccccagccactacgggtatttgggtttgcagccctggcttaaagtcctggaatgctaagggctgggctggctttcctgacaacattcactctaggcttctttttttttttttttttttttgagacagagtcttgctctgtcgccaggctggagtgcagtggcgctatctcggctcactgcaagctccgcctcctgggttcatgccattctcctgcctcagcctccccagtagctgagtctctactaaaaaaaaacaaatacactctaggcttcttaatgcttagacctcaggaatgaggtggttgctctccctggtctgcacaccatggaactcaacaccccctggccatctctcacggcacctacctagacttctcccgcccacctaagcagatggccagaataaacactgaagaagaggacagctggttttgcccacctggaggtgaacagggctaggcctgcatccagtccacgccagagctgccccctggaatgttttcaactcatttctgcctcggtgcacacagtggggcatgctcctctgtggggcacacagaccccttgggcacgcgctcactgtgatcagcatggcagttcccagtgcctgggctcaaatgcttctccattctctcccacacaagaaagctcaacagagtgacagaggacactgtgtgtgcaaagacctggaggataaaggggacatgggaagtttggagaccaagaagcagtttgctctggccgagatggtgatgagacaggaagctggagaggaaaactggggcccgaatgtactaagaaaaagaggtttgacttgctcctaagagctatagagagccattgaaaggcagagtgaagcagagtggtttggtctgatcaactgtattctattttacagagagaagagtgaggcacggagagctgaaatgaccagcagcgtcagaacatgaacccacgccactcatccttggattccaagcctagatcctcctgtcctatcctttgcctcacacctcccacccaatgtattaagaccccatgggctgtgtgctatggtttgaatgtcccccaagattcatgtgttgaaacttcatcaccagtgtgatagtatcaagaagtgagatgtttagaaagtaaatcatgaggagacagccttcaagaatggaattagcagctgggtgcagtggctcacacctgtaatcccagcactttgggaggctgaggtgggcagatcatgaggtcaggagtttgagaccagcctggcccacatggtgaaaccccatctctactaaaaatacaaaaattagtcaggcatggtggtgggcccctgtaatcccagctgctcgggaggctgaggcaggagaatcgcttgagcctgagaggcggaggttgcagtgagccgagatcgcaccattgcacgtcagcctgggagacagagtgactctgtctcaaaaaaaaaaaaaaaaaaagagtggaattagcaaccttatgaaagggctggaggaaactagtaatcactcctttttgccctctgccatgtgacagcacagcactcgtcgtttccagaagaatccagagtaagacaggaagcagagaacatccctcaccagacaccaaacctgcagcacctggatcttggacatccagcctccagaacttgagagataaatttctattgcttagaacttgcccagtctgtggtattttagtatattaagttggtgcaaaagtcatgggttttttgccattactttaacgtaaaaaactgcaatttttttgcaccaacctaatagcaacacaattggatgaagacactgtgtacatgctatgaaacccaagccagaat

SEQ ID NO: 93737 - DNA, 15830 bp, Homo sapiens
  misc_feature (1)...(15830): n = A,T,C or G
ttaaacgaaagcacaccattcctgtcaaagtcttggtcaaataatcaattcctccaattgtgtcctgttacaaatgaaaacagattcttttttttttttttttttttggtggagtctggctctgttgcccaggctggagtgcaatggtgcaatctcagctcactgccacctctgcttcccaggttcaagcgattctactgccttagcctctggagtagctgggattacaggcatgtgccaccatgcccagctaatttttgtgtttttagtagagatggggttttgccatgttggccaggctggtctcgaactcacaacctcaggtgatttgcccaccttggcctcccaaagtgctgggattacaggagtgagccaccatgccaggcaaaaacagattcttatggcacttatgcaaataactgtattgccataagttaagaatactcacaaatagtttccaaattctggagaaatcaggtagagaaacaaatatgctccaaattttgttcataggactgtactaaattgttaaaagctgttggccaggcacggtggctcacgcctgtaatcccagcattttgggaggccgaggcaggcagatcacgaggtcaggagttcaagaccatcctgaccaacatgctgaaactctgtctctactaaaaatacaaaaattagccaggtgtagtggtgtgcacctgtaatcccagctactcgggaggctaggggaggagaatcgcttgaacccaggagccagaggttgcagtgagccgagatcctgccattgcactccagcctgggtgacagagtgagacttcgtctaaaaaaaaaaaaaaaggccaggcacggtggctcatgcctgtaatcccagcactttgggaggccaaggtgggcagatcacgaggtcaggagatcgagaccacggtgaaaccctgtctctaccaaaaatacaaaaaattagccgggcgcggtggtgggcgcctgtagccccagctactcaggaggctgaggcaggagaatggcatgaacctgggaggtggagcttgcagtgagctgagatcgcgccactgcactccagcctgggtgacagagcgagaatccatctcaaaaaataataataataataatatataatacgacaacgtggcctgacatggtggctcacgcctgtaatcctagcattttgggaggccaaggcaggcggatcacctgaggcgaggagtttgagaccagccaagccaatatgctgaaaccccatgtctaccaaaaatacaaaaattagccaggtgtggtggcacatgcctgtaaacccagctactggggaggctgaggcaggagaatcacttgaacccaggaggcagaggttgcagtgagccaagattgcaccactgcacttcagcctgggcaacaaagcaagactctaccctgaagaaaaaagtatacgacaacttgattatataaaagtttttgggtttttggccgggcacggtggctcacacctgtaatctcagcacttctggaggccgaggcaggtggatcacgaggtcaggagatcaagaccatcctggctaacatggtgaaaccctgtctctactaaaaacacaaaaaaattagccaggcatgatggcgggcccctgtagtcccagctactcagaaggctgaggcaggagaatggcgtgaacccgggaggcaagcttgcagtgagccgagattgcgccactgcactccagcctgggtgatagagcgagactccgtctcaaaaaaaaaaaaaaagtttttgggttttttgtgacttacactgactgttcatgacatggttggactttccaatttgttctgaacatccctcctttttatttattttgggttttttttttttttttttttttttcagatggagtcttgctctgtcacccaggctggagtgcagtggcatgatctccgctcactgcaagctccgcctcccgggttcacgccattctcctgcctcagcctcccgagtagctgggactacaggcgcccaccaccacgcccagcttaattttttgtatttttagtagagacagggtatcaccatgttagccaggatggtcttgatctcctgaccttgtgatccgcccgcctcggcctcccaaagtgctgggattacaagcgtgagccactgcgtccggccctattttggtttattttttattttttatttttttcttgagactgagtcttgctgtcacccaggctggagtgcagtggcatgatctcagctcattgcaacctctgcctcccaggtcaagcgattctcctgcctcagcctcccaagtagctgggattataggcacacaccactaagcctggctaatttttgtatttttagtagaaacagggtttcgccatgttggccaggttggtttcaaactcctgacctcaaatgatcctcctgcctcagtctcccaaagtgctaggattatgtgtgagccactgcacccggcttatttttttttttttttagcagagtcttgctctgtcacccaggctagagggcagtggcgcaatctcagctcactgcaacctccgccttccaagtttaagtgattctcctgcctcagcctcctgaatagctgggattataggtgtgggccaccatgcctggataatttttgtgtttttgttgttgttgttgttgttgttgagatggagtcttgctctgtcactgaggctggagtaacagtagcatgatctcggctcactgcaacccccacctcccaggttgaagcaattctcctgcctcagcctcctgagtagctgggattacaggcacccaccaccatgccgggctaatttttgtatttttagtagagataggtttcaccatgttggccaagctggtctcaaactcccgacctcaggtgacccgcccacctcggcctcccaaagtgttgggattacgggtgtgagccaccactcccagccaaaaaaaatttttttaatcttattaccatatttcagctagaacaaaatgctgctaaagtaacaatgatcacacaaagtatatgatttctgagtgctgtaagtgtaagcagaagttaacaccagctggttgttaaatgctaactttagtcatttaaaggaaattgcaaggcagaatcccaagccagtttcttacctagtgatgggtctcaggctgtagactgctctctaccatcccagaagcaggaaaaaaaaactaattttccctgttggaagcgagctcaaactccataaaggagttacctgccttccatcgtcatggaagcagaaaaacttgctttccttttgggagcaagtaaaactccaaaaaaaaaaaaaaaaaaaaaaagagttgtacagcaaaataaactttagatctcaaccaattgagaaatcaaggattctctggagggggtgctcccagacctcagcaaattgtcctattggtttgagccataaagttagctcctgctggtaccaagcacagataggcaattagtcaaaagtcaaggacatctccacacagaatccatccatagttaccaaatgtgaacccagaaaatctgagacagctctcagttaatttaaaaagtttattttgctgaggttgaagatgcatccaagacacagcctcaggaagtcctgatgacatgtgcccaaggtgttccgggcacagcttggttttatacattttagggagatatgagacatctatcaatacgtaagaagtaccttagccaagcgtggtggctcaagcctgtaatcccagcactttgggaggccaaggtgggcagatcacaaggtcaggagttcaagaccagcctggccaatatggtgaaaccctgtctctactaaacatataaaaattagctgggtgtggtggcacgcgcctgtagtcccagctactctggaggctgaggcaggagaatcgcttgaacccgggagccagaggttgcagtgagccgagatcatgccattgcactccagcctgggcgacagagtgagacttcatctaaaaaaaaattaggccaggcgcggtggctcacacctgtaatcccagcactttgggaagctgaggcaggcagatcacaaggtcaggagatcgagaccatcctggctaacacggtgaaacctcgtctctactaaaaatacaaaaaattagccaggcgtggtggcgggcgcctgtagtcccagctactcgggaggctgaggcaggagaatggcatgaacccggggggcagagcttgcagtgagctgagatcgcaccactgcactccagcctgggcgacagagcgagactccgtctcaaaaaataaaaataaaaaaaaaacagaagtacataagctctgtccagagaggtggagacagctcaaagcacggccccccactgggggcttccaggtcacaggcaggtgacagacagatggttgcattcttttgagtttctggtagtctttccaaaagaggcaatggaggcaatcataatatgcatctatgtctgtaagcaaaaggatgacttgaatagaatgggaggcagatttgtcctgagcggttcccagcttgaaggggcccaagatattttcctttcacatattgaacaagtgaaaccacaaatgaatgaacaagcatgtgctcactgacagctcatatgcatggtcacacaaacacaggatctcatgctcacaagacagcagggctcacacacacccagtcccaggcactgggttccacactcacacctacttgccactggaatttgtgcagaggctcagatggtcactaaatggggcttcacaaagacacagtcactaacccagcacatatacaaagggtgatgacacagccctgacttcatgaacacagtgcctttcagaaacaggtccctacaacagggatgacttatccactaagcacaatagacccaaggcctagggccacagtactttcaggggcccacaaaatgtttttttaatcagaagaagaatataaatgtaaatatattaataattaatatataatagtgtaacccagacatgacctcctgggctcaagcactcctcctgcctcagtgtcccaagtagctgggactacaggtacataccaccatgcccagctaatttttaatttttttgtagagatggggtcttgctacattgcctaggctggtctcgaactcctgggctcaagcaattctcccacctcagcctcccaaagtgctaagactatagccatatatatatatatatatatatatatatatatatatatatatattttttttttttttttttttttttttgagatggagtcgctctctgtcacccaggctggagtatagtagcacagtggagcagtcttggctcactgcaacctctgcctcccgggttcaagggattgtcctgcctcagcctcccgagtagctgggattacaggcgcctgccaccacgcccggctaattttttgtatttttagtagagaaggggtttcaccatgttagccgggatggtctcgatctcctgacctcgtgatctgccacctcggcttcccaaagtgctaggattataggcgtgagcctccgcacctggcatgcctggccatattttaaaatattttttttaaggaggaaaagatccacgaaagtaaagtgcctagggcccatcaatgtcagatgcagccacrtggacaaagaacactccctgagcacaagacacgaaagaacccggtctccagtgtcacaaacaggcctgcccagcagggtctgcccctgcccacctcctccagcctaggtaaggccacaaagccctgccctagtgctgacagcgtgggaggggccactgttggcccagccccacccccaaccaagatccctttgccagggattcagaggtagccctgatgcctggctggcctggcctcctaatccaaggcccgccccttggcccgcccctggcctgggtggggtgaccccctacaaaagctcagaatttccagcagcggctccttcctccaggagtctctggtgcagctggggtggaatctggccaggccctgcttaggcccccatcctggggtcaggaaatttggaggataaggcccttcagccccaaggtcagcagggacgagcgggcagactggcgggtgtacaggagggctgggttgacctgtccttggtcactgaggccattggatcttcctccagtggctgccaggatttctggtggaagagacaggaaggcctcccccmcttggtcgggtcagcctgggggctgagggcctggctgtcagccactcttcccagaacatatgtcatggcctcagtggctcatggggaagcaggggtgggcgagcttaggctaragcaagtcctgtgggagatggcagaggcctggtctgagaggcaactcggatgtgccctccagtggccatgctcccctccatgcgtctcccctgccctcctggagccctgcaggtcaatgtttaacagaaaccagagcagcggtggattaatgcgcaagggctcagccccccagccctgagcagtgggggaatcggagactttgcaacctgttctcagctctgcctcccctggccaggttgtcctcgaccagtcccgtgccatggcagcccacctgcttcccatctgcgccctcttcctgaccttactcgatatggcccaaggctttaggggccccttgctacccaaccggcccttcaccaccgtctggaatgcaaacacccagtggtgcctggagaggcacggtgtggacgtggatgtcagtgtcttcgatgtggtagccaacccagggcagaccttccgcggccctgacatgacaattttctatagctcccagctgggcacctacccctactacacgcccactggggagcctgtgtttggtggtctgccccagaatgccagcctgattgcccacctggcccgcacattccaggacatcctggctgccatacctgctcctgacttctcagggctggcagtcatcgactgggaggcatggcgcccacgctgggccttcaactgggacaccaaggacatttaccggcagcgctcacgggcactggtacaggcacagcaccctgattggccagctcctcaggtggaggcagtagcccaggaccagttccagggagctgcacgggcctggatggcaggcaccctccagctggggcgggcactgcgtcctcgcggcctctggggcttctatggcttccctgactgctacaactatgactttctaagccccaactacaccggccagtgcccatcaggcatccgtgcccaaaatgaccagctagggtggctgtggggccagagccgtgccctctatcccagcatctacatgcccgcagtgctggagggcacagggaagtcacagatgtatgtgcaacaccgtgtggccraggcattccgtgtggctgtggctgctggtgaccccaatctgccggygctgccctatgtccagatcttctatgacacgacaaaccactttctgcccctggtgagtcttctgtaacctgcccaccttgtcaacctgccttgtcagatattaggtccagccttggggtactttagctttgggacattttcttcgtttttttttttttgagacagagtctcactctgtcacccaggctggagtgcagtggcacgatcttggctcactgcaagctctgcctcccgggttcatgccattctcctgcctcagcctccgagtagctgggatacaggcgcccgccaccacacccagctaattttttgtattttttagtagagtcagggtttcactgtgttagccaggatggtctcaatctcctgacctcgtgatccatccgcctcggcctcccaaagtgctgggattacaggcgtgagccaccgcgcccggcccccaaccttgggacattttcatccattcattcatcctttttttttttttttttttgagacggagtcttgctctgtcacccaggctggagtgcaggggcaagatctcagctcctgcaccctccaccttccggattcaagtgattctcctgcctcagcctcccaagtagttgggattacaggcatgccatcaacatgtctggctaatttttgtatttttagtagaaatggggtttcaccatgttggccaggctggtctcgaactcctgacttcaggtgatcctcccacctcagcctcccaaagtgctgggattacaggtatgagccaccgcgcctggcgcatgggcacatccattgagtgtgcacttggtgccaagttctgtgccaggcacaggcaattcaacatttattggaatgatgtagtccctgtctgcatggaattcataggctagaggaggaagcagtttgcctctggtcccatggccagagcagccccaggtgaaggttatgaattatttgtcccatctaatggtgttccagcagtctgccacatggtgggaaggaggccccacagagctgtgctgtctccttcccaggatgagctggagcacagcctgggggagagtgcggcccagggggcagctggagtggtgctctgggtgagctgggaaaatacaagaaccaaggtgagcttaggcctggcatgagggtgggggtgggggaggggtggggccattaagctgacggggtagaccctgacttaccctttctacctgcaaagtcctggctgaccagcaggtgagtgcctcagtgccctgggtgggtccatacatggccatggtgtccctgacgctatcctcccttcccacctaggaatcatgtcaggccatcaaggagtatatggacactacactggggcccttcatcctgaacgtgaccagtggggcccttctctgcagtcaagccctgtgctccggccatggccgctgtgtccgccgcaccagccaccccaaagccctcctcctccttaaccctgccagtttctccatccagctcacgcctggtggtgggcccctgagcctgcggggtgccctctcacttgaagatcaggcacagatggctgtggagttcaaatgtcgatgctaccctggctggcaggcaccgtggtgtgagcggaagagcatgtggtgattggccacacactgagttgcacatattgagaacctaatgcactctgggtctggccagggcttcctcaaatacatgcacagtcatacaagtcatggtcacagtaaagagtacactcagccactgtcacaggcatattccctgcacacacatgcatacttacagactggaatagtggcataaggagttagaaccacagcagacaccattcattccatgtccatatgcatctacttggcaaggtcatagacaattcctccagagacactgagccagtctttgaactgcagcaatcacaaaggctgacattcactgagtgcctactctttgccaatccccgtgctaagcgttttatgtggacttattcattcctcacaatgaggctatgaggaaactgagtcactcacattgagagtaagcacgttgcccaaggttgcacagcaagaaaagggagaakttgagattcaaacccaggctgtctagctccgggggtayagcccttgcactcctactgagtttgtggtaaccagccctgcacgacccctgaatctgctgagaggcaccagtccagcaaataaagcagtcatgatttacttagctgtttactgagcgcctaaaatgtccaggccccggtatccaaagggcacaggaaaggcttgtcactctcaccagatctgacgtcagtctaagggcggctgcttcccagggtggggcccaaatttcaagaggaagccccacctgatcggaccgtttccaagctgtcctggggcaggaggccggcgggaaccgaagctagacttgtcagagcctggggcggggctggcggaggcagagccagctggaggcggggcctgcgcctggctgaagtgacgtgctgggctggggcagggcctggaagaagccaaatcgaggcgggacctaagctgtgacgcaaggagaaggaggaggggcctgtatggggccgggtggggaggaggcggactcaaatggagatggggtggggctcagcaggggcggagccagggtagagactgagtcggcgcctggcgggtgttgtgacgcgcaaaccaggggcgggttctaagcggcgacgcgcgggtgctgggaggccttagaacgccgtggcgtgccgcaggacgcgacggctgcagaacatccgccgcaccgctgggggccaacgttgtcggaccgaggagtccgaggtggcgactgagtgagatacccagctgtgcggagctaggacgcggaacatcccrgaggccagcatcaacatgtcagtaccgcacccttcccatttgctgcctgtaggtccaccccgcgcgtgcggtccccaagtggccatgccaccctgcacgccctccccgcgtcagtcgttcgtttccagaccatgccgagccacacctgcccacagagtcgagctctcgaagtcctcattcccaaaagctccacagcctgtgacccactaggagggagggggaaaccgaggcccgggagagacggagaagccactctctgaggaccccggagccccgcccacagtgggtggggtcggcactgaaggggttaaggccgcggggaagccccgggctcagccctaggggcggatcctggggcttcctccctctagaccaaagggtgcggctgctgcagaggtggctgatgcaggtgaggggcttacagccctgtgaatggtgtgggaggtgaggggaggggggtgcctgttactgaccagtgtttaattggcctcaagctcaggagaggtaaggggagccaggaggccccctctggagcaggtgagtagaaggagggggctcagctgcccgcccacgactagaaaacccccagcatagacctgccggacggcaggaccttggttaagatgggaaaacagtagggtttgggcacaggaggtctgggcccccaacctggtgaccgttggacaccctgtggatataggaaggaagctgtggtccttatctagggtgcctgcgaaactcaagccagtggggaaccaagcctgcagaggcaatactgctgtgtgactgtgggccaggcccagtgctggtgctgctggggccccatctgaggagacagttgggtctatatccaaagtgtcctgagatgggcagagttgggaagggggccatgggctccaggtggggaaggcagtcaagacaggccaaagctcagcctgatgggtgcatgagtggggccccaggatccactaaggcagtgggcatagcccaggtagttgaaaaggctgggagctggaggagactcggaacatagggagaagaaagggacaggaagactcccgggcagtttttcctatggagggaaccttgggtaggtttgagcagggggtatagtgtctgctttgcatcttctatcccatgccctagtggtggactaggaggactactggaagacagaaggccagcaagtagattgggtcggctgttttatagacctggtggttacagaccccctgtgaggggaggtcctgaggaggacaaatttgtagccagagcaggctggggccaggactcctaggttctgccccagccttaagcagctcatccatcactcccagcctccctccaatgtggggtagacacctggatctatctgccctgctctataggggatgggtctcttccaggtcacctgtgctatcaggtgagtgtgggacaaagtgcagcccaccactccccagttccagtatgcatggtcccccctgcactctgtcagcccttccctgctccaaccccaccctccctcctggcacagcccagcatggctgttatctacaggaggagagccactgtggtctgaagagatgctactgcctggagactggggtcttaacctccagcctggcactgagccacctgcaacctagcagcaggtgaccttggctcccagcctgactcagctgaacctggatcctgtgcataggcaagagctgactctgagccctggcccagccaagctgacccctacactagaccctacacaccggatggagctgatcctgagtaccagcccagctgagctgactctggatcctgcgtgccagccaaagctgcccctggattccacatgccaaccagagatgaccttcaatcctggtccaactgagcttaccctggatcctgaacaccagccagaggagaccccagctcctagcctggctgagttgaccctggagcctgtgcaccgccgaccygagctcctggatgcttgtgctgacctcatcaatgatcagtggccccgcagccgcacctcccgcctgcactccctgggccagtcctcagatgccttccccctctgcctgatgctgctaagcccccaccccacacttgaagcagcacccrttgtggtgggccatgcccgcctgtcacgggtgctgaaccagccccagagcctcttagtrgagacagtggtggtggcccgggccctgaggggccgtggctttggccgccgcctcatggagggcctggaggtctttgctcgggcccggggcttccgcaagctgcatctcaccacccatgaccaggtgcacttctatacccacctgggctaccagctgggtgagcctgtgcagggcctggtcttcaccagcagacggctgcctgccaccctgcttaatgccttccccacagccccctctccccggccacccwggaaggccccaaacctgactgcccaagctgccccaaggggtcccaagggacctccattgccaccaccccctcccctacctgagtgcctgaccatctcacccccagttccatcagggcccccttcaaaaagcctgctggagacacaatatcaaaatgtgagggggcgccccatattctggatggaaaaagacatctgaggccatccagggcaaggaactgtctttctggttcaatagactgccccgacagtctacaagcctcagcccactgaccatacctcagcccctagcccctggggggcagctttaacctgggcatgtttcctgggtaccagtggggccaggaggtggctctggctcagagccgtcagtgtggctgaataaaggctctcttgggtatggctgtgacagtttatttgttgatccccctaccctcacctctcacctcttctgcaggtcccttatccctgcagaagtctccagatccaccttggccctgaggccattgatgggaggatgcctgtcctttgcctttaccccccacctggctcaggagacagggtggctgttttcttccccattcactcattaccattcactgagcacctactgtgtgtcaagccctggacgggacataggcaatgggtaactagacaaacaggcatacagtagcaggatccatgtggcacaggggaggtacagaggctttgggaacccaagtgacttcactccacctggggatccaggagacctcccagggcagtgatgtcacagcagagacctgagtgctaggtaggaattaaaccaggcaggtgaggaggtgggagctgactgttcttggaagagggaacaaggtgggcagaggaaagaaggggacttgtgacagttgtgggaggacacagtggtgtattgacaaagacggaacatgggagggaatgtaccctcagctcactgtaaagcccgctttggtgtgcacctgccactcsatgcccggggcatcatagccagcttgcggtgtggctgctttaaaaggcccaagagacccctggggaaacatgctttccccagctcctcctgtaaggatggggaggagctgggggagctttcctggctttccctgccatgtggaaggtgtggccatagctgcggactctaagcttacacccccctctctcctgcaggtttccatccttggggaatgaccacgcaactgggcccagccctggtgctgggggtggccctgtgcctgggttgtggccagcccctaccacaggtccctgaacgccccttctctgtgctgtggaatgtaccctcagcacactgtgaggcccgctttggtgtgcacctgccactcaatgctctgggcatcatagccaaccgtggccagcattttcacggtcagaacatgaccattttctacaagaaccaactcggcctctatccctactttggacccaggggcacagctcacaatgggggcatcccccaggctttgccccttgaccgccacctggcactggctgcctaccagatcnaccacagcctgagacctggctttgctggcccagcagtgctggattgggaggagtggtgtccactctgggctgggaactggggccgccgccgagcttatcaggcagcctcttgggcttgggcacagcaggtattccctgacctggaccctcaggagcagctctacaaggcctatactggctttgagcaggcggcccgtgcactgatggaggatacgctgcgggtggcccaggcactacggccccatggactctggggcttctatcactacccagcctgtggcaatggctggcatagtatggcttccaactataccggccgctgccatgcagccacccttgcccgcaacactcaactgcattggctctgggccgcctccagtgccctcttccccagcatctacctcccacccaggctgccacctgcccaccaccaggcctttgtccgacatcgcctggaggaggccttccgtgtggcccttgttgggcaccgacatcccctgcctgtcctggcctatgtccgcctcacacaccggagatctgggaggttcctgtcccaggtaagtggaagctgaggtctaggggtctgagtcaggaggtatggccctgttctaggaaggtcccaggagaagaccttgcctaggggttggtcctaatctaggcgttctcagcggaaggccctgtcctggagcatctgatgagggaggcatggctttgccctggaagatgttgaggggtagggaggcccagcctttggagtgctggcctgaggggagatattctgagtggaaggcctgagaagccactcagagactcgatacaaaggggccctacttgggctgggtgagtgtctcacacctataatcccagtactttgggagcctgagatggaaggattccttgaggccaagagttcgagaccagcctgggcaacatagtgagaccccaacctctaccaaaaaaacatttgagacagagtcttgctctgttgcccaggctggagtgcagtggcaccatctcagctcactgcggccttcacttcctggttctagtgatcctcccacctaagcctcctcccgaatagctggactacagatgcataccaccacacccagctaatttttatatttttgtagagatggggttttgtcatgttgcccaggctggtattgaactcctgggctcaagtgattctcccgcttttgcctcccaaagtgtgggattacaggtgtgagccactgtgcccagcctaaaaaattattagccaggtgttatgcacctgtagtcccagctgcttgggaggctgaggtgggaggattacttgatcccaggagttcaaggctgcagtgagctatgatcatgccactgcactccagcctggatgacagagtaaaaccccgcctctaaaaccaaaccaaactagagagtccctactgtagagttagaatcagattgtgacagtgaaccagaagagtttcttgaatgtggatgtgtgcccacatggatctggccagcccagcactgg

SEQ ID NO: 93738 - DNA, 34110 bp, Homo sapiens
ggtctcaaattcctgacctcaggtgatccacctacctaggcctcctaaagtgctgggatctcaggtgtgagccaccgtgcccagccgtctccaatagaaggaggcagagagaggtttggcacccaacagaaatgagtttaaatcttggttcccctggttcttggctcaagcttctctggtgcccagtgccttcctatgaaagggaatgagaggggtctggggttgtgacaaaatcatgtttctagtgctgggcaaggtgatatgcacctgtaatatcagcaactcaggagcctgaggagggaggattgcttgaggtcagaaattcaagcccaggccgggtgtagtggcacacaactgtaatcctagcactttgggaggccgaggtgggcagatcacctaaggtcaggagtttgagaccagcctggccaacgtggtgaaatcgcagctctactaaacatacaaaaagtagctgggcatagtggcgggcagctgtagtcccagctactcccaacctgggaggcagaggttgcagtgagccaagatcgtgccactgcactgcagcctgggcgacaagagcaaaactccatctcaaaaaataaaaaaataataataaataaaataaatgaataaataaataaaataaaaataaaaataaattcaagcttagcctgggcaacaggctcaaccccatctcaaaaaaaaaaaaaaaaaaaaaaaaaggccaggcatggtggctcacacctgtaatctcagcactttgggaggccaaggcaggtggatcacctgaggtcaggagttcaagacgagcctggccaacatgttaaaatcctatctctactaaaaatacaaaaactagctgggcgtggtagcacatgcctatagtcctagctacttgggaggctgaggcaggagaatcactggaacctggaggcagaggttgcaatgagctgagatcacaccactgcactccaggctggacatcagagtgagactctatctccaaaaaaaaaaaaaaaaaaagtagtcaggaagagacatcaacaaaaattggtgatgaatggggtagcagtggcactggggaccaaaagggaacagatattttgcactacaattgtcatctcgtttcttttcttttttttttgagatggagtctccctctgttgccaggctggaatacagtggtgcgaactcggctcactgcaacctccgcctcccgggttcaagcaattctcctgcctcagcctcccgaatagctgagactacaggcacatgccaccatgcccagctaatttttttatttttagtagagacagggtttcaccattttgattaggattgttttgatctcttgaccttctgatctgtccacttcgtcctcccaaagtgctgggattacaggtgtgagccatcacgcctggccaattgtcatctcttttcacttttgagcacatatgggtatgctgtaaaggaaattttaaaatctcaggatcccagccccccatcttcttatgcaaaagagaaagtcattgtgacacccttttccaaatgaatagctgttcctaagatcatgtaacagccagatagatgtccattcagcaagaaaaggcctcaggcatctgggaagggctgcgccccgtagatcattcataaataaattatttgctggcctcctataatcaagtacatgccaatgttaactttaggtctacaatcttttttttttctttgagatggagtctccctctgtcaccgaggctggagtgtacttgtgcagtctgggctcactgcaacctctgcctctcaggctcaagcaattctcttgcctcagccacccgagtagctgggattatgggcgtgtgcctccgcactgggctaatttttgtatttttagtacagatggggttttgtcatgttggccaggctgttttcaaactcctgacctcaggtgatccacccgccttggcctcccgaagtgctggaattacaggtgtgagccactgcacccagctgagtaaatttcttgattgcacagaatgtatggtgatattggtggacttaaggacattgaattgtttatcaggaataaagtattatgtgtgttttctggggtcctggataatgctgtagcattcagggtagattgagtaaaaaaaatgtagagatggtttcctagttacttgtttttgcttctaattttcattcatttgctatttattctcttctggctttgcttgtgtatgcatatatatataaccattattattattattatttttagtttctagtggaaggcttttatttggttctgtgaatagtcattttgtttcctatgtatttctagcaagttgtattcattccattgatctagaattcctaggctgccttcgttgggcctgcaggaattaatggagcatagcagctttttattttttatatttattttttgagacagagtctcacactgtcgcccaggctggagtgcaatggtacgatatcagctcactgcaacctccacctcagaggttcaagtgattctcctgcctcagcctctggaatagctgtgactacaggcacccactaccacacctggctaactttttgtatttttagtggagatggggtttcatcatgttggccaagctggtctcaaactcctgacctcaggtgatccatctgcctcggcctcccaaagtgctgggagtacaggcttgagccacaccgtccagcgagtatactttcataaatagaatttgagtcatatttctgtctctgcctaatttctccaaaatttgtaaactatttgtgaatattcttaattcatgacaatgtgtttgttggcatacagtccaacagggtcaccagggccgatcagggagagagagcctagaaacttgacatgttggcactactgtaactgctcaaggggttcaccttgcccactgcctagacagagccgattcatgaagacaggggaattgtaattgaccaacatggtataatcctgtctctactaaaaaaatacaaaattagctgggaatggtggtgggcatctctaatcccagctacttgggagcctgaggcaggagaaccggttgaactcgggaggcggagattgcagtgagccatgatcgtgccattgcacttcagcctgggtgacagaaagaaagaaagaaagaaagaaggaagggaggaagggaggaaggaagggaagaaagagagagagaaagaaagaaagctgctaacccaagcagaacaaaaaattaattgaataccaaaaaaacactttgctaaattttcatgttaaaacagccgataccaaaattgtttagataaacagtttggtttttgttgttgttgtttgtttttgttttttgctttttgcttttttgagacggagtctcaatctgtcacccaggctggagtgcaatggcgtgattttggctcactgcaacctctgcctcccaggttcaagtgattctcgtacctcagccttctgagtagctgggattacaggtgcccaccactatgcctggctaatttttttgaatttttagtagagacggggtttcaccatgttggtcaggctggtcttgaactcccaacctcaggtgatccacccgccttggcatcccaaagtgctgggattacaggcatgagccaccaccccttttttgttgtttttgaaacagggtctcactctgtcgcccaggctggagtgcagtggagcaatctcccctcactgaaacctccttctcctgggttcaagggattctcccatctcctcccaagtagctgggattacaggcttctgccaccatgcccagctaattttttgtgggctcgcccagcctaggtatacaatttgaatgaactccaaggtctaagtcaaattacctatgataacccattaggtatcagtgctatgcacgtaaactggagaaacaactgatattcagagcacgcaagtccgatgttaaccatggactcatggagaatcaagatggtcaccttgtccttcctgactccttaaagtgtttgttattaaaggttctgcagttgggcgtggtagctcacacctgtaatcccagcactttgggaggccgaggtgggcaaatcacctgaggtcgggagttcaatatcagcctcaccaacatggagaaaccccatctctactaaaaatacaaaaaattatccgggcgtggtggctcatgcctgtaatcccagctactcaggaggctgaggcagaagagtcgcttgaacccaggaggcggaggttgcggtgagccgagatagcgccattgcactccaacctgggcaacaagaatgaaactctgtctaaaaatgaaaaataaaagactctgcattccatgactcatcatggaaaagataaaatgatctaaattaaatatgtattggtgtgctgaattataaattgctaaaatagttcataaccaatgtttcgtttgtcaaattcatgttcctgggaagacaatcaaagcttcaggtgcatttggctacctcatgggccatttgaacatttcagttgtcaattatcattttcaatgcatgttttctggttgctttcccatgcaagagggctgatattacaacagtagatcattatggtacagtgtattttcaccaggtactgaaagctttttatggctcactgactggggacaatcaattccttcacaatctagaaccaaagattggatcttctgagaacatcagagaaagaatgtccttgccatccacaatacagcaaaacttcaggaccttgaactttgggttcataatctcacaagagggaagtttttcgccagaaaaagatggcatccttgatgtgaacagcttttcccaagatcacagatcaagacttctagtttttttttttgagacagagtcatttttttttttttttttgagacatagtctcggtcttgttgctcaggttggagtggaatagcgcgatcttggctcactgcaacctccgcctcctgggttcaagtaattctcctgactcagcctccagagtagctgggattacaggcgcccaccaccatgcctggctaatttttttgtatttttagtggagacagggtttcaccatgttggccaggctggtctcgaactcctgacctcaggtgatccgcctacctcggcctcccaaagcgctgggattacaggcatcagtcaccgtgcccggccttgtgatagtgtcttactctggcacccaggctggagtgcagtggtgcaatcttggttcactgcaaccttcgcctcccagattcaagcgattcttgtacatcagcctcccgagccgctgagactacaggcacgtgccaccatgcctggttaattttgtgtgtgtgtgtgtgtgtatgtttgtgtgtgatggagttttgctcttgttgcccaggctggagtgcagtggtgcgatcttcgctcactgcaacgtctgcctcccgggttcaagcgattctcctgcctcgggctcctgagtagttgggattataggcgctcaacaccatacccggggaattttttgtatttttagtagagacggggtttcatcatgttggccaggttggtctccaactcctgacctcaggtgatccacccgcctcggtgtcccaaagtgctgggattacaggcgtgagccctgtgcccagcctcagtgtctctctctctctcgactagagagactgaccagggacaatcaactctctccagactgacagagagagagacagagagagcgagaaagagacagagtctggctctcacccaggctggagtgcagtggtgtgatcttggctcactgcaacctctgccttccgtgttcaagcgattcctgtgcctcagcctcccaagtagctgggattataggtccacaccaccacgcccggctaatttttgtgtttttagtagagacagcctcaccatgttggccaggctggttttgaactcctgacctcaggtgatccgccagcctcggccttccaaagtgctgggattacaggcgtgagtcaccgcgcccggccaaataaaataaaatgttaaagcaaattcaggactacccctcctccaagtcttctgttccctttgggcgcccaggtgagcgggggaggggctgggggagtaataacatcaaaagagcgccttttcctcccttattccgaggagacttccctgggcctgactcccggtcctgtccccagcgccccgcggcctctggagccccttcagtgaccaagatacagagatcaggacgcctttgcgccgccccaggtgcccgcccctagctggctctgcttgggccgcgagggaaggtgaggtcgggggcggagccggggcgtgacagccggggtgtgtgtccgccgggcttggtgcctccggtggccctgcagcaccgtcccacctctgccaccctccgatggggccgctacctgtgtgcctgccaatcatgctgctcctgctactgccgtcgctgctgctgctgctgcttctacctggccccgggtccggcgagggtgagtgaggaaggggctttcccggaactcaggcgttccggtattcctccagcccttcctagggacccagcagccctgcctcccatccctctccaagttcctagttgccctagagcccccagctcgctcttctaatgctcacccacacgatgcgccccagccttctgcagggccccccactcactcctcccagggacccagaactagcccagtccttccccaggggcgcagagtcctctcctggctccctcccctaaccggctgtgaccctctccggcagcccggaagcctcccggttgtcctgatctggggtccgcgaacttacccttcattccacctgtccctgagatgtgagacaccagagggtgggaggagcaggggcagaaagggccggcttgggggtgggagaagaatatattgtgcccctgtacaacaaaccccggtgaccaaaaacaaaacaaaacaaaacaaacaaacaaaaaaacaaaaaatagaacatactgtccctatctcactatccatcctttggggtcactgtagagaggtcccgtgggtgactgcccatttctggggtgcacagatacatgtacccgcagagtactatgcagacaccgccagcacacagatgcgcaggcacaggaccagccccagactcacctggccctcaggtgtgcggctcccacagggaaaaatactgacataccgctagggggacacacgcacacacagctcaaggatacccgagacagcactcaggacaattcagatgcaccgtgtacacacacacacacacacacacacacacacacacacacacacacacagagcagcacagacacacatatgtgcgcatagaccctggggtcacaggatggacagacagccctggccctcccccgaggaggctgcagcgggcagacagggcaaacagaccccagcgtgacctgccacacctatgttggcacagagggagtgttttgcttggttataagcacagtgctcatgcctgccccacgcctagaaccctccctctataaggctgttgctagggctctgagataccagagagtggtcagggacggtggcaggggaacctttggggacagcttcagggtacggtgttgggactgggacattgtcagggtgctcagacagggcgtgttccctgggtcttggtgcatttagaggtcaagggaccatttctggaagctcactgtgtgccagggcagcttatatcagagctcagctcttttttttttttttttttgagacagagtctcactgttgcccaggctggagtgcagtggtacgagctcggctcactgcaacctccacctcccgggttcaagcgattctcctgcctcagcctcccaagtagctgggattacaggcgtgcaccaccatgcccagctaattatgtatttttcgtagaaacagctttctccatgttggtcaggctggtctggaactgctcacttcaggtgatctgcccgcctcggactcccaaagtgctgggattacaggcgtgagccaccgcgcccggccccaaatgcgttttacattttcttcctctttgattcatctttgtcctccaacataaatatgctactttttccactgataaaaagacaaaatgraatttcaatctggcctggacttctcaaaaaagtcagtgtgatgaaaactgttctagataaaacagaaatgagactgggcatggtggctcatgcctggaatcccagcgccttcggaggccaaggcaggagaatcacttgaggccaggagtttgtgaacagcctgggcaacatagtgagaccccatatctactaaaaatttaaaaattagctgggcatggtggtgcatgcccgtatgtctggagactgaggcaggaggattgcttgagcccaggatttggaggctgcagtgaactgattgtgccactgcactccagtgtgggtgacaaagtgagacactgtctctaaaaaaaaaaaaaagagagacaagatgatcaggatgagcgcagtggctcaygcctataatcccagcactttgggaggccaaaccaggtggatcatatgaggtcaggagttcgagaccagcctggccaagatggtgaaacccctttctactaaaaatacaaaaattagctgggtgtggtgtcgcacgcctgtgatcccagctactcgggaggctaaggcaggagaattgcttgaacctgggaggcagaggttgctgtgagcaagattaaaccactgtgctccagcctgggcaacaagaatgagactgtgtctcaaaaaaaaaaaaaaaagawgatcaaacacaatgcgtcaacctcccagagctgtataaaccctaaccctaacccaggaagcaggcaagcctgtgtgtgagtttccactctattgctggtactactcggctctggcaaccyrgaaggccaccttcccctgttgtcactgtgtaaggaggaaggagcactgstttgcaagtcagaagcctgggttgaagyctctgctcgggttcctgctggctgtgggaatgtggggttacctttcccggctggcctcgtttcctacatgtccaatgcaggggttccagtcacatgcrttgggcaccattacatgtccaagctgtgccaggatctagawaaatggctgggctcagkccaaggggccttcctrtctggcagtgaaaataagaggagataccaagggccctgagtctgagtctggaggggaagtcatgagcacagggcagtgccagggcccgggagctgccacagaggagcccaycttggtgacagacacctgtaggcrcrtccgtgatgcccagtkcccaacacagggaactggacaaacgtttcatgcacgactcttttttcccttcttggctaccttgaggaccttgattataatagttagccttttttttttctttttttgagactcttgctctgtcacccaggttggaatgcagtggcaaaatcttggctcactgcaaccttcatctctcaggttcaagtgactctccttcctcagcctccctagtagctgggattacaggcatgaaccactatgctcggctaatttttgtatttttactacagatggggtttcaccatgttggccaggctgatcttgaactgctgacctcaggtgatctgcccgcctgggcctcccaaaatgttgggattacaggtgtgagccactgagcccagccggattataatagccttttcatgcaccaggggctttatactcattatctcatttcattcatatgagttgaagtcagtttaycccccatttcacagatgaggaaaccaaggcccagagaggttaagaatttrtccaaggtcacacagcyaggaagtaggattcaaacccagacagccaggctgtaayacctrggctcttctcaggctcatgcccttcccaggggtctgggaagccctgacctgcagcctgtcaccttygtttaccccccagcctccaggatattacgtgtgcaccggcgtgggatcctggaactggcaggaactgtgggttgtgttggtccccgaacccccatcgcctataygaaatatggttscttttgtggcttgggaggccatggccagcccygcgatgccattgactggtgagtgcatgcctgggaccaggcyrcaaaatccctcacactctggggtagtcaaggcttatgaggaastacccaaaactgaagctggggtttggtccagggagatcccagtgtgcagtactactttgcaggcaggcagaggsctcttggataacatggccagtgaagccagatcttggtaccagctgccccttaccctggccttgagctgatgacgttgccttaaaaacttggctaggagctgtggctcactcctgtaatcccagcactttggaaggccgaggtgggcagatcacttgaggtcaggagttcaagaccagcctggccaatatggtgaaaccccatctgtactaaaaatgcaaaaattagctgtgtgtggtggcaggcgtctgtaatcccagctactcaggagaccgaggcaggagaattgcttcaacccaggaggtggagtttgcagtgagttgagattgcaccactgcattccaacctgggtgacagtgcgagaccctgtctcaaaagaaaaaaataataaaaatataaagtgaccaggtgtggtgattcacacctgtaatcccaccactttgggtcgaagcagtaatatcactggagaccaggwgtttgaaaccagcctaggcaacatagtgaraccctgtctctatattaacacacacacacacacacacacacacacacacacacacacacacacacaaaggaagccagactatgcactaggaactgccctgggaatccctttgcgttctcacaacaatcccatttcacagatgaagaaaccaaggcacagaaatattcagtaacgtgtccaggtgcggtggctcacgcctgtaatcccagtattttgggaggccaaggcaggtggatcacgaggtcaggagttccagaccagcctggccaacacggcgaaaccctgtctctactaaaactacaaaattagccaggcatggtggcgcatgcctgtaatcccagctactcgggaggctgaggcaggagaatcacctgaacccaggaggtggaggttgcagtgagccaagatcgtgccattgcactccagcctgagtgggattacaggcatgagccactgagcctggcctggtgagctaatttttaaatttgttatagagacaagagagacaagagttttcttatgttgcccaggctggtctcgaccccctgatctcaagtgatcctcccaccttagcctcccaaagtgctgggattacagatgggtgtcaccgcacctggcctctaaggagggtttcattataaacctaccctgaagggagggaatccgattttatgagagggtgtagcctggtgaggcctggatgacctccagaggcaggggcttgtgcctgggctgaggcctaagggtcaatgggcagacatgaagttgccccaggcagagggtacagtgtgggcaaagtcaggaagtggcagggcttggatcactccaggaagagagaggagtcatgtgtcacaggagctcgagacccagagagggaggcaggcaggcaggcagggaccaagcttgggcacagccaggaaggcaggacagggcatggtggggccaatggaatcattacccaagacggggattttcagggaaacagcttagataaggccaggtgtacagtagctcccacctgtaatcccagcatttggggaggctgaggtaggaggactgcttgagcctgggagctcgagaccagcctaggcaacatagtgagaccccatatccacaaaaaatttaaaaaaggagtttgtcttcctgtagtagcagacttgagaggttgaggtggcagtatcacttgagcctgggagttcaaggctaaagtgagctgattgagccattgcactccagcctgagcaacagagagatacgctgtctcaaaggaaatacaaattaaaaaaccagccgggcatgctggcgtgtgcctgtagtctcagctacttgggacactgaagtgggaggatcgcttgagcccaggagttcaaggctgcagtgagctatgattgtgccactgcagtccagcctgggcgacagagaaagaccctgtctcttaaaaaaaaaaaaatcttagataagaggatgctgtgcctccctgggggtcttcagtcacccatagtcctggcaagagaggagggccaggagagagcttcacccacctgctgtcctgcccatgtgacatccgcaggtgctgccatggccacgactgttgttacactcgagctgaggaggccggctgcagccccaagacagagcgctactcctggcagtgcgtcaatcagagcgtcctgtgcggtgagtccccagcagcaccatgccacccaccccgagtatcccctgggcatcctggcatagccagatgacttccgtgccctgttgcaataaccactgcttccaagtctctatagaccaccccttgggtatatctaatgtaagtgatatttattttatttattttttgagtcagagtctcgctctgtcacccaggctagagtgtgctgatgtgatcttggctcactacaacctctgcctcctgggttcaagcgattctcgtgcctcagcctcccaagtggctgggactacagrcatgcaccatcacgcccagctaatttttgtattttttcagtagaggtggggtttcaccaagttggccaggctggtctcaaactccccacctcaagtgctctgcccgcctcggcctcccaaagtgctgagattacaggcgtgaggcatggtgtctggccctaatgtgagtgatctttaacaatgaggacttgaaaaagaaaaccatgaagaaacctaattatttgatgtctggacgacaaggaagaagatagaaatggcatcagataataaacagtgtaaatgtttatcagaaagaggctgggggtggggaccagaaggaggatcgcttgaggccaggagtgcatctctacaaaaaagttaaaggatttttttaacattggccaggcgtggtggcacacatctgtgatcccagctacttgggaggctgaggtgggaggatcgcttgaagcccaggaggttgaggctgcagtgagctgtgatcgagtcacagcactccagcctgtgtaacagggcaaaacccagtctcaaaaaaaaaaaaaaaaaattttacctaaccaaccacttctaaagatatataaaaaaaaccctgcaattaaaaatctcaggtccctcaggcaatcctacaagattttgaaacaaagcaataacataaggactgtagtatttattttatttttatattatttatttattgtttgtttgtttgtttttggagtgtgggtttttttgtttgtttgttttttgatttttttttgtttttttttgagacagagttttactcctgttgcccaggctggagtgcaatggcatgttcttggcttactgcaacctccacctcttgggttcaagtgattctcctgcctcagcctcctgagtagctgagattacaggtgcctgccactacacctggctaatatttttgtatttttagtagagatgaggttttgccatgttggtcaggctggtcttgtactcctgacctcaagtgatccacccgcctcagcctctcaaagtgctggaattacaggtgtgagccactgcatctggccgtggtatttatttttaagattccattttgggccgggtgctgtggctcacgcctatagttccagcactttgggaggccaaggcaggtggatcacttgaggccaggagtttgagagcagcctcaatggtgaaaccctgtctctactaaaaatacaaaattaccctggtatgttggtgcatgcttgtaatcccagctactcgagagtctgacgcaggagaatcacttgaatccaggaggcacaggttgcagtgagccgagatcgtactccagcctgggcaacagagtgaaactctatctcaaacaaaaacaaaaagaaatagattccattctgatgtatggcattttccatttatagtttcccttcaaataaataagaaagctaaaacaatgaaaacaactaggaagtgagtaatggtacagggagaatgcagataaggcttgagtttcggcagcgagactcaaagttatctgaagagctagtcatgatccagaccactagttccatccctttttttctattttctgttacttgaaaatagacataacaggctcggcgctgtggctcactcctgtaatctcaagacgggcagatggcttgagcctaggaattcaagaccagcctgggcaacatggtgaaaccctatctctacaaataatatgaaaactagcacggtgtggtggtgtgcacctgcagtctcagctacttgggaggctgaggaaggaggatcacctaagcccagggaggctgaggctgtagtgagccaagattgcaccactgcacttcagcctgggcaacagagtgagagcctgtctcaaaaaaaaaaaaaaaaaaaaagagtaaagaaaaaaagaggctgggcgtggtggctcacaccagtaatcccaacactttgggaggctgaggtgggcggatcacgaggtcaggagttccagaccagcctggccaacatggtgaaaccacgtctctactaaaatacaggtgggtgcttttaattccagctactaagaaggctgaggcaggagaattgcttgaatccaggaggtggaggttgcagtgagccgagactgcaccattgcactccagcctgggcgacagcgtgggactctgtctcaaaaacaacaacaacaacaaaaagaaaatagacataacacaaaattaactatgttaaagtgtataattcagtgatacttagtatattcacaatgtcatccaaccaccacctaaactttttcatcactctgcctcgaaaaatccctttccccttaagcaatccgttcccattcctccctaccaccaacacctggtaaacttaccaggttaccagttttctatctctggatttaccctgtctagatatttcatataaatagaatcatacactatgttcctggcttcttcacttagtataatgtttttgagatttgctcattttctttcttttttttttttttttgacacgaaatctcacctgtcacccaggctggagtgcagtggtgccatctcggcttactgcaacctccgcctcccgggttcaagcgattctcctgcctcagcttcctgagtagctgggattacaaacgtgcaccaccatgcctgggtaattttggtatttttagcagagatggagttttaccatgttggccaggctggtcttgaactcctgacctcaagtgatctgcctgcctcagcctcccaaagtgctgtgattacaggcgtgagccaccacacccatcctgttcatgttgtattaatagcatgtgtcagtacgtcattcattttatggctgaataatatccactgcatggatagatcacatttcgtttatccattcattcaatgatgggcatttgggttgtttccaccttttggcttatgtgaatagtgctgctatgaacattcatgaacaaatacttatttgagtacctggtttcaatattttggagtatatacctaggagtggaattgctgggtcatacggtaatcctgttttacttcttttgttgagacagggtcttgctctgtcacccagcttggagtacagtggcatgatcatggctcactgcagcctcaaactcctgggctcaaactatcctcttggctcagcctcctgagtagctgagactataggtgtgtggcacgatgctgggctaatttttttgagacaaagtctcactttgtcgcccaggctggagtgcagtggcacgatcgtggctcactacaacctctgcctcccaggttttagcgattctcctgcctcagcctcctgagtagctgggatttcaggtgcccgccaccacgcccagctaatttttgtatttttagtagagactgggtttcaccctgttggtcaggctggtctcaaattcctgacctcaagcaatccacccacattggcctccaaagtgctgggattacaggcatgagccactgtgcctggccaagtgcccagctaatttttagcctttttttttttttttttttttttttgagatggagtctcactctttttgtccaggctggagtgcaatggcgtgatctcggctcacttcagcctccgcctcctgaactcaagctattctcctgtctcaggcatgcaccaccacgcccggctaatttttatatattttttagtagagacggggtttcaccatgttggccaggctgtctcgaactcctgacctcatgatccatctgccttggcctcccaaagtgctgggattacaggcgcgagccaccacgccccgccatttttaaactttttgtagagataagttgcccaggctggtctcaaaatcttggcttcaagcaatccttctgcctgtctgcctctgaaagtgctgggattgcaggcatgaatcaccatgcccagttaagagttctttatatactgtggatactgactcttacccgatatgtgatttgcaaatattttctcccattatgtaagttgtcttttcacttccttgatagtgtctttgcacaaaactgtttaagtttgatgaagttcaattaatctgttgtcttttgttgctcgtgtttttggtgtccttagaatccactgccaaatccaaagttataaatatttaccgttaagttttcttctaataggtttatcatatttaactctaatatttaggtcattgatccattttgagttaatttttgtctacggagtgaggtaaggggttgaactttattcttttgcatgttgttatccagttatctcagccctcttggttgaagagactcttccccattgaatcatcctgctacctttgctgaaaatcaccgccaggagtggtggctcacacctgtaatcctagcactttgggaggctgaggcggatggattgcctgaactcaggagttcgagaccagccagggcagcacggtgaaaccccatctctactaagatacaaaaaaaaattaggcgggtgtggcagcatgctcctgtagtcccagctactcaggaggctgaggcaggagaattgcttgaacctgggaggtggagattgcagtgagcagagattgcaccactgcacttcagcctgggcaacagagcaagactccatctcaaaaaaaaaaaaaacaaaaaaagaaagaaaaagaaaatcacttggctctagatggaggaggatttcatcactttgagctaataatttgacttctcttaaccccagcttccttacctgtaagataggtgttgtgaagatgagaaaagatttgtaagatgagaaacagattttgtttttgttttgagatggagtcttgctctgtcgcccaggctgaagtgcagtggcacgatctctgcccactgcaaactctgcctcctgggttgaagtgattatcttgcctcagcctcccaggtagctgggattacaggcccctgccaccacacccagttgatttttgtatttttagtagagatggggtttcaccatgttggcctggctggtctcaaactcctaacctcaggtgatctgcccacctcggcctcccaaagtgctgggattacaggtatgagccaccatgcccagctgagaaacagattggatgggaatttttcttctatctcctcctcctatctttatctgaacttctctctgacccctgctaactcctggagagaatcaaagatctgttccaactcttgattaaaactccaggttctgctgacttggtctgctctggtggcaaagaggctattgtaagcgttattagaagtatgtttttatttttatttattttttgagacagagtcttactctgtagcccaggcaggagtacagtggagtgatctcaactcactgcaactcactgcctcccaggttcaagtgattctcatgcctcagtcttctgagtagctgggactagaggtgcacaccaccatgcccagctaatttttttgtatttttagtagagacagtgtttcaccatgttggctaggctcgtcttgaactcctgatccatccgcctcggcctcccaaagttttgggattacaggcacgagccaccgcgcccggcctacttgaagtatgtttttagatcttcagctatatattcttactacggattagaacttggcataagagcaaagctgaattaatatgatgatataatcaatttttaggcctgaacatgccccaggtatctatcatctcatccaaccctctcatttagagttggggaaactggctgggcatggtagctcatacctataatcccagcactttgagaggccaaggcaggaggatagcttgagcccaggagttcaagaccaccctggcagcatagagagaccccatctctacaaaagacaaaaataaaggggaaactgaggctcagggagagtaagtgacttattcccaaaactgcccccttctggtgtgggtgatgaggaggtgaaatgaggcttcagtgggaaatctgttgaaaatctttcctttctcccttcaacttgcctattctgcttgctcctacccaggtgaaaatgatatttataaaatattggtgtgtctgttggtagagtctgtgcctgtttacagaactgtcttctctgaaccaaatgaaaggaactaaaatatctattatgcattttggactaaaaatattatcttattctgtttggagatattctgaacatagttgtttatttaattacaggtttggcccattttccatttatgggcctgacttaaatatattaaaaaaaatttaaacctataataatatttactagcaggccttaattttaaacttaagcctcgggagctattcttcctttcaaatttttattcttcttcaaaatgtgatgccatcgggttcctgagatcatggagcagtggggccaggtcttgctgttggcggaatctttgttgctcaaggagaaaagtaagaggacaagcagaggcgttgttgggtcaggagaccctgggctggaatcctggtccacaccttcccagttctgtgaccttggatgagttaccgaattcctgtaagcctcactttcctcatctgtaaaatgggaataacagaccagagttgctggggttgtgtgagcattggagattgtatatggctttgcttttcttttccctcctctcccctcctctctctctctcccccctcccccttttcttttcttttctcttttcttttctttgagatagagtctcactctgttgcccaggctggagtgcagtggtgctatctcagctcactgcaacctccacctccccggttcaagccattctcctgcctcagcctcccaagtagctgggactacaggcgcaccaccatacccagctaatttttttttgtatttttagtagagacggggtttcatcatgttggccaggctggtcttgaactcctgacctcaagggatctgcccacctcagcctcccaaagtgctgggattacaggcatgaggatgaatggcttttctaaggcttttctctggtctgtcaacaaatattactgtgagtctactctgccgggctccatgctaggttttgggcaaggcagagccacgaggtattgttaaaaaggaggagacagggaagtagtgtgtgcgccaagtgctttgtaactattgtgttgagagataaagcaggtgaattactatacctgctacaacatggatgaactttgaaaatatgatgggctgagtacgatggctcccacctgtaatcccaacactttgggaggccaagacagaagtatcacttgagcccagaaatttgagaccagcctgggcaacatagcgagaccctggcatagtagcgcatgcctgtagttccagctactcgggaggctgaggtgggaggatcacttgagctcaggaggtccaggctgcagtgagccgtgatcatgccactgcattccagcctgggtgacagagtgagaccctgcctcaacaaaaaaggccgggcacagtgtctcacgcctgtaatcccagcactttgagaggcttaggctggtgaatcacttgaggtcaggagttcgagatcagtctcgccaacatggtgaaaccccgtctctactagaaatatgaaattagccggtcgtggtggcaggtgcctgtaatcccagctattcgggaggttgaggcaggagaattgcttgaacctggaagacagagaggttgcaatgagtggagatcatgccactgccctccagcctgggcgactgagtgagactctgtttcaaaaaaaaaaaaaaagaaaagcaaaaagaaaggaagaagaaatacagcatcgagtgaacagagccagacataagaggtcatgtatataggctttctgttgctatgttaggaatacaaaaaagaggtcacgtatatcatatgacttcatttatatgaattgtccagaataggcaaatccacagaaatagaaagtagactagtggttgctgggaatgcagaagagtgggaacggggagcgaatgcttaaagagagttgggtttcttctgtggtgaccatctcgatctgtcacccaggctgggtgcagtggcatgatcacaactcactgcagcctcaaaatcctgagattaagggattctcctgcctcagcctctcaagtagctgggactacaggcacgtgccaccatgctgagctaatttttgtattattattattattattatttttttttttttttgaggtggagtcttgctcttgttgcccaggctggagtgcaatggcatgatctcggctcactgcaacctccgtctcccgagttcaagtgattctcctgcctcagcctccctagtagctgggattacaggcatgtgccaccacacctggctaatttttgtatttttagtagagatgggttttctctatgttggccaggctgttcttgaactcctgaccttgtgaactgcccgcctyggcctcccaaagtgccgagattacaggcacgagcaccacgcccggcctgtattttttgtagagatggtgtcttgctatgctgcctaggttggtcttgaactcctgacctcaagcaatccttctgactcagcctcccaaagtgttgagattacagccctaagccaccatgctcagcctggggtgataacagtgttttagtactagataggtgcccagcattgtgaaggtactaaatgctactgactgtacattttaatatggtaaattttaggttgtgagaattttgccccaataacaaaaagcaggagtgcatggtgaggatttctctgttactgagagtggttggggtgagagaaagtctcccggagacaccaatgaagcagagacctgaggaacagaggagacagccacgtggaggtgatgcaacagccagtgcaagggccctggggtacgcacaagtgtctgggtggtctgaggatcacaaggagttcggtgaggctggagcagagtcccccagagtgacagaagtaggggatgatgtcggagagtgataggggctagattcctagggcattggaggctcttctctgagagagatggggagccaaggagggttttgagcaggggagggacatgacctgatttgcattttttttttttgagacagtcttgctctgtcacccaggctggagtgcagtggtgtgatctcggctcacttcaacctctgccttttgggctcaagcgatcctcgcacctcagcctcctgagtagctggaatcacaggtatgtgccaccatgccctgctaatttatgtacttttagtagagatggagtttcaccatgttggccaggctggtctcaaaatttctgacctcgggtgacccacctacctcggcctcccaaaatgttgggattacaggcgtgagccaccacactcggccttgatatgtattttaaccaaactactctggttgccatatggtacaaacccaggagagggaaagggtggaagctggatgtggctatcaggctgttgcagtggtcttggagagaggtggcttgggcagggggtggcagtgaagatggtggaaggggctggcttctggacaaatctggctggatggaactgcaggagttgccagtggatgggtgagggtgtgaggggaagaggagctggctggggtatttgtccccgtcgccctgtagctgaccactcttctgtccttggacagccggccttcagccagccctgtatgccaccctggggctatagccaggaagctacagtggctccttcctcaagagtcccctccccactacatcatatttctctgagggtttctgttgtgcagcagcccatggaaagcttacaggcaggaaggcttgttcctgcactggctggttctatgactaattttcgcacatattatgtttatccattcatctgtctcgccatctattcatccattatccattcacctatcatccatctatccatccatccatcatccatccattcattcttccatctatccatccatccatccatccatccatccatccatccatctatccatccatcacccatccatccaatttccatccatccatcatccatccacccatcttccatccatccacccaccatccatctatccagccatccattgtccatcatccatcatccatccatccatccatccatccatggggagtgcctgcttgaggggaatggggtttcttctggggtgataaaaatgttttagaactccgggcgcaatggctcacgcctgtaatttaggaggctaaggcgggcagatcacgaggtcaagagattgagagcatcctggccaacatggtaaaacccggtctctactaaaaacacaaaaattaactaggcgtggtggtgtgcgcctgtagtcccagctactcgggaggctgaggcaggagaatcgcttgaacccaggaggcggaggttgcagtgagctgagatcgtgccactgcactccagcctggcaacagagtgaaactccgtctcaaaaaaaaatgaaaagttttagaactagatagatgcccagcattgtgaatgtactaaatgtcactgacttgtacactttgaaatggtacattttgtgttgtgagaattttgccctggtaacaagaagcaggagtgcatgatgagggatccatctatcccaccattcattcaaccattcatttgcatactttttctgattcaaacccaatacatgtttgttatgaaaaattaaaacattccagaaatattcttttgaaaatttttacttattatttatttcagtagccttaggggtacaagtggtttttggttacatggatgaattgtatagtggtgaaatctgagcttttagtgcacccatcacccaagtagtctacattgtacccaatacatagctttttatccctccccacctcagtctccaatgtgtccgttataccactctgtatgcctttgtgtaccccccatagcttagctctcacttataagtgagaacatacagtatttggttttccattcttaagtttcatcagttagaataagtgacgtaacttccttgcaatccctatcaaaataccaacatcaattcatccaagttgcttcatccagcttcatccaagttgctgcagaaaacattttgttcttttttatggctaagtagtattccatggtgtatatgtaaccacattttcttttccttcttttttgagaaggagtcttgttctgtcacccaggttggagtgcagtggcgtgatcttggccccctgcaacctccacctcctgggttcaagcgattctcctgccgtagcctcccaagtagctgggactacaggcatgcgccaccacgcctggctaatttttgtatttttagtagagatggggtttcaccatattggtgaggctggtcttgaactcctgacctcgtgatccgcccacctcggcctaccaaagtgctggcattataggcgtgagccactgcacccagccaccacattttctttatctgctcattggttgatgggcacttaggttggttctatatctttgcaattgtgactgtgctgtgataaacaaatgcgcgcacgtctttttgatataatgatttattttcctttgggtagatacctagtagtgggatggctagaaagaatagtagatttacttttcgttctttgagaaatctccatactgttttccatggaggttgtgctaactgatcttagcaccagcagtctaaaagcattcttttttcatcacattcaggtcaatgtctattttgacttttcaataatggccattctggctggggtaaggtagtatctcattgtggttttaatttgcagttccccgatgacgagttatgttaaacattttttcatttgctggtcatttatatatattttgagaaatgtctattcatgtcatgtgcccacttttttttttttttttttttgagtcttgctctgtcacctaggctggagcgcagtgacataacctcagctccctgcaacctctgcctcccgggttcaaatgattctcctgcctcagcctcccaagtagctgggattacaggcatgagccaccacactaggctaatttttgtatttttagtagagacggggtttcaccatgttggctaggctggtctcgaactcctgacctcatgatctgcccaccttggcctcccaaagtgctgggattacagatgtgagccatcgtgcctggccatgtgcccactttttgatgaggttttttcttttcttcttgctgatttgagttttttgtagattcaggatattagtcctttgtcagatatgtagtttgcaaatattttctcccattctgtgggttgtctgtttactctgatgattacttcttttgctatgcagaagctttttagtttaattaagtcctatttatttatttttgttttgttgcatttgcttttggggtcttagtcataaattccttgcctaggtcaatgtccaggggagtttttccaaggttttcttctagaattcttatggtttcaggtcttagatttaagtctttaatccatcttgagttgatgtatatggtgagttttgtagatggtgagagatagggatccagtttcattcttctacatgcagctcttcagttttcccagtactatttattgaatagggtgtcatttccccaatttatgtttttgagtgttttttttttttttttgagatggagtttcactcttgttgcccaggctggagtgcaatggtgcaatctcagctcactgcaacctcctcctcccgggttcaagcgatccttctgcctcagcttaccaagtagctgggattacaggcatgtaccactacgcccagctaattttgtatttttagtagagacgaggtttctccatgttggtcaggctggtctcaaacactgaacctcaggtgatccgcttgccttggcctcccaaagtgctgggattacaggcatgagccactacgcctggccttgagtgctttgttgaagatcagttagttgtacgtgtttagctttatttctgggttttctattctgttctgttggtctatgtatctacttttatattagtaccatgctgttttggttactatagccttgtagcataatttgaagctgggtagtgatgcctacagattttttcttcttttctttttttttttagatggagtctctctgtcacccaggctggagtgcagggggcatgatctcagctcactgcaacctctgccccccaggtttaagtgattctcctgccttagcctcccgatcagctgggcttataggcacacaccatcatgcctggctaatttttgtatttttagtagaaatggggttttaccatgttggccaggctggtctcgaactgacctcaggtgttccacccacctcggccttgcaaagtgctaggattacaggcgtgagccactgtgcccagcctatttggctcttttttagttccatgtaaattttaggattgtttcttctaattatgtgaaaaatgatgttggtattttgataggaattgcattgaatctgtagattgctttgggtagtatggtcattttcattacattgattcttccaatccatgagcatgggatgtatttccatttgtttgtgtcatctatgatttctttcggcagtgttttgtagttctgtttgtagagatctttcaccttcctgctcaagtatattactaggtttggggtagctattttcctttttttttttccagctattataaaagggactgagttcttgatttcattctcagcttagtccttattgatgtatagcagtgctactggtttgtaacctgagactttattgaattcattggtcaaatctaggagtcttttggaggagtctctaggattttctaggtatatgattgtatcattggcagaggtagtttgatttcctcttttcccatttggatgccctttatttctttctctttcctgactgctctggctaggacttccaatactttgctgaatagaagtggtgagagtgggcatccttgtcttgttccagctcttgggggaatgaatgctttcaactcatccccattcagtatgatgtgggctatgggtttgtcatctatcacttttattattttgaggtatgttccttctatgcctagtatattgaggagaagtatgtttctttaaaaaaaatattattatgggctgagagtggtggctcgtgcctgtaatcccagtactttgggaggctgaggcaggtggatcacttgagctcaggagttcaagaccagcctggcaatatggcaaaaccccatctctactaaaaatacaaaaattagctgggcatggtggtgggcctgtagtcccagccacatgggaggctgaggtgggagaatggcttgagtccaggaggcggaggctgcagtgagccacaaccttgccactacactccagcctgggtgacagagacagaccttatctcaaaaaataaataattactattattatttttaaataaaggaatccccaaatgaagtcgtgtaatatcaggccaggcatggtggctcacgcctgtaatcccagcactttcggaggccgaggtaggtggatcacctgaggtcaggagttcgagaccatcctggccaacacgacgaaaccctgtctccactaaaaatacaaaaaaaattagctcggtgtggtggcctgtgcctttagtcccagctacttgggatgctgaggcaggagaatcacttgaacccgggaggcggaggctgcagtgagctgagatcataccactgcactccagcctgggcgacagagcaagcccccatctcagaaaaaaaaaaaaaaaaaaagaaaagaaaaaagaaatcgtgtaatattgatgcagaagagcagtatggcagactttggactctccatttgaaactttcaatttccttttctgtaaaatggggctgacatcacctgcttcctggggagccctgcagatggagatcacgtggtgggctgtcaagtgtctcagaaatgtaatttatgacccgtcctgcctcttgctttactggtttcccttgagtctctccaggtccctgctctaatctcagtttccccacttcttccaggaccggcagagaacaaatgccaagaactgttgtgcaagtgtgaccaggagattgctaactgcttagcccaaactgagtacaacttaaagtacctcttctacccccagttcctatgtgagccggactcgcccaagtgtgactgactaccttgacttgaaatgctcttttgcacaaggaaataaagcgtcctctcagtaatgaacaacagcattcagttatttgcagaagggaaccgaagccaagtgataaagccacaaccttgtgtttgctttccctcccaatcccagaactcaggactggagcccatgtggtttgcagttaaaggccaaaagtcctgcacctattttataaaactatgactgtgtttatcactgtgttggggtcggttccatttttgaggttccatctttatgaaaagataacctgtcttctaacctgcttggatggctggtagtcaaatgtgaacgaacacctaccgtgtgcctggccatgttctatgttctaggctgcagcaatcaacaagatggccatacaacacccacccggtgaagttcaagtccagtagctgttagcttaagaaagagtattcccttatcccactacaccttaaaatgtatttgctgtcctgcagcgttggctcatttctgtaagcccagcacaatgattacaaaagtggtacatacttgttgcttcttaaaaaaatgaaagtgcagagaaatatagagcagaaagaaaaatcactccaattcccacaattcagaataatctgttaggatctatagttttaaaaatgtagttcaaggccgggtgctgtggctcacgcttgtaatcctagcactttgcgaggccaaggcacgtgaatcacaaggtcaggagttcgagaccagcctgaccaacatggtgaaaccccgtctctactaaaaatacaaaaattagccaggcgtggtggcacgcgcctgtaatcccagctactcaggaggctgaggcaggacaatcacttgaacccaggaggtggaggttgcagtgagcagagattgtgccactgcactccagcctgggcgacagaacaagactctatctcaaaaaaaaaaaaaaaaaaaaaaaaaaaagggtagttcagattatactgtatgatgtttataaacttttctccatgtcataaaaaatctttggaaacttcatttaaaatgtctgtgttagggttggatgaggtggctcatgcctataatctcaatactttgggaggctaaggagggaggactacatgaggacatgagttcaagaccagcctgggcaacagagcaagactctatctgtataaaacaaaaaaaattagtaaggcatggtggcatgcacctgttgtcccagctactcgggaggccgaagagggaagataacttgtgcctaggagttcaaagttgcagtgagctatgattacatcactgtactccagtctgggcaacagaacaggaccttgacgcaaataaataaataaataaatatctgtattagataccattttatagattgacagtttttggatattggagctattttctgtttccattagttgcttgatgaggatgcttgtaaataaatcttcaccactcccttccccataacctattccttagcccagatttgcagaaatggcatttttggatcaaaggatctgaatattttttgagacagggtctcccgctatcacctaggctggagtgcagtggtgcaacctcagctcattgcagcctcgacctcctgggctcaggcaaatctcacttcagcctcccaggtagctaggactacaggtgcgtacactcacatctggctagtttttttatttttagtagagatgaggtttccacatgttgtctaggttggtctcgaactcctgggctcaagtgatctgcccacttcagcctcccaaagtgttaggattacaggtgcgagccaccacacccagccgggtctgagtattttatttttattttgcatttttcggagacagagtctcactgtgtcgcccaggctggagtgcagtggggcaatctcggctcactgcaacctttgcctcccgcgttcaagcgattctcctgcctcagccttccgagtagttgggattacaggtactgccaccacacccagctaattttttgtattttttccccctgagatggagtcctgccctgtcgcccagagctggagtgcaatggtgtgatatcggctcactgcaacctccacctcctgggttcaagcaattctccttcctcagcctcccaagtagctgggattacaggcacacgccaccacacctggctaatttttgtatttttattagagatggggtttcaccatgttggccaggctggtctcgaactcctgaccttgtgatccaccctgccttggcctcccaaaatgctgggattacaggtgtgagccactgtgccctgccaattttttgtacttttagtagagatggggtttcaccatgttggtcagggtggtcttgaactcctgacctcagataatccacccacctcggcctcccaaagtgctaggattacaggcatgagccactgcatccagcctggactattttaagacaccccctttagatgtacccatcctgctatgattggtaagaagaggtagaggcagcctgtggcccctgatctgagtgtgcccgtccctcctgctggtgataaggagtaaggtcctgcccagcctgtttgctctacgccatggctttgccccagtccctgagcaaatctgggtattactcatctttgaagcagggtgtgggagcaggtggcgacaatgtgagaggccatggggtggaggtggatggcccaggcccagctctgccaaagccagccagcgccaacttggtgttttgccagccatcctccatctattcacctgtaaaggatactggcaacccctgggtggcatgagaccagggatatgcaaacactgccatgtgagtgtccatgggaggtcacaagcattaaataggtaaagtcaagcaaccctggggcttgatgtgcaaacacgagcaggaaaaaacccattttcccttagggtggctcctcggctcagtatctgcgtcaggctgggggatttaagcatgactagactgactagatgacttttttttttttgagacggaatcttgctcagtcacccagatggagtgcagtggcatgatcttggctcaatgcaacttctgcctcctgggttcaagtgattctcctgcctcagcctcccaagtagctgggactacaggtgcgcaccaccgtgcctggctaatttttgtattttcagtagagacggggtttcaccatgttcgtcaggctggtcttgaactcctgacctcaagtgatccatccaccttggcctcccaaagtgccgggattacaggcgcgaaccaccacgctcggcccatggctagaagattctatccggcaatgcagaagttttgtgttttctagacaattgctttttctctacatataggttttatctatatagaaatctttatttttatttcaagtaatttcttcgaacttccagatgcaacttttgagtaaaattttcactcaaagatacaaagggttaatgaatggttcatggagtcacaagataatattttggatgtaggcctatttctgcaaggcctgtcttccaagatgacatctcacacctgctgtgttcacactggaaggaaataaaaggccatagttcacttcatgccatatttataactatagcgcttggtgtaattatacctgctgtattatacatcaggataggacaataaagattatatagtgtgagctcaatttacaaaacatttccttgaacaaaacgactatcccggaatttattttacagatgattttttttttttttttaagacagagtctccctctgtcacccaggctgaagtgcagtggtgcagtctccctccctgcaacctccgcctcctgggttcaggcgatttccaattccaagtagctgggattacaggtatgtgccatcacacttggctaatttttgtatttttagtagagatgaggtttcaccatgttggccaagctggtcttgaagtcctggcttcaagtgatccgcctgcctcacccacccaaagtgctgggattacaggggtgaggtatcaccaaaacaattctgaataacatgaaggccactaaatctaatgggaactgcccgacatccctctcaatctctccattcagagaaagggatccagaccttcaatgatttccataaagcaaaacaaaagcccagtgactacaagtctaaccatcattctaggctcaaactgaatcctttgagttttactctgaatcctagcaactcttcaataagacagaattgttgattgaattttgggttttcttcggtattttttatgtgcaactctctatgcctatgacagaatcttatccttgttttcctaaacttgacttagaggacaggccaggccccaataaacctggtctcaggctctgagatccggatcctctgtcagtcactgaggttggggaggggactgatgtggcacccttctgatgtcacccacaccatgtccactgaggaccctgagtcttgccagccgttggggactgagcctcctagtccctgtgaggaaggtggctgggtgggaagggctgctgctgtgtcagccaaacagacaatcctccctgtgcggatgtcagtccttgctcgtgccacccacaggctgagggggagaggacatggttggagcttttgatatacaaagcagcaccttgttttactgagggtagaaaataggaagtccgctccctgcctcacccctcttaagcatcaaagctcagacgtcagcgggacttgaagagtctcagcctgggcagtgccagtcacaacacctgggtttccagccgccggagttccttgaccacaagatcaatgttaataattgggttaaagtacagggcccagtaaaacaaacagttgcaaacaaactgagggatgaggggccagaacatggccacaaaaagcccctgcgttgatactttccagaaatggctccacatcctctgaggcacggtcctgaaacaagaagagaagaggctgaatcggaggcgcttctcatgaccacacccaggagtccgggccctgggccttttctgggtgctgggaagagcatggctgcccgtgctgaatgtccttgtcttctgtccccggtgcctgagacctctgcctactcaacccatcttttaactctcaaggacatgacctacagggagcttctttgcccccacactgggcaaggcctccctgtgacagcctcaacttcacctgcttcatcactttgttacatttacatatttttttttccttttgagacagggtctcattcctttgtccagcctgggagtgcagtggtgcaaatgtggctcaactgcagccttgacctccaggtctcaagtgatcctcctgagtagctgggaccacaggcacacatcaccacatctggctaawtattattattattattattattattttaagtagggacaaggtctcgctatgttacccaggctggtctcaaactcctcggctcaggtgatcctccacctcaacctcccgagtagctgggactacaggtgtgcaccaccacgcccagttaattttttgtatttttagagacaggttttgccacgttgcccaggctgcacttgaactcctggtctcaagcaatcctctcacctcccaaagtgctgggattacaggcatgagccaaggtgcctgaccatctattttttaacgtacatattttctttgctaggctgtagggcctcacactatagactgtcttctttaccaaaagatctgccatgcccaggagagaaccaggagtacagtaggggcataaatatgcatattgtatataaataagtgagtttgctaaatggaaagaaatgagggagattctttttttatttttacctagtgagtcaccattggaaaggtgagggagattgttaggttctcagaaccattcataaggctgcgagtcagaatgtcaaggtaaaaggctgcaagggtggcagtgttacttctgcctgtccctttcttctggaaatagcttctaagtttttgggggttttttgagatggactctcgttttgtcgc

SEQ ID NO: 93739 - DNA, 97249 bp, Homo sapiens
  misc_feature (1)...(97249): n = A,T,C or G
atgacaacagttacatcagaaggaggtaatgaaagtcttccacagagttcttggtacatactgccagttgtaaatggatgatagtagaccaaatgtataagaaatgtttaacagattaagctgttcagatagcagctcactaatgagaaatgacatctgcaagaatgacataaattctggaatcttgttgttccttgtaagtttcttgttcaaaacagcatactcacagagcttttgaacagtatcagaacattcataatatgtgttttttgcatctttgaatcatatgccaacaatgtactctttgggaacttgtatgtccacatcttgatcaatttcataaaaatgaaatcaagttcattctcagtaaaagatgtgggataaacctcaaatttaacagcaaattgttggaatcaatgaggatggaagctgaaggtgacaagcacagttacctcatggtgtttctgagcaagttcatcaagtatcattattaaattgatataaagactgtatttcactggccacaccagcacattctcatgggactcagagctggaatacaacggtcagcataagaaacaaaaaagcccatttcttagacaactgttaaaatgctatctttctttataactttccctaacttggtacatatcaatgtcaatcaatgtcataatgatttaagtgttgacaatagaggttttggaaagcaagagaataaagaaaaggatgaatgattttgtgtttgtatgtgtgaataataaatttcagtcttattgtaaatgtggctgtctccagaacaagagataatttagttgtatataaagagtttctagtataagaaagcatcattctgtcaacaatgaggcagtgatgtgatctattcttatttatctaaacattctcaaatagaccatcttcattttctctatatagtttcacacttattatattagcttcatttcatgttccttgacattgtttttctgacagtagaaattccttttatttttatccaaacagatatgttttaagtacaattacagttactttgcttcatttgaaaatattttgtctaaatcacaatattttccttttctgaatatttgcaacattgcttagtttctcagtcttagaaagtatttatcttctaaacgcctactactgaacttgtttcacagattgccttgtaattcaggtaagttctactttaaaaagtctcaccagaaatttacatcaaagtagaattaggaaggaaaagatgcatgtcacaaaatagagaaatttgtttttattctattaataatctgttaacctgaaatgaggtaaatctttcttaaaaggatttttgaacacagtttgtgagcaaatattgccagcagagtggcaatattgctcaatatttttaatgtccttgagtgcaggcattatgtgtcacccagatttcccttttgggaatatagaaattactttccagctgatgaagtgattaaaaactgacatacctcacctataagctctctctcagtacatctctgctgaaagctatctagcatgtagtgacttttccaacacagcccatatccaatgcctggtcacgtgtaggactctaaaggcccattctcctcatttcaatttggaccaactctgaagggctaaccacaagcctcctcacctagaaagcaagcagactcagtttttcagcatctcagggagcctgcagtggtgatccagttccttcagagagtctgtgaattttctcagctttcctggtgtgttcctgctgtaatccttggagaaacagttcatgacatgagtcccaacacactgctctatccattcgagtagaagctgcaaactagttctgcctccttttcatcatcttaatcgtatacatctgtagcaaccttctatgtcatttttctatctttgttggtttaaagtctgtctagtaagaagttagaattgcaactgctgcttttttttttttttcattttcttgttagattattttccattggtttattttgagcctatatatgtcactgcaggtgagatgggtttcttgaacacagcatatcaatggttcttggttctataatcagcttgcccttcagtgtcttttgataggggcattaagcccatgtgtatttaaggttaatattgatatgtgtggacttgatcctgtcataatgatgttatcaagcaattttgcagacttgtttatgtgcttgcttcacagtgtcactagtatgtgtacttcagtatgcttttgtaaaggctggtaatgctctttccccaccccccacccccccgatattcagtgcttccttcagaaatttttgcaaggcaggtctggtggtaaccaatttcttcagctgttgcttgtctgaaaaggttcttattttgcttatgaagttttattaggctggatatgaaattctagattgcaatttcttttctataagaatgttgaatattggccaccaatctctcctggcttccgggatttcagttgagaagtccattgttagtctgatgagcttcccattgtaggtaatttggcctttctctctagctgtcttttacatgttttttttttattttgactttggagaatctgataattatttgtcttgaggatgagcttctcattgattatctcactggggttttctgcatttctaaatttggcctctctagctagattggaaaagttctcatgaatgatatcctgaaatatactttccaggttgatttcattgtctccatctgtttcagatacaccaaatactcatagactcattcttttcacataatctcatatttcctggaggttttgttcattcatttttattcttttttctatattattgcctgcctgtcttatttcatgaagcctgtcttaaagctctcataatttttttttcagttggtttattttgctattatttttcaatttttatttgtgattgcattataaaagtcttgtggtgttcttttcaactctatgaggtcagttacattttctctttacaggctactttgttagcttctgcaatgttttattattatttttagctttcttgcattaggttacaatatactcatttagcacagtaaactttgtttatatccctgttttgaattttacttctgtcatttcagccatcttagcctcagcccagttctaaacccttgctggagagatgatgctgtaatttggatgaaaaaatgcactctgtctttttgagttttcactgttcttgcactgattctctcttatttttgtgggcttatctgccttcaatttttgaggttgctggcctttggatttttttttcttttattctatttgattgccttgaaggtttgtttgtgatataaggtggattcagccaactgacattgtttgtagagggggcagagttcagttctcaactcctggaccgtatgctttaactctgatggacttgcattgagccccagctttgttctctggcttttcaaggctttaagtctactgcactaaggtgatgaaggtgcaacaagtgcagcagagtgctagtgagtgcaggagtgtctgcctctttctgagtgttcacaacagtggcagaagcaaagcagttggaaggggaatggaagacccctgctggagactgtgtgatgttacatgggaggtggtgtttgtttagggtggggtgattgccagcacaagtctgggtgccttctctgtgccctgcaagcagaagtgatcactcagggtatggaaggatcccctgtcctctatgcagcatcagaaaaaggtgggcactggcttgacagggatttctggttctgtgcccatcaaagctctctttgcaatgctgcaaaggctatcagtgtgatttgagtgaatgtgatggggggtcatggagggatgcactgcactcctgtgtgctggtgggtcaagtacagcaaaatccacccatgcagacatgcactcagcaaagtggtgtgaggagtttctcaggggagaggctcagtcgaagctgcagtatgggaaggaacatgcagactggtacacagttgtagggactgcgtcactggaactctctgtcagtcaggcctggtcctctgttgcagaaactatggtgtgtttctggctgccctgtaagtaggcatggcaaggctggggccccagttgagggtagaagatcaaggagtctcaaatcagaccagcctcatctgatgtgcaggatcaccatgcagggatcaggtctgactgttacccaagggctagggtctcttattcatgaaagttgaacttacagagatggccacactgctacagattctcctgcacccactgctctgggatccacatcagttggcttgctgctttgctactttgtttgttcctgtggcttcatctcagagagatgcaagccagcaatggctcagtgtctttgctcctttgtttgtccaagggagtcaaggaaagtttcactgcagatgcagtggctgagaggctttctgttgccccagtggctctctccaaggagttgccaatttgctactagctggatagattgggcaggtgttggctagagacccaggcctggaagatctgcatgatgaggacatacaggagcaggcaaccacattacactctgatcatttttctgtagggcttctgtgttatgctaggggccactccagtcactattcacctcagattttttagtacctggaggtatcaccagtgaaggctgagaaacaggaaagacggcagcctgcccttttctctggtagctccatcccagggagatatggacctgtttctgccacaaacatacctctaagaggtggctggagaccccacttgggagatctgacccctagtcagaaggaatggtatcagggacctgcttaaggtagtctagccacattttcataaagcagctgtgctttgctgggggtacacttcagccctcggttgcctcagacactccaaagctagaaggctggaatggctaagttgcccaaacagcaaagatgtcagcctgccctgcccccttgggtctctttaccagggatgcctggaacctctgtcagcttgtgaataccagtgatggtagccaaaaatccccgttgggagtctccacccagtaatgaggacgagggtcaggaactcaattaaaaaagcagtctggccccatttttatatggctgctgtgctgttctggtgtatcattttcaccccagtcagaatgggttcttcaaagcttacagactggaattgataagtcactcaaacagcaaagatgccggcccataactctctctgggagctctgtcacagggagttttcaaatctctgtagacacaagaacactggtgggagtggttggagtcccctgttgggaagtcccacccagtgaggaggaacaggatctggtacctgcttaaagaagcagtctggccatgtttttatagagcagatgtgcagcaactggggaattccttccactaaatgtacatttggactctccaaagctcgaagggcaggacagctaacttgcacaaacagcaaaaatggcagcctgcactgcacaccatgcctcagttgaaggtgctgtgtggtatataaattatatgtaaacaaaatatacaaaaaattatttgaaccatgttttgttattttatctttagttctgtgtcaaacaaaatgcacaaacatggacctctcatgactatgtttctggaaacttttctaaaataaattacataagacaagtgatgtgtccatacaagaacattgatattagctcaaagatagcacttataaacataaagggacattaaacacacttgtgtaaatagatcatctaccttcatttatctccttgccatctacatgctcagactgttaatctaatgataatatatttcctttgaagtgtaaaagttacatttgaacttcgtgattgatttatccatggatataaccataataaatgacagaaagamacagcaaatggaaaaaagcattgcattgcaccaggatgtgtatgaaatggacttcaattttgctgctgatacagctgagctgttacattagctctggaagttgtggaaaggtgctggtgtggcccacagcattcagccattggatgaatgtaaagacaatcctggatgagcttgtccagagggcgcatgargtgcctgtactggcattttcagcttccatttgtttgatcccaacagcctacctactcttaaacttaagtttatcctgcatctttaactaaaactgagttggaggacatcatcatgcaactagtcaagagatgggcagcccttccaaaagrcacgttttggtcatatttttcacaagtacaagaaatcatgtggacatttaatgacatacttagaaagttctgtaaggatgtagtttaaaataataaacttatgaaaaaactacaaaagttaaaatttgatgttgttcttgcagatgctattattccctgtggtgagctgctggctgagctatttaacatacccttcctgtacagtctccacttctctgctggctacacacttgaaaagcacaatgtaggatttctgtttctgccttcctacatacctgttgttatgtcagaattaagtgaccaaatgactttcayagagagggtaaaaatatatgatctatctggtttattttcaattttggttccaaccaaatatttaatatgaagaagtgggatcagttttccagtgaagttttacctaagtaattttttcagttggtaatatggagatctaactttcctgtgcctttgaagctgagcttctataaagcaataaagtcagggtcctttttttttttttttttttttggkggagactttctttgtcttccaggctggagtgcagtggtgcaatctaaactcactgctgggattacaggcatgtgtcagcacacttggttaattttttgtatttttagtagagatggggcttcaccatgttggccaggctggtctcaaactcctgacctcaagtgatacacctgcctcagcctctcaaagtgctgggattacaggcatgagccaccacgcccagctggtagtggagtatttcgtaagtgaatttatgaaatgaaaacacaagatgatctatcaattgcacaaatattatagaaaagcttaaattataagttcagttaaaaccctgtggccattgctmatacagaacattctaggaagtcataaacctgtaaattagtgcacctaatatttctttaaacaatcacacatctgttttactatacatatttttatcttaaaaaagtcggacccgtccacaaacatcttactgaatgcatacatgtatattgagtagttacacaattttctaccacaactatctatgtaacattgcagaaattgtttttccttgtacaccgcagtttctttattctgaaattaaaatatgtccccatgttaccagaaggtttccttcacagttgagagaaatagtgcttctgtctcaaatgcaaaaaccaataagggcaatttgtagtttctaatgtctccacattccttcactaaaagattggaaattattcattttaagactaatcatcttattgaagtctgaacatttttctatctatatagtttttttaaaaaaatactatgtttattacaaaatataagccaaattaaggttggatacaaatctctatttgaataatttctcaaaattttctagctgtaattttcaaatatatttacttaaaagctaatatggttaataccttagcataaatcaaaagcagtagttggtacaaggatttcagccacactctcaaaatagcccacagttcacttgaataaccaaagataaaaagattagcttaatgaactgcggaaactagactatttctcagaaaattatttttatgggttaggcagaattagttgatcatggagctcaaagagttttttaaatgtttatatgctactattgaagttttaaagggtaaagaaatggatgtttacttctctatagattattttaataattgtttgtgattatgagtattccgatgtgacattagcgatgtagtttaccctcaaacttctcttatcagtttgcttttcttataaatacacaagggcaaaatatataatacataaaaaataaattatgtttatatttgaatatatgttcatgtatttcaaagtacagacacttggtctacatttttgcctacattattctaatccctttcagaaaattacctaatgtaattatcttgtgtaatccactttttctttcatttttcctctcaggaagacccactaccttatctgagacaatggagaaagctgacatacatatggcttattcaaaactcctggaattttcaatttcctcatccactcttaccaaatgttgaatttgttggaggactccactgcaaatctaccaaacccctacctaaggtaaagataattttgttgattcggttttgttagctttgaatttttagtaggaatgactctaccgtcttcctgcagagtgtctgacttagaaagaaagatgggaagtgggtggggtaaagcagatagcaattaggaactcttgtacttgttgatttatcgataccatcacaagtacgtgagtttcatcattattatagatacagagggatactaaggagactttgaaaatagggttggttaaattaaagccttgattatgcaacacgtaagaaggtattggtcattcattaagagaatgtttataaaagtttaacaaaaaccacaggcaagaggaaaaaaaatagacacagtttctgtccccacacacattacattctatttcaaaagatagaatatgtataagtaataaaaattgtgcaaaagctattatctcatgccaagatagcatcagtggagataatagaaagtatcctggacgcactgataatgaagctgacagctgaacaatgtgcagaaattggtgaaataatgaggagggcagaaaacacaaaaagaaaaaaaggtaaagtgttcaggaaagttctcaagactccaagtttagtttgcagggacaggctgagtgagaatcagatgatgctgagagacaagttagagcctgatacttattaggagttaaaatatttattaagcacctttggggactactaaaaagagttaggaaatgaagatatatgataaggttaktwaaaaaaaaagaaacaaagaaagagcagaccatttgggaaattttgcatggaatctggtagcagatgatggaaaagtggattagaatgttggactagaagtaattatgcctacatttgcagtaatagtacccacttcatattgtgttttgtggaaaaaatgttaatacacacaaaacacttaaaatctctctgttatatagtcagtgattcagaaatattaattttgcaattatggttattttgttatgattactaacactattaattacttaacatktgcaagtcacttgagataccattcttcatttaatagaaccagattgttcagcacatcaagattatgttctcttgaaaagtcgtggaggacagatatattgtggacttgaataaaagtaggcatactagttttgctagtaagatgcgtaagttgacattctaaaattctactgtaagttatgaggattttaagtattctatcttaaaaagaaaatagttactcaacaatataaatgtgtatccttaataatatttgcagccaaacccagtgttcacttgatttcactcaaggatgtaactcattctacactgagatatctgacgtttacatcttagaacagaaacatgccctattagagcaggtgttttcagccttatgacaagcaacttagtacagcatcctggttgaacttgtgtctagacgccaaagctccctacagagaagcatggagaaaatgaatgatgcacgtattataaaggccaaataatttctatcacttgtatctgaatagtagtaaacttagtttaccataattaaagaattctgtctacttagaagatgatgttctttgtaaaggaacacaagaacctcatgcattttaaattagtatcatacttttaagacataggtagaaagtaagcattctttaatacattattaagtaatctcttaagatttttgtctacataaaactgagaatttattccatgggtaaaatacaatatctatgttgaatgcgaattgtatgtgctttatgactttctaaagagacaaaagctgaggtaagactaatraaaattctatggcaccctaccctactattgaaagatttccctattcatattaagggaaagtgatagtgccactaggagggggaagagaataggaggtgtagaaggataagaaaaaggatgactagtagtataatagtgataattactaatagtagctgttgttattaactkgcagaaagatttgaatgcaagtcaatggttgtaaaattggttctctaattgtttattatgtagaataattgttaacccaagttgttttcttttaaattaaatattagattctcataatatatgtctatattttaagagaaaaagacatttggcaaaatatttctagtgatttaaaaatgcacataatcattggtttaataatatagtttcatgtaatcatactgagaaaaaaatgaattaagatgtgcacatttaatatttatggaaaatattcataaaattcacattggaaataatccaacatcttaaatgaaggaatgactaaaaacttatactatatgcatactatagccttacaataattttatcaatcaaatattcaattacactgtgagccataatgcgagtaaagtgtagtagaaaatgataaatataacaagatgacaaattttttgtaagaggaaaatgtatatacaataaggttaaaactttctaaataaatgtcatgagtgtacatgtgtaaatagaataaaagccatgatgagaatatacatattttacattggtaatatctctagatagaaattttagaaatatttccttttctttatgaaacttttcatacttttgttaaattacttacagtgattttgtattatttttatgaagttgtcacagagtctgaaacaaccagtccacatcagtgatgaatcagtaaacagaagttagattacttcaacactgggtggatgaagaaggctctgggcatcaagccagtgagagtaaaccctgaacacgagttacagtaaatgtggcaacaggtaactgcaatcacacaaaatgtctagatgccccatgtattatctggaatagtagtacaatgactctcacattaacattgatgtcttaagattaaaaatcatatttgaaaaaaaatacagcaatatatggtcttcacagtcaatatttggatttttttctttgttttataaacagcagttcaaaaaagttttaccctaatgattaaaactgaaagtttttaaatttaaatattggcatagattggagaaagcaaatcagagtaaatatcaatcaattttagccaagtacatcttcaccaaaaagtgtagtgtgagtgagctactcatgagggtgaccagcatctcccctgtggaaagcgctggtggcctctcccattatggtgcaagtgctgctgcctctgagacacaacaaagtgacaatgagagttcctcacaggcagttataaatagaacatcaatttaacagtgtgatttcagggaaaagttattccacctaaagaatcacctgaaaaatatgatcattcaactatctaactatatactgtacaattcagtattataaatgagactctcagtactaattcatagaaattccaaaccacaaccagactccagaatgtcagtgattcttaaccaccactttttactgttactttttttcttttttgaaaaaaaactgggaaactctgacaaaattttagtgaagtgcaaaggattacagaggaagataaatgtagacaaaaaatcaccccaactgtgagtaacgtttcctcagtgtttatagttagggaagaaaaccattgatagcttcaaactaaaacaattctatagaaaatgttgcaggaagtgagggaccccgaacagagggtccagctgaagccatggcagaagaacataaattgtgaagatttcatgcacatttatcacttccccaatcaatactcttataatttcctatacctggctttaatctcttaataccagtatcttcataagctgaggatgtatgtcgcctcaggaccctgtgatgattgcattaactgcacaaattgtttgtaaagcatgtgtgttagaaaaatatgaaatctgggcaccttgaaaaaagaacaggataacagcaatgttcagggaacaagggagataaacattaggtctgactgcctgggagccaggcaggacagagcatgtttcccttattaccaaaaacgggtaagagaaatatcactgaattctttccctagtaaggaatataattaacagcactgggaaaagaatgcattgggggggcggggctaaaatgtctgctctgggagtgtctgtcttatatggttgtagataagggatgaaataagccctggtctcctgtagtgcccccaggcttattaggattaggaaattcctgcctagtaaattttagtcagactggttgtctgctctcaaaccctgtctcctgataatgtgtcatcaatgacaatgtgtgcccagtgggacatgaaacttcatcaggaattctattttcaccctggccttgtgaccttgccctgcccatttgtcttgtgatattttattgcctttgaagcgtgtgatctctgtgacccacaccctattcatacactccttcccctttgaaaatcactaataaaaacttgctggttttgtggctcagggagcatcacggaacctgccaacatatgatgtctcccccggacacccagctttaaaatttctctcttttgtactctttccctttatttctcagactggctgatacttagggaaaatagaaaagaacctacattgaaatattgggggctgtttcccccaataagaaaacctgcctgaaataaagatatgtgatttagtagaatgacaatatagaattaaagccaagtagtgccactttccaagaacctatattagtaactgtaaaattataagtgaagagtctgggtatagtgttttctaacattatctccctgactactatgtaatagctccatttcatttctctcttacacacacacacaaacatgcacacacacatatttacataaacacacttagtagaggctacctatctcatattatacatcttcttgataagaaactgaatgattgggtcagttaaaagacataatttcctccaataattcctgataatacttgattttctctctttagtaatttgtaccaattmtttcagtagtgcctgctgtgctgttactcttttgtgatggaacaaattcttttttcacaggaaatggaagaatttatccagagctctggagaaaatggtgttgtggtgttttctctggggtcaatgatcagcaacatgtctgaagaaagggccaatgtaattgcatcagcccttgccaagatccacagaaggatagataaagttccttacggtatggaaaactaccaaaagaggctgttaaagtctataaataatccaattatagaaatttccttcctggaaatgtagctcttgggaaagcactaattatcagatattagttcaaaatgagaaatgtacatgaaagatgctaaagtaatacaaagggtataatcatggataataaatttggtactaatattgtgaacaggaagaaatatattaagaggcgtaggtaaagttttgatattatcatgatattgaggtcacataagagatatcaccaaattatttccctgtcatctgatccttatgtttaaggattcctgaggaaattatacacactatagatgttatcagaagaagttacattttaatgggtgacttcactagcacaataacaatarcaggtatttcaaaatgtctaacatgcatcatgcagtttaggcttgccatgtaatcyggcctcatgtagttcctccacattttggaataggcccatctgagtgatgttcagggtactattcagagaaagaatggcctaggctgacagacttagtccaagttctcacctagccaggtagatttagaaaaagagaaaaagcagcctcccttgctggactgggcccagccaatgtctaaaacaggaagatgaaagaaaaaggatggaaatggatcctgacctgaaggtggatcctgtgctgtataaaatgtggccccacaaggactcagcactaactatcagattaacaattcttcccaatggaggcagcagaaaaaaatataggaaggagtcaaacagaaggaagccaggtggggaataggttcagatgctccctctataatacatagtaggaacatattttcttctgtatagaataaaacggtgacttttgtgtatttgtcaattactttttagctccctatctgatatagtcttcttgcaatgacctccactaaagttttttgctgaaaaaccagttattttaatactgatataacaagtaaaacactgtaaattatttatcagtttatgaggattgcttgggagttccaaaattagtaacttaaacataagaatgtcttggctatagtagaacatattaatcactgttgtcaaagctttgtagcacattgtctaagtgttaacaatctgttgaccaaattcagaaaaatatgattttgaatttgttcaacagctatatctttatttatgataccggcaggttcctcatttcaatgctgaaaaaaaacaacaaaaattagcaatactgataatactctgaatttgtctcagaaattgtcccttgaaatttctcctggaagtagtgcttgataattcataatttcaaagaagttatacatgctacctttgtagcattatttcttacaattagcttattttatcaacttgcttttttgtcaatcaaagaacaccaaaccctaacataataacttatagacaagcagaaatacatgaattacttcctatattaccaaaaatgaataaattaatatttaatttggaagatgaaaactagtataaaatacataaaataaaataagcatataggtcattactaaattgttactgcttattctcactagaattataatgactatttaaatatttttcatacatacaattttttagaatttttgtgtgcttaaaattaaatttattttattttttaaattttattttaagttcaggggtacaggtgcaggtttgttacatagataaatttgtattatgggagtttgttttacacattgtttaatcgcccagtcattaagacctgtacccattagttattttacctgatcttctctcttctcctgccctccaccctccaatacaccccagtatgttgttccatgctatgtttccatgtgttctcatcttttagcttccacttaacagtgagaacatgtggttctgtttctatgctagtttgctaaggataacagcctccagctccatctatgtcctgtaaaatacacatcttgcttttttatggctgcataatattccatggtgtatatatatcccattccattttctttattcagtcaatcattgatgggcattaaggttgattccatatctttactattgtgaatactactgctattaataaacgtgtatgtgcctttataagagaatcattcatcatcctttgcgtatatacccactaatgagattggtgagttgaattgtattttagcctctaggtttttgaggaagtgccacactgtcttccacaatggttgaaccaacataaactcccactaacagagtataagcattcctttttctacacaatcttgctagcatctattactttttaagtttataatagccattatgaccggtgcaagatagtatctattgtgattttgatttgcatttctctaatgagcagtgatggtaagctttttgcatatgatggttggccacacataggtcttcttttgtaaagcataccaattttttaaatacttgaacttttcatttataatctcatttttctaagctattayttggaaaatcctgacttccttatatgcttaactaattatagaagttaagaaaatgaaatgttggcattctatttacatcagtctttgagtagttttrttacctaacatcccygatctcattcttaatctctttagagtcctaacattctctaactttggagttctactaacggaataagrtattttttttactgtagcaggttctgtggagatttgatgggaatagaccacatggcttgggactcaatactcgagtgtacaagtggataccccagaatgaccttcttggtatgactctggagtagaaatactgaatatattagtaccagcccattagagtgtgaataattaatcatgaaataagcttattcaaaatgtgttatggaaaaacttataaataaaatgaaacttctttgtatttattttccagtccttcggggaacataataagctataattgctggcattttatgatatacattcacagtctttatggtcagaatcagggtatttttatttcaagtgttattatttcttgcagaattttttattaacgtcatagattgtctctttgtctcctatttctataactttacacttgttctttctttttatgcagggttatttcaaatgtcactaataaaacagctcttctgctatcaccaggaagtctgaattttctgtaggattaaattcctaatctyaatcataaagtgatgactcatttcgtgacgaagtgtgacctgtccttcctcaatcatagcaccaccaccaccccactgcctgctgccttgcacatctcacatatcacattccgtgactgcacttaggagaacacattcttacatgtccttctcttttctttgattctttttctttttttttcgcatttaatttagatcacattgtttctttagtccaactggtaatcttgtttaattttttttcagtctgaagtcacacaaaacatatagctttcacttatatctccagcagaagtatgtgctccttcctctgaagtctgaaacacaattttaatttagttcaatgttttagctagaaaacactgtcacttgcgtgtttcgttgtgcatttctcattttattcctatgagtaatattgctaaaatttatccaatcctagttcatccaaaaaccagggcttttataactcatggtggatccaatggcatctacaaggcaatctaccatgggatccatatggtgcacattccattgcttgcagatcaacctsataacattgcacacatgaaggccaagggcacagctattagattggacttccgcacaatgtctagtacagacttgctcaatgcttgaagccaataattaatgaccctttgtgagtataacaatatcttttcactaggtggtatttatagataccttatcttctcaatagtatgagtttcatccttttttcaagagactaattttgaaagaatttaaatgatgtaaccaatctgaaatcttcttttatttttgagcagttatttaaaaactgtttttagaactccgtacatttaatgggtatccaatagtgaaacaattttttacacaaaaataattttcaagtaatatagataatataaaaaagactgttttaaaaaaatttcatgatcagtccacagtagaaaagaaggataaacttaaagaaatatgataaaatgttttaattaaacatccaaaatatctaaaagtataactattttcctgctgaaaaattcatttttattcttttcattattgtaacaggcttgataattagatataatttccacgacttaaaatccacctatttaaggtttaaaatcccaatatatttagaatgcttacgagtcacgaagccatcatctgcaatcacataatttagggtgttgtgtaaatgacttatttcactgagcataattttttgggttttttaaaatagtttttagattcgttcatgttgtagtgtgtattaatacttcatttctttttacagcagtataatattttatagtatggatatgccatattttatatgttcacttatcagttcattggccttttgattgtttccaattatggctactaggaacattgctacacgtgtttttgcataaacatgtttttctttatttgggattgatactataagtggaattgctggctcatgtgggaactgtatgtttatgaagaactgctgaactgtttcccaaagtccttgttccatttgtcattcccaccaacagtgcaagagggttccaattcctccacactgttgccaacacatgttattatctttttgttatagccttcttagtgggtgtgaaatgatctttcattgtggttttggattggattttcattacagctaaaaatgttgaccattgttatatgtgcttactgaccatatatggctttggaaaaacacgtattccaatccttggaacatttttaaactttgctacttgtcttattattgagttttaagaactatttatgtttcatggatataatcttagatacataatttgcaaatattttgtttcattctgggtgtgctaacattttacacttttgatgatggtttttgaagcacaaaatttttaattttaataagttaaatttttaataattgatttatttatactccaaaggatacaacatgcaaaatgtctacccactccagctaccatcagttcagcatttataactactatcaataatgttttcatgtaagacagccatcacctaaaggaatacttttaaaacaggttgtacaataaaacaggttggaccaatataaaagaaatataaaataaggtggtttatttaaatgtaaatacacagatacttccattaaatctaaacaaactttaaaaagaggagcaaataatgagtaatgccatagaacattagaagaacacagttaacgaatggaaacttgtaacacgatacacacacacgcatgcatatatatatgtatcrtatatatcaactaaaagacattttcttagagcatattgaattgttaataattatttgaagtgacatgtggtgggacataaatcaagactcagtaaatttgaaaagattcaatatcataaagaatatatgatccagccttagtagaagtaagggaaattttaaaaaatgtaactaaaatatctttaattttggaaattaagaaaatacacttcaaaaaaatttaaagtcctgcctcagcctccccagtagctgggattacaagcatgcaccaccatgtccagccaattttgtatttttagtagagacagggattcaccatgttggtcaggctggtcttgaactcctgacctcagaacatccacccgccttggcctcccaaagtgctgggattacaggcgtgagccatcgcttgaacctgggagttggatgatgcagtgagccaagatcatgccattgcactcctgcctggccaacaagggcaaaattctgtttccaaaaaaaaataaaataaatataataaataaataaaacttaaaaaaattaaaaattaagaaaaaaaaagtcaagaagttaatcataattaagcatgcatttttatctcagcaattctactttcaattatatacccaacagatatgtataaatatgtaaatctagtgctacatatgacatggacaggaaacaggaaaatactgggtagaagaggtcggttccccagcaaagttcccaccctcaagcctgaaaactaaatgagaacagacattctgtttttgaggcccgaagttcccttttggcccaccatgccctcctattctacccatatgaaccccaaacccccggcatgaaaagaagagccaaagaatggcagaatggtgcatcagagagaagagaatgaatttctgaatgcagagagtagttcagctggggacagttggagaggagaggaaattggatgctggatggccaaactccagaggaagatcatcttcccactccatcaccatcccagctctccattcatccaagagccacctccaccactcaataaaaacccctgcattcatccttcgagtccatgtgcgacctgattctttctggatcctggacaaggacttaagtactaacagggcactgaactggttaacacttaagccatcaatacattgcaaggctaaaagagtacaccaacacatacctacttgggctttgggagttgtagacacccacccctggatgctgccatggggccagagcccaggggcgctcacccaggctcctgcacttgcctgtctgcatgctccccctcccataaggggcttgaatgtgcatgggggctgaagagatgagccacacagctgtcgcacatcttgtggtgggggggcccagaactcttgcatttcatatacaagaatgtttatgacagaattattaatattatccaaaaattgttagcaacccaaatgtctattggtcataaaatgatgacataatctgtgttttagcaatcaacaaaatactaaacagcaatggaattaaccaacaacagctacacaaaaatttwaaaaaaaataggctctaatgaatatatgttatataattcaattacataaacaaaggaaactaatgtatgatatttgaagtcaggctaatatttaattggaagacaaaagtagtgaataaatggttcagaaaaggagagttattctaggcaggttgtgatatcgtacaccatgatctgagcagaaggtaaattggtatcttctcttcaagataatgttcaagatgatctcacacttttgacctattcacttagtgtatgtatttttatcttttcatttcaatatttaaaggtttattttatatgatatataatgtatttaaaattctaggaatcaaatatcaaaataagcataaaacaatagagaaaatcctagaggttccatcatagagtgtccaggaaaagcctatcttagaggtaacacttagagggaaacctcaaaaggagatagaagcatgccttgggttgttgaaagaaagaatgttccaagagtgcgagagagggggcaaaatgtgtaaagatgctatgatgagaacacttttggtactttaaagaaaaatagaccaacgtctctagaagacatagtgtgtatggaaaaagtgttaggagaagagcttgccagtgtttgacattgcagggtcctgtagaccaaataacagagttggattttattcttaatatgataggtcaggcaaaaatcttaatcaggggagttgcaaaatctgacctttaatttcaaaaatttcattctggctactgggtaggaaacagtaggagaaaaatggtagggtagaagcagagtgactagctatgaggcatttcactgaccatggcacaattccttttaggaacttaaaaatggtaattctcaaattgtattttcactatctttcctaaagaacttaaaattgctcatgatgttgagcacgttctcatatgcctgtttgagaactaaaagagtgtaattgtattgttcataacagaaaggataaatgtttaaggaaggatactttattctccatgatgtgattatttcacattgcaacctgtatcaaaacatctcatgcaacccataaatatatacacctagtaagtacccacaaaaactaaaaattaacaaattaaaaaataataataaaatggctcatatttgctttgcctgaaagaaattagttttcctgactttccattttactttaaaaaaattgtcaacgataaaattccagtttaatagccgaagtttctatgatgactcaaactaaattgtacaaattctatgtcaattatatgtcatttactctgaatcatttggcactgtaaaaacctttcatgggccaggtgcagtggctaacgcctgtaatcccagcactttgggaggccgaggcgggtagatcacctgaggtcaggagtttgagaccagcctggccaacatagaaaaaccctgtctctctctactaaaaatccaaaaagtagccaggcatggtggtgtgygcctgtaatcccacctactcgggaggctgaggcgggaaaaatctcttgacaccacgggaaggggaggttgcagtgagccgagactgcaccactgcactccagcctgggcaacagagtaagactctgtttcaataaatcaataaaataaaataaaaaataaaagccttatatggacttgatatgctcaagaaaataaacttactttcaattttggtatctctatgtttatccttcagatataaagagaacactatgaagttatcaagaatttgacatgatcaaccagtaaaggtcgagcagtcttctggattgaatttgtcatgtgctgtaaaggagccaagcaacctcgggttgcagcccaggacctcacaggcttccagtaacactccttcaacgtgattgggttcctgctgtcctgtgtggcaactgtgatatttaccatcatgaaatgttgtatgttttgtgtctggaaatttgctagaactggaaagaagggaaacagatttgttgtatttgaagcttgaagttgggaaacctgatagatgggacttcttcagtttattccaacaagaaagattatgatgcaagwttcctttctttctgtgacagaatatctcttcaaaaattacttaccttggcaactaaaaaatttgtttttcagagatttaataactgtttaatggttagaaatactttttgtcaagaaggaaaatactggcaaaaatattaaatagtataaagccatacgagctgatgttaaaatttgtcaagcttatattgaaattcattgtcctcattcacaagttacatgaaaaaatttttactgagcttaactgcatttcacatattgtacttaaacacaagaatattgagaagtccactgacagtatcggttctattttgcaaatactcagattactttggcttcattttgagcaggattttcatattttaactgttgttaaaggaactattaaacaattgaattgtataaaaaatctctctcttccttttgatattttgagatgagtagtgctgcttggcctttatggtgcatactgcttcagcgtcagttttttcctaaaatttatggcaaaartgtttattgttttagagctttagtcatttcccagtggaacgtatgtggcattagaaatatagcaactgctacctgcttcctacagtaatattgaactattttacaaagcctttggttctatgagccaattcaggctttccatgtgatatcaacaaaatcaatacatctttgtccaaaaaaaaattaaaaatggagaaatgagtragtgagtggtggagagaacaccggactaaaagtcaggagagctggggtcaagtcccacccttctgctgagccagtctttcatcctgagtctcagtttacycattttttctggtcatttaaaaatattcatctgtttgattttattctcatattttaaattatttcaatagattttagggaacaggtggtgtttgatttgatggataatttatttagttgtgatttctgaaattttggcacacccatcatccragcagtgtacacagcacccaatgtatagtcttttatccctcttcccactccaaccttccctgagtcctgagagtccattataytattcttatggctttgaattttcatagcttagctcccacttataagtgagaacatccaatgtttagttacctaatcctgaattacttcacttagaatactggtctccaattccatccaggttgctgttaatggcattattttcttcctctttatgactgagtagtattccaaggtgtgtgtctgtgtgtatgggggggtgtatattatatatatgtgtgtgagtgtatatatatatatatatatwcacacacatacatacatatcatattttctttatccacccattggttgatgggcatttaggtttgttccatatttttacagttgggaattgtactgctgtaaagatttgcataagtctttgcaaataatgacttctttttttctgtgtagatatccagtagtaggatagctgggtaaaaatgtagatctacttttagttcttaaggaatgtccatactgttttctatagtggttgtactagtttacattcccaccagtagtgtaaaagtgttcctttttactacatccatgccaatattgtattattttctgtttttttttaatgatgtccattcttacaggaggacagtagtattgcattgtggttttgatttgcatttccatgataattagtgatgttgagcattttttttatgtttgttgtccatttgtatattttcttttgagaattgtcaattcatgatcttagcctaatttttgatgatattatttgtttttctctcgtctgtttgaattttcgtagattctgaatattagtcctttgtcaggtacatagtttgtgaatattttctcccattctgtgagttgtctgtttattcagctgattatttcttttgctgtgcagaagctttttagtttaattaagtcacatctatttatctttgtttttgttgcacttccttttgggttcttgctcatgaagtccttgttaagccaatgtctagaagagactttctgatgttctgtcctagaatttttattgtttcaggtcttaggtttaattttttcatccatcttaagtagattcttttttataagtcgagagatgtggattcagtaccattgtactacaagtgacttgtcaattatcccagcaccactggttgaatagggtgtcctttctccactttatgtttttgtttgctttgtcaaagatcagttggcaataagtatttggctttatttctggaatctggattctgttccattggtccacatgtctgtttttatgcctttgccatcctgtttcagtagctacagccttgtagtagtttgaagttgggtaatgtgatacctccagatttgttctttttgcttagtcttgctttggctatgcagacttcaagccaagaatcaaatcaagaattcaacccatttcacaacagctgaatcaaaaagaaaaaaaataaaataaaatacttagaaatatatccaaccaagaaggtgaaagacctctactaagaaaactatgaaacctacaaaatactgtcaaaaaaaatcatagatgacacaaacaaatggaaacatctctcatgctcatggatgggtaaaatcaattttatgaaaatgacaatacagccaaaagcaatctatgagttcaatgccattctcctaaacataccataatcattcttaacagaactagaaaaaacaatcctaaatttcatatcggttttattctcattttgacctttaatagcaaatacaagttcttaattttagtttgtgataatataggaaatgcattctaaagggacttagtgaattttcaatcttgatgaacatacaggcacatatacatgtccatttcttttgaaacaagacacagcatcactttacaatctaatagctatgttgggaaattcaatgtgtttattgaagacagtttgaatttataattattattctacataactatactttaaatgatcaagtctaatttttttttctcttttccacagtcttttgatctttccctccgataaatataatttggcaacactacattttttagcataacaaaaatacatctacaaagaatacaaaaagtttataaattttgtggaaaatagctaagtcaagccataaacctcctttaatctgcacatcagggaagcactttatgatcaaagtggtccagattgacagaaacccagttgtctttgttaatcagaagtcttatcactaaacaagtctcccaacaaatattattcggcctaaggcatgatttaaatatatgtcactatataaacatgtgtgtatatatacacacatatatatcactatatatacacacacacatatatgttatatatatcactatatatatcactaaatatgtagatttgtatttgtatacatatatataaatcatgtcatacacacacacacatgcactaaaacaatgatgttaaagaaattataggaagtgtgtataacagaatattttacacaaatcatcctggtattgatacatttataaaggaaaacaggaataacaaggtggcaaaggctaaaaatgttgttttatcattcttataagcctgaaataattcacagtaaacctattctacaacacacttaaaaggtgggtatctattgtttagtgagtactacaatcaccaactaaaaaggagaaacattccaatataaaacttaatgaaaatatgaacaggcacttcaaagtagaaattcccaaaaacatataaaagattataaagtaactgatgctcaggaaaatagaaacaatgccaataaattaatgctctagagatttgcaacctataaaaacctgaaaaatctatttttgagggagtataatgcaaaataaccttctaaaataaaatgtcaatatacagtttgaaactgaagttctacatctataaatctatcatgcagaaatccttccatataagcacatgtatgaacagaatatttcctccagcacttacttggctccagtcaatgaacacacatagctccaacaaatgtgagtgtagtcattgcagagaacagtttattccattgctaaatagaaaaagtagtttccagaaaaaaaggcttacttgtacttgtaatgaaataaaataaaatatatgtaaacttgtacaaygaaaaaaaatctagaagaatacacataaatataaggatgggaattttagattttattctacagaatcctgcagtatttaactttttacaatattttcatgtgttatttatgaggtttaaaaatgaatttgtgaaataaacataaaatcagtacacgacgtttgaaaaattaacatctcgttattaattcattagtgttattcaaaaaacttgaattgatcatgtttctcacatgctattttattcatttgcagctttttttagaacccttattccatgtttaaaatacctatggatacatataatacaatgtttaaaaaattgcaagaactgtagatatctaaattcacataattttcayattttgtttttttattatttttaatattttatgaatcttacaataacttaacaacttctactgtcttcttcaaaaggttatattggttgtgatttttgtgacatgactataaatactttgacaattttcctgtcaagtaatatcccctccctttgaagtttggcaaaccttgtagctgtctcaacagaaacgatatagtggaaataatgcagcttatcttacaaagttctgttggaaacacaaagtgttctctctctctttctccctctctctttggatcttttgtttgtatgtttctttttctctctacacctcctcaactccatctgtagtccccgtaataaatgacaatttggtagagagacacagatatatgcccaagaaatcctggtagcccactagcactttgagcccttcaacttgaatcattaagtatgtaagtgaatgatcttcagataattatagaccgaggcaccgtaggaaagtagctacctaagaaactctgtggaaggaacacataattgagctcaaccaacacccaaactctgagcgatgataataaaatgattacagttgttttaaggcctgacatttggaaacaatttgtcatgcagtgatatataactggaataataaatctacatattttaaattatacatttgtaataaaattacaattaatatatagctacatgagtggaaaatagggaatattatattttgaaaatatctgtacctcaaatagaagactcagcataacatggtggttaagagctggcactctggatccagatgcccttcattcaagtctctgagaaaccactacataatgatgtggggttggacaagttacttggactttatttgcttcaacttcctcaccaatgaaatggcattggtggtcatagtattatcaacctcatggggttgctgaaaggatgaattcattaatatttcaagcacaaaaaacaattgtatatacagcaaagtaaaatttttttgtaacattgaatgtggcaaagtttttagatatgacaccaggagcaggagcaaccaaaataaaattgataaattmggtttcatcaaattaaaatttttcacacatcaaagaacaccttcaataaagtcaaaagagaaaccagagtttgaagtatctatttgcaagttacatacctgataagtgacttacttatataaaaaaaaataaagaaagcttacagctcaatgttaaaaagacaaataacataatcaaaaaatgtttaaaaatctaaacaggaattttaccagggaatatgcaaatgtccaataagatcatgaaaaaaatgttttatgttggattacatagttaagagaaatatataacatcttcccaatcacaagtaacttttcctttgtgctcatagtcagggaaataaattctcatggctaaacagaaaagctgcctggaataaatacaagtkatttagcagagctgtaacaatataaaattaaagataagtaaacaaataacactagtcttcctaagaatccatactagggattaaaatattataaatgaagagtctggtttccatattttttaacagtatctttcccactactctgtaaagatgctattttaattcttattatatatactaagtcaaacacacatgaaggaagagaaagaccctctcatattattttatattgttttatcctcagtacctgttttaagaaaaaaacaaataagtgaaatcaaagataggcagcccggcgccaggcccaaaaccagccctgggcctgcctggcctaaacctagtagttaaaaatcaactcataacttagaaaccgatgttactcatagattccagacattatatagaagaacattgtgaaactccctgccctgttctgtttctctctgaccaccggtgcatgcagcccctgtcaagtaccgcctgcttgctcaaatcaatcacgaccctttcatgtgaaatctttagtgttgtgagcccttaaaagggacagaaattgtgcatttggggagcttggattttaaggcagtagcttgctgatgctcccagctgaataagtcccttctttctacaactcggtgtcttgagttttgtctgcrgctcctcctgttacatttcttggctccctgacygggaagcaacgtgactgacagacagctgaggcagccccttaggcaacttaagcctgccttgtggagtgcccctgtgggggactccagccagcctgagtgacatgatccaaagagccctcctgggtaggaaattgccccggtggaatccctcaccagagaagcaggtagcaggccctcgcagaggattaacacagtggctgaacaccaggaaggaactggcacttggagtccagacatctaaaatttggtaagactagnnnnnnnnnnnnnnnnnnnnnnnnnnnnnnnnnnnnnnnnnnnnnnnnnnnnnnnnnnnnnnnnnnnnnnnnnnnnnnnnnnnnnnnnnnnnnnnnnnnnnnnnnnnnnnnnnnnnnnnnnnnnnnnnnnnnnnnnnnnnnnnnnnnnnnnnnnnnnnnnnnnnnnnnnnnnnnnnnnnnnnnnnnnnnnnnnnnnnnnnnnnnnnnnnnnnnnnnnnnnnnnnnnnnnnnnnnnnnnnnnnnnnnnnnnnnnnnnnnnnnnnnnnnnnnnnnnnnnnnnnnnnnnnnnnnnnnnnnnnnnnnnnnnnnnnnnnnnnnnnnnnnnnnnnnnnnnnnnnnnnnnnnnnnnnnnnnnnnnnnnnnnnnnnnnnnnnnnnnnnnnnnnnnnnnnnnnnnnnnnnnnnnnnnnnnnnnnnnnnnnnnnnnnnnnnnnnnnnnnnnnnnnnnnnnnnnnnnnnnnnnnnnnnnnnnnnnnnnnnnnnnnnnnnnnnnnnnnnnnnnnnnnnnnnnnnnnnnnnnnnnnnatttaatggagactatggagtcactatgactccaggaaaacttagagctttgtgtgaaatagactggccagcattagaggtaggttggacatcagaaggaagcctggacaggtcccttgtttcaaaggtatgacacaaagtaacctgtaaaccaaggcaccaagaccagtttccatacatagacagttacagctgtctttagaccccttcccccccaacagtagttaagagaacagcagcataagcagctggcagaggcaaggaaagaccagcagagagaaaaaaaaggccatctataccaattctaagttaatttagactaaacaaggtcttattaatagcaaaggataattgaaatcccaaacttacaaggttttcaacaaaagtgaagtttgctaaaagttaacagtgtaacacatattatggtaaattctaatcttgtggccttagacagtctagtccaaagacatcaaaaaagtttgcttaaaaaaaaagaaatggttatcttcaaaaaaaaaaaaaaaaaaaaaaaagaaggggaggcaaaatttacgtaaaaagagtgttatatggtaaattcttgttctgaaataaattggttgtttcaagaaaaaaatgtttgtaataagtcaaaaagttgagacatgttgaagaattgtcagtggaagtcgtgaaaaaaagttataaaaatttatgcaaaaaggttttataatttaaaagtaatttggcctcttgagtactattgaagaaacagtttatgtgcaaagtgtataaaaaagtaaaacatacctttggtaaaaagattataaggaggcataaaaatgtggatttttacctacattaaaaggttaaaaaaattattgttttaaaagtttaagcaagttttaaaacattaattgtaaagaaaagtctgtgtgtaaacatattagctaaagttaaaaagatatcatccagtttttctgygaactagacataaaagtaaaaatgcaacaggttttttttcttaaagcatcaacctgctctttaacaaaaattataaaaggttaaaaagagtctataaaatcttaccttatggtcaaacatgaaaaattagataaatatgtcttcaaggttttattaaaattaagtttaatattaatagcatactaatataaaggtaaaatttagcttatctggtataaaaatcatacaagaagcattattaaatatraaatggtgtttagctttctttggtctaaaaactaatacaaattggtgctaaaggaaacattcattttactagaagatcacagaagttaaagacttaaaaaaaactttggcaattaagacagcataccaagatgcaaatgcctggttgaaatagatcaaatattccatctgcacgttaaacaaaagcaattgttatgcttgtgcacatggcaggccagaggccctaattgtcccctttccactacagtggtcctccagttgaccaggcgtaggctgcatggtaactcttttccaggattctacagcctggagtaataagtcatgccaagctctctctgctatatcctgaagtccctgtgggtcagcctccgagggccatccagcttccatctcccaacactaagttcacttcgtgtctctcacagcagggaggagacagcattccttagagacctgaaaggatgcagtgagcttaagaattttcgaaaggttatcaatcagtcagccgttgttcatccccgagcagatgtgtggtggtattgtggtggacctttactaggtactctgctgaataagtagagtggcacttgtgctttagtccatttggctatccctttcatcctggcatttcatcaaccagaggaagaaaagaaaataataagatatcataaagcgagagaagccccttataggtcttccaactctcatatctatttagatgcaattagagccccgcaaggaataccagatcaatttaaagcttgaaatcaaatagctacaggatttaagtcaatattttggtagatgacagtgaataaaaatgtagattagataaactacatctattacaaccaacagcaaagagcttttcatgagttaaaaaaaaaaaaactcatgtcggccccagccctgaggttacctgacctgactctgtgaagtctgtgtgtcagaaaagaaaaaaatggcagttggagttttaactcagactgtggggcactggccaaggccagtggcctatctctcaaaacaaaaagacagggtttccaaaggctggcccccatgtccaagggccctggcagcaatggccctgttaccacaagaagcagataagctaactcttagacaaaacctaaacataaagtctccccatgctgtggtgattttaataaatactaaaggacaccattagctaataaatgttacactaagtagataccaaagcttgctctgtgaaaatccccacataaccattgaagtttgcaacaccctaaccctgccaccttactcctggtatcagagagcctagttaaacataactgtttagaggtgctggactcagtttattctagtaggcccaacctccgagacaatccttaaccatcagtagactaggagttgtatgtagataggagcagcgtcaccaacccctgcaaagtgactctgaagaagactacaagccctgctccagtcacacccagaagctgactggtccacgcacggctgaagcatgaggaaactcatcgcaggactcattttccttaaaatttggacttgtacattaaggacttcagctgaacttcctcagactgagggctgttcccagtatatacatcaagtcactgaggtaggaaaaaagattgctacagtcctattattttatagttattatnnnnnnnnnnnnnnnnnnnntatgtaatccaggaagtgcccagcctgatgcgtgttatgactccctgtaagcctcccatgattaaggactgatccttttttaagtgccagaagtaaagtaatagctaaaaaaaaaaaaaaaaaaaaaaaaaaaaagaaaggtccccaaaaacgtaatcttaaaatttggcacttgtgctgctattaatagtaagcagcatgagataagatgtggttctctaaattgaaaaactagttacacagtaaaaaaataagtatatctgtcaagaatcatatttttgtgagatgtgttaatactggtcttgtgtcatttagactacttaaaaaaagataaaaaggatcctgtttgactccaaaaaaaaaaaaaggtcagcccctcccctcctgcatgagtaggagctgcaaccttttaaaattgataatcacaaacccctcagacccaaagtaaaataaagaaaaatatgtaacattagacattaacagaaaaagactagatcctagtgtaagcatcctaataaaagaagaagttcaagaacactatccagaaccagtatttcagactttctatgatgaactaaawgtgccagtacccgagattccaggaaaaactaaaaatttgtttttgcaattagccgaacacatagcccagtctctacaagtcacttcacgttatgtttgtggaaaaaccgtaacaggagatcaatggccatgggaagccccagaattagttcctaaagacccagttcctgatgaattcccagaccaaaagaatcaccctgatcatctctaggttctaaaagtctcaattattagacagtattgcatatctaaagaaagaaaaggattcgctcatcctgtaaggcagcttagctgtcttagacaaaagctctataatagtaccacaaaaacagttacatggtggagttccaattacacagaaagaaatccattcagtaaatttccaaagttgcatactgtttaggcccacccagaattctaccaggactggatggtccccaccaggttatactagatatgtagacacagagcttatgctaagctgcctgatcagtggagaggtagctgtgcaattggcaccattaagccttctttcttcttactgcccataaaaacaggtaaacttctaggcttcccagtctatgcttcccacaaaaaaggaagcayagccataggtgattaaaaagataataaatggccccctgaaaaaatcatacaatactatggacctgccacttgggcacaagatggctcatgaagatactagacccccatctaaatgctcaaccgaatcatacggttacaagctgttttagaaattattactaataaaaccgatcaagccttgactgttcttgcccgtcaagagactctgatgagaaatgcgatctatcaaaatagactagttctcgactacttgctagcagctgaaagaaaagtttgtagaaaatttaaccttactaattgttgtctacacatagatgatcaaggacaagtagttgaggatatagttaaagacataacaaaactggcacatgtacccatgcaagtgtggcacggacacaatctggaagccatgtttaaaaattagttcccagcaataggaagatttaaaactcttmtaataagagtaataatagtaattaagaacctacttacygctcctttgtttcctacctgtacttcttcaaatgataaaaagcttcatcgctaccttagttcaccaaagtgcttcagcmcaagtgtactatataaatcactatcaatctgttgcacaaaaagacataagtaacaaaaataagagtgagaactcccgytaataaaaagtgagagtctcaaaaggggggaatgaaggaagagaaagaccctctcatattattttatattgttttatcctcagtacctgttttaagaaaaaaacaaataagtgaaatcaaagacaggcagcccagcaccatgcccaaaaccagccctgggcctgcctggcttaaacctagtagttaaaaatcaactcatgacttagaaactgatgttattcataaattccagacattgtatagaagaacatggtgaaactccctgccctgttctgtttctctctgaccaccagtgcgtgcagcccctgtcatgcaccacctgcttgctcaaatcaatcatgaacttttcatgtgaaatcttcagtgttgtgagcccttaaaagggacagaaattgtgtatttggggagctcagattttaaggcagtagcttgctgatgctcccagctgaataaagcccttccttctacaactcggtgtctgagaagttttgcctgtggcttgtcctgctacacacacacacacgcacacttgcatgactgtgcattaataatagaggaaatgtatcttgtggcacatacctccttccaraggaactgagtgatgaggtttgtttaaaaaattgacactactgaaaacagtatggaggtttctcaaaatatttaacgtaagattaccatatgatgcagcaatccctcttctggatatttatccataagaattaaaatcaggatctcaaagggatatttgcacatccatattcataacagcactattacaaaagctcagaccttgaaacaatcccagcatctatctgagcaaagtgtaggaacaaccgggtccgactggtctaaaatgaaaggaaaggtgaatgtgctgtgttgtaactggcaggaaatgggaggaaaatcctcaaaacccaccccattggaattcatgttaaagaactttaagaaaggctttgtggtggagggggtggtggttaggggagtcaagttaacscactgaatgctgagagctctctgtgaattatgaatagccctcttttggtgttggctggctggccaaatgtacttatagacagggacacaattggccctgtgtttaaggtggtgaccggagtcagaggacagtcagggcattcagaccaaatttccttatattaactcatggctgaatgcagccctgtttagcagcttattgcagaatgctcgcagttcaagccgagagtaatcagctgtgctggcagctacaaagacaaagtgaaaacagagttaaagggaaagtcacaggagcttgtagcctgagctgagctgaaagtgaaatcttctctggcaaacacagagacaaaaagaaagccacaggaaaacccagttttgcaagaaccactggagggaagagacccttcctccatatgctccaatctacccacctttacccagagttactgcctctgaggagtcaagctcaaagggatacatgccccagtctcacctgagatggaaaaatctgagccctcactccaggaagttaaggtgaaatgctaggaaaataaagcaaacttgtctccagtcaggtcatgtttgggctatgcaaatgcctttctgggaaacaagaggaccccgactaggacccaaatgaggcagcccaactacagcagctgcccagataccaaaaggcactcctgcaaagtttaagggaaggcgggagaaaggcaatcaatatagggaaaaatctcataggtgcttcagggtgcatatgaaagccccagccagttttataaaagacttagtgaggccagcacatgctgaacacggcatttgtagagcaggcccagggggatatcaggcaaaaattgcagaaaatggaaggttttgcaggcatgaatgctattcagtttattgaagtggccacaagttgtacattaacggagatcaggaggcaaagacagaggctaatcaaaggcttaagaaaaaggctgattggctggcagcagctctcacagggagggaagctggctttgcaaggtggcgtgatgtgggcatggaagtgggcatggaagaagccagtatggacagggatttgagagcaggcccaggttggaaagagatcagtgtgcacagtgcaaaagacaaggacactggaaggatgagtgtccagagaataataataaggagaagggtcagggccatcgtacaggaaggccaccagccaggggctgccacacccaggagaaaccaggcactgatctgatcagactggcaggggctgaaggatatgaggactaggacagaccaggctgcttctctttgggccctgagaagcccatggccagattggaagttagaggccagctaatggactttatggtagacaccagagctaaacactcagtagtgacccaacctatagggccactatccaagaactgtgcaactattgtgggagccactggagtctctgaaaagaggcccatyggttggtcaaagaggtgtgttataggaggatgagaagtccaacstgaattctcatcccaaatggttctgttcctttgctgggaagagacctacttcaaaaactgcaggtacagattacatttgggccacaagggaatgtaactttaaatctacctcacccggaggctatgatgttaacccgtactgtaccataggctgaagaatagaggctatatgcaaaaaagactctggaaccaagagtaaatgaaatgcctgggttgcttactaaaattcccagagtttgggctgatagtaacccacctggactggctgtaagtcaggcaccagtggtggtagagttaaaatccagttcaggtccaacagtacctgctactccctgaggccatactgggtgtccgcaaatatttagagtcttcataaacatggaatcatagtcaaatgccagtcaccatggaacacccctctcttgccagtgcggaagccgtctggtgaatatagaccagtacagaatttgtgtgtggaaaactaggccacggtgaccatccacccagtggtgccaaacccatatactttaatgggacatattccagcaagtgccacttgatttacagtcctagatttaaaggatacatttttccgtctctggcttgcaccaattaatgagcctatttttgcttttcaatggggtaaatcacagtacacttggacaagactcccacaaggatttaaaaactctcctacaatctttgaagaggcacaggcctcagaccttaaagcatacaccccaccaaacagtgactgtgtcttgctccagtacattgatgatcttcttctagcagccccgacctgagaggactgcttcgaggggacccaagacctcctgcacttgctatggaaggcaggatataaagtgtcagggaacaagtctcaaatctgctctgaaagtgaccagtatttaggcttctatataagccaaaggaaaagatggcttggtagtgaacagaagcagaccatttgtacacttcctactccaaccacccggtgacaagagagttcctagggccagcagggtcctgctgcatctggatcccaaatttctcgctcatggctaagccattatatgaagccacaaagaggggaaaaaggagctcctcctctgggaggctgaccaggagaaggcctttaaggaaatcaaagaagccttgactcaggccccaactttaggactgccagatctaactaagcctttctttttatatgtccatgagcaaaagggaatggccgtaagagttctaactcaagccataggattgtggcatcacccggtggcatacctatccaggcaattgaattctgtggcacctggatggagtctttgttttaagacactagctatcactgctcggctggcacaggaagctaataagctgactttaggacagcaagtgacaatccagctactgcactcagttataactttgatggaccaaagggggcaccattggttttcgaatccgagaataactcaataccaagggctcctatgtgataatccctgtgtaactttagagactgtgagtaccctaaacccagctaccttgctccycattgaatcagtgccaggaagcccccttcattgctgagtggatgtggtagatgaagtgttctcaagccagagagatctgacagatcggcccctcggagacctggacattgaatattttactgatgggagcagcttcatactagagggagtccaccaaactgggtatgcagtggtgactttggactcagcagtagaggcacagtctttgtctacaggaactgcctctcagaaagcaaagctgataggtcttataagagctctctggctagcaaaagaccagaaggcaaatatttacacagactctaaatatgcttttgccactttgcatgttcatggggctatttacaaagaaaaaagactcttaactcctggaggtaaagaaataaagtgtaatgaagaaattctacggctcctggatgtggtatgggcccccaaacaggtagcagtaatgcactgtaggcaaaaggcaggaacattagaggctaaaggaaacagaaaggcagacaaagaggcaaagcaagctgcaatggcaactccaccttctattctaaagaagaagccttagctatgcctctcctcctggagattccccttccagggaccccaagctacactccaaataaaagggcttgatttgcccaggaaaatgggaattacgttgaaggaagatggtggaaattctccaatgggaggctagccatacctgaaatcttggcccccagatttgcaaaacagttccaaggaactcacatgagaaaaacggtgctagagacatgattagggtgtcatttctatgtgcaatggctcaccgctattacttgagccatttgtaaacagcgtttaacttgtgcccaaaacaacccctgaaaaggrcccactcagcccccgggaattcaggaaaaaggagctatgccctgtgaaaacctgcttatggacttcwccgaattgccccaagcaggggtctataggtacattttggtgcttgtctgtaccttttcaggatgggtcatggccttctccgtcaggacagagaaggcatgagagttgatgaaggtattgttaagagacattattcccagatttggactgcccctaactttgggttcagataatggactggcatttgtggctgaaatcgttcaggacttaactcgactgttaaaaataaaatggaagttgcatccagtctaccagcctcagtgctcagtaaagatggagcacatgaaccagatactcaagcagctgctgaagaaattttgtcaggaaactcatctgaggtgggaccaggtcttgcccatggtctttctccaagtcaggtgcacccccacaaaacaaaccacactgggtatttgcccaatgagattttgttcagccagccacccccaatcataagtcagattaaaggtaatctccgtgagctacaaaaactaactttaagaaggcaaatgcaggctttagatatggccatgcaaaaagtatatggctaagcgcaggaaagaatgcctataagtctggcagacccagtacaccctttcaaacytgaagactttgtttaggttaagaaatagactccaactattctgagccccatatgggacgggccccatattgtgatcttgtccactcccactgttgttaaaattgcaggtatcgtgccttggatccaccacagtcagctgaaattatcagcccaggaccagtggaccaaccagcaggacatagaccatctgacccgaatgatcctgcaatgagaccacattgccagtggagatgacaacagcactgctctggtcactctggaagatgaccagtctatgcatggtggaagcttgagaaaatagcaagccctgctctagtcacaccaagaactgactagtctatgcacggccgaagcttgaagaatcgtcatcagatgaataaatgyggccagaaatcttaggcccagtaatcttctttgtattattcattatattgctcttgtgctattgtttaaccaaccccctaaatgcctttactgtycatgctggctgtaagaatgctactgtttgctttgtttgtgctgatccccatatctatgctagaaggaggacccgtattaggatgccgtcactgcatgcacactacatggataagaaacacagtaattgctcacgcctgtaatcccagcactttgggaggccgaggcgggcggatcacgaggtcaggagatcgagaccatcccggctaaaacggtgaaaccccgtctctactaaaaatacaaaaaattagccgggcgtagtggcgggcgcctgtagtcccagctacttgggaggctgaggcaggagaatggcgtgaacccggraggcggagcttgcagtgagccgagatcgtgccactgtactccagcctgggcgacagagcgagactccgtctcaaaaaaaaaaaaaaaaaaaaagaaacacagtaattaagactttattataccatacatactataggtacctgggcacaagataggtcagggggtactgtacccctatttacatgcttaatcacatcataaggttgcaggtggtacttgaaatcatcactaatgagacagcaaatatgttagacttgctggcccagcaagccacagaaataaggatcaccatctattagaatagactggcttcagactgcctcctagcccaaaaagaaggattatgtggaaagttgagcctgatgaattgctgcctagaaattaatgataacaggaaagccatcatagaaatagctgccaggatgtggaagatagctcatgtcccagttcagacctggaacccagatggtctccagattccctcttaggaggttggttttcatcctttggtggttttaaaacagtaggggtagtgttggctatattaaaaggttgcttaatgttcccttgcctcttaggcctcctcatcagaaacatccaatcaatcacagaatccatcgttaacagaaccacctccactccactgatggctctaaacaagtatcaacccgtaccaaacagagaagaactgacttgtaatgaggaattaaatgatagtgatgccttctattgaattccatttacaggaggcatcaaaggggaagatgagatgggaaagaaagaaagaaagaaagaaagaaagaaagaaagaaagaaagaaagaaagaaagaaagaaagaaagaaagaaagagaaagaaagaaagaaaaagaaagaaagaaagaaagaaagaaaaacaaaattaaaaagagaaataagctttcctgtattaggctaacttgtcccagacgcagcaacgggtgcagcccagacccagggaaagtcctgatactactgtctaaaaagccaggagatgcaccaaaaaaatgtggtctgtagaccctcccaaaactccttcaacatagggagaagaaaaacaaattttcctttgttttatggtatgactttatagattcttgttctctgtaactagtaacttcaagtattctgttttgtctaaaaggtactgcgaaggtcatgagacgcctgagaaggcctgaactacagctgtctgggcacctagtgaaggttataaggcaaaccagtgcaaggctcttttgagcaaaacctagataacagacatctaggttgcaaagcaacagtcatgtgtaatcccgagttatgaactgtcacaatttgattaattgttctccctctgtatctctgctttcatgccactgtaagcctacatcaagttagcccaccccttttggaaagtgtgtatgaaagtcaagtgctgtctttgttggggcccaatctctggatgttaagtcagctgagtctgagtgcactcaataaagatatcctcctgtatacaccccaaggtctctctctggtactcctgattcctgcaaaaagatgtcaatttataaacaatatacaggacagatgataaaacagcacaaagagtgttgctgattggtaatattttgccgttaacgttgtgattagaaaaaaatacataattaggaggtgcaatatggcattttggtattattatgatagtggtggcaggtaacagatatcaccaaattctgccctgccattcaattctattatttacaggattcctaagtgcactgtacacactacaaatgttatcagaaaggagttatactttatgagttacttcactagcacaataagtaggtatcgaaaaaaaaattgaaatgtatcatggagtttaggctttccatgtaatctggggctctttacttaccctaattttgaaataggtctattcagtgtatttttcagagggctatttagaaaaaaggaagcccaaactcacccaccctsagtctaggtacccacttagccatgtagatttagagaaatagaaaaaccaaactgccttggtggactggatttggccaatatctgataggaagatgtaatataaagaagggggatcaaatcctgcccttaaggtagacagaatctgtcaaggctttagagtgtaccatcaaagagttaacagccaacagaacaaaatttagcatcatcacaattttggaagtttttcaacagccctatgatttataaactgtcaatcactatttttacatataaatcatttccagtggtagtaaatgtgctaatrttctcgatatatgtgaaaaatatcacttaaaattttttcttggaagaagcacttaataatttgtaaatcagaaacaaattatatgtactttctaagtagattagtgtatttctcatacatagatgatggcatagatttgcttttttagtaaattgtcagatatcagactctaacttatggaacaaatgaatataagtaaactcactcccatttgattgttttgtaaatgaaaaatgtaatattaaatttgtgagatgaatgtgtatgtagtaaatacattaataaaaatgtgtagatcattagtaattttttaatcttctttatactagaattatgtctgcctaacaattacttaaatatttgaacttttaatttattatcacaattttctaagtcactatgtatgaaacatcatgattgtatttaacttgacaatataaaarttagtcaagaaaatatagttgttccatttacttcagtcttctaatagttctcattacttaacttgtcctcatttccttattagccatagggaaggcatttgactaggtgatctcaatgtttttagaattctaacagatatgctatcatttcaatttcactcatagaacaaggtacatacttttttaaaacttttaagttcaggcgtacatgttccggtttgttgcatatgtaaacttgtgtcatgggggtttgttttacagattatttcatcacacaggtgttaagcctaatacccattagtgattttttcttctcctccctccaccctctaaaaagcctcagtgtgtgttgttgccctctatgtgtccacgtgttctcatcattaggctcccttgtctatatagttctatggaaatttgatgacaggaaatcagataccttagtaccaatattcacctatatagtgggtagtccagaatgaccttctcggtaagactctgaggatcaaatattgaaaactttggtaacagcatatgaggatgaaaatggttcaacagaaaacacactgttgaaataataagtgattcaccatttattatttaaaaagtcaaaaataaaatctaacttctttacatttatcttccagtcctagggaaaatataataaactaaaagaggttgacattttattatacatagtcacattctttatggccagaaacaaactatctttatttcaagtgtagttacctttcacaaaattttttttcaataattttctgggttgtctgtctcctaattcaatcattacacctacccttcctcctaatgtatagatgttgcaaatgcaactgaaaaatgacagctcattttcatgatgatctcctgcattttctatgggagtaaatcctcggtctttatcatggagtgttggtaacacatttcatgatggagtgtggcctgtccttcctctattcaagcaccatcaccaccccactccctgctgccttggatactatgccttatcatactcagtgacttcaycatttctctaagagaacaagttctggcatgcatcctgcttcttttgtgggggagggtggtaatgggaaatgggtgacacacaactatctttatccacagtgttctctatttgtccacrtgacaatattgtattaattcttcaagtctcaagacacataccacatcttaatgtgtagccttcacttattgccccagaggacttggtgcatcttcctctgtgatctgaaaccaattttaatgcagttttactgttgcaataatttgttatctagagaacactgcctgtttcattgcctcatattgtgcattgctcattttatttctaagacttacaatgcataatttttcaaaaaatcatctattcttaggtcatccacaaaccaaagcttttataactcatgatggatccaatggaatgtatgagagaatctatcatggaatccctagggtggggcttcctttattgcagatcaacgtgacaactttgctcacatgaaggctaagggggaagctgttagattggactcaaaaacaacataaattacagatttgctcaatgcattaaaggcagtcattaatggccctacacaaatgtaaattttttaacctcatagcatgtgttcatactttctcacatgaaggccaagggagcagcagtgactctgaatatgaacacagtgctgagtacatatattttttgtaacacttaaaggccatgatcaatacaccattgtgttgcaatgtgtttttttcgtttgttttaatggaaacatttgtcagaggttttaggatagtgcataagttctaaaatagccaaaaagtaaaataagaggaattactaaagatggtaacagaaggattataagaaagattgaggycaaagttgaagcagaaaaccataaatattattacagtactgactaattttcagcacacttatgttgtctttcagaatgagaactcatcaaatgttcatttttaaacattttttgtctatattgaaggtatacaaagtgatattatggaatacaaatacatatttaaaaggttaccataataaaacaaataaacatattcatgatctcatattagttattcatttcttttgtttttaaagctttcctaagatgatttattttcagtaatcagcatgacaatcaatctctaattcccattatatttaatgttctccagatttttacactacattttgatcccatcactgataatttgtaaacarctagagctttcaaatttgccttcaaaaattattgaaaagaggagatattagtataaatgtagccatttatttgttcttacagtggtggttgatttgcttattttgaagaattataaaatcaaaaaataattgacttgaaagatataagttggaatatttctgtttaataaccaaaatgtattaaamcagaaatatgtagtttaaaaattattttagtgcatacattaatttcagttatgctattactattatattagtaatagcaataatttttaataagcataatgctggtattgaaaaatgaagataacttttaattagttgatacatattgaatgtgtatgacacacattgtcttggttmtttgtrttatgtaacccaattgtatgaaaaaatatatcagaattagtgccctcttctgaaaaacacagttctccaactgtgtttttttaaataacaaggggagaagttacctccattrctattgctacagtgccatactttagcactttttggttttgacttggtaagcgagatacttatatgcatccttattctttgtctattagtccataattatttcaaaactagaaacaaatggaactacaatgcctcaaagtaaaatactgaaagccacttagattctaaaatcacaatacaagaaaaatagtaataacagtgaacatttactgacaatcactttatgacaagaataattctaccaagtattctaagaatcattacattactactcacaaaaatcaggcaagaaagatacgattcttagtcattcaatttaacaataaaaaaacttgkaacagatactttaaaaaaaaaaaaaaaggaccggtagatatcaggttaggattcaaactaaggccatccactttcatacttttaaccatgaatccattgatgtaatgttaataccaactcttggtcagcgccaacttcttatgagctttgccctgacatgtacctgaccttgtcagatttgtctgctatctctagactttgatattattttgaaacttgtatgccaggtccattaaatttttttttccctggataattcaatctctgtactctcaattgattttttttaaccctttggacttatctgatttcaatttctaggctacaaacacttgttctctcttaaattatctcttcacatcttgaaatcttatgcatgaaacaaattctagcccataaaacaaaatctctataaccactatgaaataaaatattttatttttcatccacttttatgtggcactcatttttaacatctacacaaaaatttcacatatttatcttttctggttcattatataagttgatgtctatttgattttcctttagctgtaaaaaaaaaatgtwatgtagttatcaatcatttattatgatcagtctctgaagccattggaccaaaaactctcctggattgagtttgtcatgcaccacaatggagccacctaccaacagtctcacctggttccagtactgctctatggatgtgctggactgcatggcaattgttactctctttgtcataatatgttgcttgattatcaaaagttgttaaggcgagaaagaaagaaaagagagtacatctttttgagatctaaggcaggcaggcatgatacagaaaatcatgccatttaatgtcaccactatgtatcaaggtatggagtaaattctttactacatttttcaagacctgtgccttcttgatttgtttgaaatttttaatctttgttaaacattatgtaaggtacaattttaatttcagaaaacctgtaataattcaattttaatgcttatctacgtatattttttaaactgaaaataaaatgagattcactagaaactcagtctgtttacttgagaaaggcagaaagattagctatactgtgcatttcaaaaaaacctcttcttttatatatatatttatataatatatcataaatttatatattttatatattatacttttatatataataaatatacttatatattgtatttttattgttttatttcaacttttatttcaagttcggaagcacatgtgcaaaatgtgcacgtttgttacctagataaagaaccctcttccatataaacaaatacaattatatggaatatatgtgtccctgtcagaaaaaaaaaaaagaaaaacagagcaagatccttgttaaaaattgcaagacaaattttattttgactactgaagtaggggacagacactacagtatgaactgagctcaactccaactaagacaaaggtaactgagacttttaaagaaaatccatttatgaataaaaaggaaatatgaggaaataaaaataaggaaaccaaaaacagagtagtgggctacatggwaatagaaaattacataaaaattaagtgtaaaatgattattagacaaggtgagttagacagggtaattttgcaatttggcaggatcacattttattgagcaaagcctcagcatgaaggctagggtcaccttctaggacaaatccatgacatagtgcacatataagctggactaaacttggccaactctcttagcgtggygtttaggcaagttcttcatgttaaatagatgtttccaattcatatccttcatgaaatacaaaatattttctcttgaaaattttctttgtttcaaaastctagatggtcataactggcttcctgtgtaaaactatgcaamctagtaaaatctttggttagaaagactaaagatgttttccacatgaggccttgaatacacttgagttactatttttgctttagtaatgaccatttgtaattggatggtaatacacaaaagaaaagaagaggctagttccctctagttaggaattatagatatggtccagcaagtttagtccagtccctctagattataatgttacatgatttctctcytgaaatatgatctcacctttcttgccctcaccttgtcaagtatgatatttccaaccactttaatayctggaatactgaggatatacaaactagaaatgtatactattattttrattattctctcctcgtaacatattgaaaactaaattgtaggtggaataaagagccaaataccatgtgcaacagtttttaaaatctatgctggagaaaacatagtaaatggcaaaagctctccaatacctacattcaaatattgttcattacagcctttggactcagaacaaggtttgaaaagcaaataacagagaagaagggaacaaacttaagagctgttcttccatctgacaagagatgtgtctaaaacagttgaatgaaagagaggcataatgattatttctcacacatgaaatagatttttatagtactcttctctatgagaaaatattgtagcaataattgataataaaatgaattattataatgtctagaaaagagatatacactaaatattttactttactaaactttgaacacatagtcttgccactagaaagaaacaaatagccaagtacaagaaaaaaagtgtaacgtattagtactttttatagtaatgtcttctttataaaaggggaaaacttatagacaaatattagtctggggaaattatgtagctcaacatgtactacacaaactaaattttagtctatttatatttttttatgaaacaacttctgaaaatgcatcaaggaccttgccaaaatagatcttctttgcaattcatagaccatatagctagataaaataatctttgtctattcatgagctatcaaagaatactttcatttgttttaatattgagaaatcttttcacataaagtaccatgtacacatatagttaggaaagtatgtgaatatgaaggtttacttgatagagactcataaaatcacatagtatattaaattccaaaaatttcaatattgtgcatgtgtctgtttctttgagattgattctaaaagcttttaaatatctcagcagttaacaaaatttaaacacagaaactctaagtagtcacatggaatcactgaattgaaataacattcttcatcctcatgraaatctttttctataaaattttgaatatgctgcttaaagactggaatatgaagcactacagaagttggagayraaaatgaaataattgtgaatttaatgatgaaaataacatatgaagctgagtctatcgatgtcaaggacaaatgctttatgtataagttttctgaattaatatctatgcagaatgcaatgtttcttaaaagataaaacaaatatgctaattaaaagtttccttcttatattcttgaagtatattctttaatagtcttaaatatattctttaacatacaaattcttaaaacccaataataattgtaaaaattactgaataacagtaaagagcagggtcttgggggggttgtgtcttctggcatctaccacctcacaaccactccagtgttctttattgatgaagcttaacattcaactagctggcaaaggaggaatatttacaggatcctgattcagtatcataaagttatatttgcacccaggggacaataaattgaaaacttgtaaagcataaaatttcaattttttcatttgttatcattataaaagttgtgttccttcagacactgaatcttggcaaaatttggatgagtaggagacatggctttcttttgaaaataacatttttgawagtgggggaatgtagaggttctgagaaagatgagcttagagttggcccactgsgttctccacctccctggtggtcacttccctaatgtccaaatatataataagaattgacatactagcgggttggatttttgatttcagtagtagctagctcagacttggttagagggagttttgtgatgctgagcccatgaatacccttagcctatcaccactctattcatactcccaacaaatcaacactggagtagccaggtacttgatgctttacccaaaaatggatattaactttcaccaattcaaagcatatcaagatgtctcattgagttcattgcaagttcctaattattagtctgattaatcactttttggatttatgatccagtgagaattttgttcatgtcctgcastgattttttcaagttacatttttctatagattcttcttggtatagagrctttatttaaggatgaatttgtttttcataaaagatctagaatcctgattcatcatgacagtggctcagagtgattggcaaaaaacaaggttgataaaggtcagataaacaagtaaaaattaatgaataatcctcggtcaaataaggtgaactttgcagttggattaatccaccataatgaggacatgcaggttgcaagagttaagtcagaatgaaatacacttgagacaaacacattgaataggtcataaatgcttggacaaatcatataatgagtagctaagatcaagaaaacaactagaaacaagagagctttggaaaaaaacaggtaatcaggaaatttctaatgtaaggtgttaacaagcaatgcttttaggttttaatctgtttactgacaatttctagagcattagataattcctcttttgggctctatcagtcaagcatttggtttcattttatttcatgtaatcaaccttcatttcatatataattagggagcccatttctgatttcagaaatatctgattatttttgtattcatccttctcacctcatcccattcttgttttatattagtgactcttccatctctgaacatttgaatcatacttatttaaaaatctcattttgtctaggcatggtgkttcacatctgtagtcccaacactttgggatgttgaaatgggaggattgactccaggagtttgagataagcctggataacrtaatgagagctcatcactaccaaaaattaaaatactagttgggtgtggtgtcatgcacctgtggtcccagccacttgggggactgaggtgagagaatcacttgagcttcagaggttgaggctcaagtgagttgtgatcataccactgcactccagcctggacagcagagtgagagagtcacttgaccttggtaggttgaggctgcagtgagccctgaacacaccactgcatttcgttcagcctggacgatggaataacaccttatcttaaatatatatatatatatataaattaaaaatcaaagtctcattctgattgtttcccctatttatgatccttgggtgaaaatcttccaactgcgtgtcactggttatttcctcatatggttttcttgaggaaatcttcaacatgtgttgatttctgcaacatccctcatattctctaatgtaagagaatcccttcacaatatttaaaattgcctctgctgtagtctagggagatctccagttacacacacattttattattattattttttaacaaaagtcactgcactctgtaaatttttgttccttgcttcaaggtactatgtctcatttggtttcctcccaaaagtcactttttcatagttttcacaagcatctattcatagaattcgttccaattttaacaactggtggacattcttccttcattttatactaggctgtatatgtcttttgacatcattttttaatgcatgtatatgtgtctggagcagaagtgggaaaaagttgagtcgcttatgatcacctcactatactatgttgtttaatttatttgaggctagtttttaggacacctatttcatatatgaaaatctttgagtaaatattttaaaatgcttaatgaatgtttcagtagttgtaaaaatataaattcacacaatttttaggattttattgtgtttttaatgtccatatgtaatgaatttcatagttgcttagaggcttctgttgannnnnnnnnnnnnnnnnnnnccccttgaaatgtggcaaggcttgtggcttgcttagcaaataaattatactgaaagtgacagcataattttgaagactgtgttagaaaaggcagtacattatctctgtctctgtttgtctgtctgtctgtctctgtcttctacttataccttttcctctctttctctctccttctccctctttccctttttctccctctaaacactttggagcccagtgtcacacacaaagtcctgatgataaaggacaatttcaaggagagatgcaaagaggagactaaagtcatgattattcagtctcacaggaatttgagtcttttgacatcaatcaccaagtatgtaaataaatgaccttcagatgattacatccccagccaccatatgaaagtatcagcctgagaaatactgtgtatgaaccacctgactgaggctacccaacactcaggctatgggagttgtaataaaacgcttgctgtttttcaaaatccccacaattgagggtagtttgttataaagtgataaataactacaaggatatttctttattgtattatgtttattatactttaagttctgggctacatgtgcaaaatgtgcaggattgctacataggtatacatgtaccattgtggtttgctgcacccatcaacctgtcacctatattaggtatttctcctaatgctattccrcccctagccccccwccccatracaggccccactgtgtgatgttcccctccctgtgtccatgtgttctcactgttcagctcccacttatgtgtgagaacatgcggtgttagattttctgttcttgtgatagtttgctgagaatgatggtttccagcttcatccatgtccctgcaaaggacatgtactcatccttttttatgtgtgcrtagtattctatgatatatatgtgccacattttctttatccaatctatcactgatggacatttgggttggttccaagtctttgctattgtgaacagtgccacaataaacatatrtgtgcatgtgtctttataatagaatgatgtattttaatcatttgggtatatgcccagcaatgggaatgctgagtcaaatggtatttctagttctagatccttgaagaatcactacactgtcttccacaatggttgaactaatttacactctcaccaacagtgtaaaagcattcctatttctccacatcctctccaacatcagttgttttgtgactttttaatgatcaccattctaactggcgtgagatggtatttcattgtggttttaatttgcattgctctaatgatgagtgataatgagctttttttcatatgtttgttggctatgtacatgtcttcttttgagaagtgtctgttcatatccttcacccactttttgatagggttgtttgattttttctggtaaatttgtttaagtcctttgtagattctggatattagccctttgtcagatggacagattaaaaaaatttttcccattctgtaggttgcctcttcactctgatgatagtttattttgctgtgcagaagctctttagtttaattagatcccatttgtgtattttggcttttgttgccattgcttttggtgttttagtcatgaagtctttgcccatgcctatgtcctaaatagtattgcctaggttttcttctaggatttttatgattttaggtcttatgtgtaagtctttagtccatcttgagttaattttgtataaggtgtaaggaagggttccagttcagttttctgcatrtggctagccagttttcccagcaccatttattaaatagggaatgctttcctcattgcttgtttttgtcagttttgtcaaagatcaggtggttktatatgtgtggtgttatttctgaggtctctgttctgttccattggtctatatatctgttttggtaccagtaccatgctgttttggttactgtacccttgtagtatggtttgaagtcaggcagcatgatacctccagctttggtctttttgcttaggtttgtcttggctctgcaggctcttttttggttccatatgaagtttaaagtattttttttttccaattttgggaagaaagtcaatgatagcttgatggcaatagcattgaatttataaattacttttgtcagtatggccattttcacgatattgattcttcctatccatgagcatgggatgtttttccatttatttgtgtcctgtcttattttcttaagccgtggtttgtagatctccttgaagaggtcattcacatcccttgtaagttgtattcataggtattttattctctttgtgtcaattgggaatgggagttcactcatgatttggctctctttttttttattggtgtataggaatgcttgtgatttttgcacattgacttcgtatcctgagactttgcagaagttgcttatcagcttaaggagatttggggctgagacagtggggtttttcttaacatataatcatgtcatctgcagagacaatttgacttcctcttttcctatttgaatactttttatttctttatcttgccagatttccctagccagaacctccaatactatgttgaatagaagtggkgagagagggcatccttgccttgtgccaattttcaaagggaatgcttccagcttttgcccattcagtatgatatgggctgtgggtttgtcataagaagctcttattattttgagatatgttccatcaatacctagcttattgagagtttttagcatgaagtgatgttgaattttgtcaatggccctttctggatctattgagacaatcatgttttttttggtttgttttttgttttttttcattggttctttttatgtcatggattcctttttttgatttttgcatgttgaaccagtcttgcatcacaaatatgaagctgacttgatcatggtggataagctttttgatgtgctgctggatttgttttgccagcattttatttaggattttcaaatccatcttcatcaggcatattcgcctgaaattttcttttcttgttgtggttctgccaggttttggtatcaggatgatgctagcctcataaaatgagttagggaggactccctctttttctatgtttggaatagtttcagaaggaatggtaccatctcctctttgtacctctggtagaattcagctgtgaatccatctggtcctggactttttttggttggtaggctattaattactgcctcaatttcagaacttgttttttctttctcctttcttgatgcttttaggggtttaattatggaataagatgaattcagttgactatctttgattctagtccactcctgggtttagaggagccccttctgattactttctccatgactgtgtgtattttgttaaatgttctggccatgggtcttcctcaggtaggagccatagttggcacacaaaaccatacctttgacctatcagccctaatctgctgtttttgtgcttcctgaagttcagatgaaagtgagaacgctaggtgggttggaagctcttgcagatgtgatccatctggctatggaaggtggggacaagtgaagttatttgccatgctgttggtgtgttactggggcaataggagtctgcaccgcctggtgacaagtggcagtggtgggtggaatgtcacacatcctgccatacttggggtttcctggggataannnnnnnnnnnnnnnnnnnnnnnnnnnnnnnnnnnnnnnnnnnnnnnnnnnnnnnnnnnnnnnnnnnnnnnnnntgctctgctgttcaggtgtttcctggggacaatagggaagctgagccctccagctgagttcacacaaaaagggaggccacttggctgtaagctctagcaagcgttgcccatctggctaacagcagcagaatgggtgaggttttgtgccatgccatcagggtgtttcctgggacaacaggaagctgcacccttctgctgcattcagacagaagtgagactgctgggccggaagctctagcaaggatgatagcaatacaagttgattcttaattaattaaagcacattgagaagctgatccaaaaagacaaacactattaaatctctcagactttaaaaatacagtcatattcmaggagttaaagggtccagctcaccaacatggcacatgtatacatacgtaacaaacctgyacgttgtgcacatgtaccctagaacttaaagtataataaaaaatatatatatacatagtcatattcatttttcacaacatagcatattgtgacaggtctttcttgatttactaagtttacttattatcctgtgaagtatattttcatacctgaattttacctagcttcagccttccattaacgttgcattcattcttaacatttgtaaaccaccatattttctagaaattggtgactatattctaaaatcattgtagtcacgaaatcatatgaatacctgcttggcctctccggatagggtcaagtttctcacataagcaaaatttacttatttggcatatacaatgtgaacataatcttaaaacctgactttggcttttggtgttattaataaggttcttaatccaatttttgttttttttttacagaagtgatacagctatactgtaatcctagcattcctgagttttgtatatagcttggaaataatatttattgtcaaatatttttaaatacttcactttcttctaatatatttattaaccttagcatctttttttgcattttttccctgtgaagtgtcattcactctatcaattactatcagaaaatctgttatcatcttgcctatttatgcaaagcaaatgattctccaactgttgactctaatccttcctctcaaataggttctgctaaataaatgaccctgagtctctgagacatttgttgtatcaaagcacaacaacattaacagtaaaacaaaaaatattgtgaaatatgaaatatctgatcctttctccctctctcaaaaattctgtctgccaggtgtggtggctcacrcctgtaatcccagcactttgggatgacaagatgtttggatcacctgaggtcaggagtttgagaccagactggacaatgcggtaaaactccgtccctgctaaaaatacaaaaattagccaggcatggtagcacatgcctgcaatcycagctactcaggagactaaggcacaagaattgcatgaaccaagaaggcagaagttgcagtgagctgagatcgcagcactrcactctggcctgggcaacagagcaagactccgtctcaaaaaaaaaaaaaagaaaatctatcaatgactatacttccaaatttgcttgtggttctcttcttagcaaaatgagackattaaaattgatcagggttttaaatagyattcctttgactcgctaagcacctattgaaaagtctcagctgaagcatagcttcatctgaaaaaaattaaatgcaattgactttctgtactaaacattcttctttacacactcctcaccatggaatatctctaatggagccctttctttaatatagaaataaatgcgattcaacttatttaaatataaacgtgagctacttgagcataggaactacatcacattctcttttattctctacataccattaatgagtggattaggtaagtgytgtaaattgtkcattaaatgtgtaacataaaaaaaacacagaagcatagatagctgagtagatagataaattattatctaattcatatcttgaaactctatcactttacccaacaatgagtctccaaggaagttataattatttacatagagaaatattattactaaattaatcactgaagaaaaacaarttgcagaaagattgtaattttcccaaatgtaacattcattttttgtatcatattttacctaatggcattatcartgttttgaccattcaggtagaaaccatatcagtgtctttgttgatacaacactttcagcatcagatgtagtcagtaatcacaaattcaaattatattcctcacatttactattatcaatgcaagccacagccctataatctcatacttggtttcctaatatacacttgtaattatttttcctacatttacactcttctgtttacttgccaatctttgtttagctgtcagagtggcttgctaaagaaacaaaacaaaaatgaccttttgactggctttccttaaaactagattaaattattttgcctgtaarttaaaatagaaacctgtatacatcacacaaagctacacaagacctccaatttcaaccaaaatttttcttttataatctctggtatacaatttactcaaaaattcatacttgtgggaataatttccaaacatcaggacttctctccttctgtgatttgtttcctttagccactctgtctagaktctaccaaagctttcatctcaccgtattatgtgatctgtcacaccagctttttctgattgctccrtagatggataatggttttctctgggcttctgatcatattgcaccatttacatcacacatcataatattcttcagagaacaagcataccttattttattgcactttgttttattatggtttacacatatttagktttttttgtttcttttttacacaaattgtatgcttgtggcaattgcacatcatgcaagtctactgacataatttttaaaatggcaagtaacaaatttatatctctgtgacccattttgctaattttcacaaaatttcaagstttttcgctactattatatctgtcctggtgatctgtgattggtgatttttcatattactgttgtaattggtttgcggcatcacaaattatgcccatataagatgtccaacttaataaatgggtgtctcctgagtgccctacataccagttgtttcctagtctctctcccacacctcaggcctatttcctgagacacaacaacattgaaattaagccagttaataaacttacgaaggtccctaagtagaagggagagtaccacatctttcactttaaatcaaaagctagaaataattaaggaacatgaggaaggcatgttaaaagctcagaaagacttaaagttaagcctcttgcatcaaatagccaagttgtgaattaaaaaaaaaacaaaaaagataaaacaaagttcacgaaggaaattagaagtgttactccagtgaatgcccaaatggtaaaaaagtaaaaccgcattatcattcatgtgaagaagttttaatctggatatatcaaaccagccacaatcacgccttaaccctaaccctaatccagagcaagaccctacctctttttaatctatgaaggctgaaatacatgagggagccaaagagaaaaatgtggaaagctagcagacattggctcatgaggctgagaaaaaaataaatctatctctataacaaagaagtacaaagtaaagtagcaagtgccaatgtagaagctgcaggaaattatctagacaacctagctaagatcattgatgatggtgattacactaaacaacagaatttgaatgttgacaaaacggtcctttattgaaaaaatatgtcatctgagactttgatagctaaagaggggaagtcaatgcctggctttagagcattaaaagacaggctgactctttcgttagtggctaattcagctggtgagtttagttgaagccaatgttcatttattattttgaaagttctagagtccttgagaattatgagttgagagcccttgagaatctrctttgcctgtgtactataaatagaaaaacaatgcctagatgacagcacatattttaaaagcatgactcactgaatattttaagctgactgttgagatctactcctcagaaaataaaatttatttcaaaatattactgcttaatgaaaatgcacatggacacccaaaagttctgataggaatgtacaaagagattaatgttgttttcatgcccaccaacattgcatctattctgcagcccactaataaaggtgtwaatttactttcaagttttatcatttaagaaatacattttataatgctattgttgtcttagattgtgatttctgtgattaatatgggcagagtaaattgtaaaccttctgtaaataatttagtgtattagaaacatttctatttgaaatatttctgattcataggagcaggtcaacgtataaatattaacaggagtttggaagaacttgattccaatcctcatggatgactttgaggagttcaagactttataactacagatgtgttttattccatttctttcatcaatgttttatcatttttattgtaaagatcttatattttcatggctaaayctattcctacacaatttcatttttgtarctttgtaaatgtgatttattttctttgccttttttaaacatttagatattggaatacggaaacacaactgatttttgggtgatgatttagtatcttctgcctttactggatttgttgatcaattttaagagcttttgatggagtctttaggattttctgtgtataaaatcatgtcatatgcagagagggataatttgattttctcccttccagtggatgacctttcttttttctcttggctacttgctctggctagaaattctaatgatatattgaataagagtggtcaacgtggacatctttgtcttgttccagatcttagagacaaagctttccaactttccttttttactctgatgttacctgtgcatttgtcatatatggcctttataagtttgaagtgtttttagtatacttgttgaaagttgaaagttttcatcatgaagaaatgtaaattttatcaaatgctttttgtgcatctactgataaaattatatgttttttcttaattctcttgatataatatatcacatttattgttttgcatatgcttaaccttctctgtatccctgggataaatcccagttcctcatcatgtataatctttttgatgtgttgttggatttggttggctagaagttgagtatttttgcgtctatgttcatcaggattattggtctataaattttctctctctctctctctctctctctctctctagctccttctttctggttttactatcaaggtaatcatactcttgacaaatcatttttaaagcatttacttctctttaatgttttggaaaaaatatttgggaaaaaatggattaattttttaattatactttaagttcttggatacatgtgcagaacatgcaggtttgatacataggtatacatgttccatggtggtttgctgcacccatcaaccagtctcctaggttttaagccacacacgaattaggtatttgtcctaatgctctccctcctctttccccccaacccacgacaggccccagtgtgtgatgtatccctccatgtgtccatgtgttctcattgttcatcttgcacttagcagtgaaaacatgaagtgtttggttttctgttcctgtgttagtttgctgagaatgatggtttccagcttggtctgtgtccctacaaagggcatgaactcattctttcttataaatgcatagtatttcatggtatatattgccacattttctttrtccagtctatcattgatgggcattggttgggttggttctaaatccttgctattgtgaataatgctgcaataaamatacttgtgcatgtgtctttaaaatagtatgacttgtaatcctttgggtagatgcccagtaatgggattgctggatcaaatggtatttatagttctagatccttgaagaatcgccacactgtcttccacaacagttgaactaatttacactcccagcaacagtgtaaaagcattcctatttctccacatcctctccagcatcagttgtttcctcactttttaatgactgcaattctaactggtgggagatggtatctcattttggttttgatttgcatttctctaatgataatgatgacgagctttttttcatgtttgttggctgcataaatgtcttttgagaagtgtctgttcatatcctttacccactttttgatggggttgtttgtttttgtcttgtaaatttgtttaactgttttgtagattctggatattagccctttgtcagagggatagattgcaaaaattttctccctttctgtaggtttcctgttcagtctgatgatagtttattttactcagcagaagctctttagyttaattagatcccatttgtcaattttgactttgttgcaattgcttttggtgctttagtcatgaagtatttgtcyatgcctatgtcctgaatggcattgcctaggttttctcctagggtttttatggttttaggtttcacatataagtctttaatccatcttgagttagtactgaaactatcagttcatggttttttgtttttgtttttgttttgtgagttcttattactgcttcagtcttgttactcattatttccctgttcatgtttctatttatttttaattcaatcctggttggtggtatgtgtccaaaaactttccttatcctttagattttttaatttgttggcatgaacttgtttataataatatcttataatccattgtatttctgtgtatcagttgttatgtatccttttcatctctcattttatttgagtcatctctttttgtagttaacttagctgaagctttttaaattttacgtattcaataaaccgttttgtcttgttgatttttaaatattttaaaaatctctattttttctctataatctttrttatatcccttttctactattttttagtttagtttctgttttcagatttcttgaggtactataggttgtttatttaagatatttctgcatttttaatgaagacatttattggcatatatttgttgttttagaacttattttttctatatcttctaggttttgttatattgtctttccatttttatttttgtcatatattttaaaataatttatctatggactcaatggttgtttatgagcacatttaatttatgtatagttgtacatgttcccatattctttcttttattgatttctagttttattccattgtggaaaaaaattgacaccattttgattttaaaaaaatttaagacttattttgacctaaaatatggtctattctagaagatgtttcatgtgctattgagaagattacatactctgcagctgttggatggaatgttctgtaaatgtccgtgttaggtttatcttacctagagtgcagtttaactctgaggttttttcattgattttctgtctgaattatatttttattattgtaagtaaagtgctgcactcttctactawtatcatatcacagtcaatctctctcttcagctctataaattttgctttatatatttggatgttccagtgttatgaccatatatatttacaattttattctgttgctctatggagctcttgattattatacaatggccaacttcttatcaatcctgacttaaaatatattttaactaagtatagctactactgtattttttttattgtttacaatgacatgaaacaaatttttctatttcttttcttttagtctgtgtacaccttcataggtgaagtgagtttcctgtggcaamaatacagttgagttttaattatttatccattcagtcactctatgtcttttacttggatcattcaatcaatttcatttgtaatattactaatagataaagatttactacctccattttgttaattgttttctaggttagtttctgtatatcctttctctctcgctctgtctctctttctctctctctctctctgtctctctctctctgtgtcttcctttctctctcactctgtctctctctctctgtctctctctctctgtgtcttcctttatggttaagtaattttctctagtaatatgttttgattccatgccatttgtgtttgttgtgtctaagtttggcttcttagttaatgaaagatttacaaaaatattttattgttagatatttaaaactggtgacaactttgagcacaaagaaaaataaacagaactctgtattttgacataattttgtcttccacatattgactttttsatgtctcaatttatatcttttcwtatttccatctcttaattgtagttatkattttctttaataactttgtctttttatcttcatgataaagatataaatggcttatataccacaattatagtattagagtattctgagtttgtctttataattggttttactactgctttttatgccttcagatgtattcttattacatgtgagtgtccttttctttccaataaaacaattctcctttgtattatttcttgtaagattggtctgatgtttatgaatgccttatcttttgtttcggaaaatgttatcactctttcaggtttgaagaattgcttyggtaggctcagtatttttgcatggcagatttttttcagcactttaaatgtatatcttattgtcttcttgctcacaagttgatttatttattttakttttttttgagaaatttgatgaaacttgaattgggacattgtttaatatggtataaaccttttcttatactgctatcaatattctttctttgtrtttgccttttaacaatttaaataggatgtgcctttgggaaatactcttcggattaaatttgattagggtacatggatactgtcatctttctctagatttacaaaatgttccatcattattttattatatatgctttctagactttttatttcttatctcctttaagaactcctattatatggaggtagttttcttaataatgtttgatactttccatatgcctacttcactaattttaattatttctctttttttgctcttctgattgggtaattacatatgttttatctttaggattgctgattccttactctgtttgaccaagtctgctgttgaagttttctactgagtttttcaattcacttcacatattttttattaattggatttctttttatttttaaaacatttccacttctttgcaaaatttatcatcattttcctggattattctctaaagtgtgtttttttcaactctctattcatatgtgctgtgatttctgaacttttaaaataggtgtgcactgaatttcttgtcaaaaattttacggagcatctgaaccttaattctgcactgtaacttaaaactagacttgcagtgatttctaggtctgtgagatacttaagcaataactggagcttaatctcaamtgttatacttgtttgcaggtcatagaaaagctccgtatgagtawctgggaattataaaaatacctgccaaagattcaggccttcctttggattttggcccctgcagtgttatggaactggtcagactcctcagcgtggcattcctgctaataggaacaccaagcagttgctgagatgtgtgtgcctgtcactgtgattagtacttccactcttgtttccaattcaccccaggtcattcaactctatagccactcctaatgcctctcctgaggtaggacaaaagtgggcttcccaaaccaaaaagattcacagatccatgaagaaactgaacattcacttcaaatttcctcctctgatcttggcaactgcaggtaaaataaagttctgtcacagtggtgtcttcttggtgtgtggaaggggtgccataatccaaaaaattattcattttacagatcatgagttttcccatgtctatgagtcttgggattttcttcttctctttttagctctggtgaattcagtgtggctttttgtatttacatagttactagctctatttttgtgtgggaattaatgttgggaggtgttatttcatcattttactgacatcactcctcaaggaatacttttatgagtttgcaaaccattatgattttagaattagctatctaccaaatattaaaagagctgtatatttatcatttaagtgttctgtataattatttgtgtacygtttctagtamataattactatgtattgaagctatgtgtttccaacacaaactttcttgtagagactggmagtacatggcagaatatagggacaatataactatacatatcacaacttcttcagatttttattaaagcataagtaaactatattattctacatgatattgcatctttatgatgcagaaattattttctttgtaggaaatgaaagcatttgtccagatctctggcaaagatggcactgtggtgttttctctggggccagttgtgcaaaaccttatagaagagaaggctgatctcattgcttcagacttggcccagattccacagaaggtgagtacaacgtccaatccttataagcagccatttacacagtgaagaaaatgtggctttccatttggaacttgaatctcattttctgctttgcattaacaggcactacttctacatagaataatttaaagcattatagtagtgtatgtgggctcaactaatcatttgcctatgaatgcttgaagttactttggaaatacttctctttgttgtcatttgtttgtgacaaaatgaaaataaaatattaagttcctatctcacattttgagattttaaatcttaagtcctgtgctgactactcaaaaacaacaaataaaaaaaccctgaagtgtactaactccaaggaacataaaaagggagggctgatattacaaagatagagaagaattatgcccaagaatatcctcaacatatttgattgtataggaactccattcagtgtacttgggtataaaagtagaagcttagattcacgtagtctttcttatgaattagacttttcaagaattaaaaggcaattacaattttgatattatagtctagtagtcagttaattttaactttcttgttattgcaattctagatttccactatttgggtagtactatttatgcactatccagtgactttttaaaaatgtaatgtttaattaaagttcataaaactcaataaaagcatgtatgctaattaggattgtgaaattagttttgcctattaaattggaatatctatgtattcctatgttttcaaatgcaagattttcacatagctttcccataaaaaacaaattatgtgacaaaaggcataaagacaaacaaaattcaacattgaacataaattctaagtaacttctttttcttttttaattaaaaataaattaatatataaaatcaaggagcaaaggagacatgaaaaaaagcagaaagtaaagacaactaactatccaaaaacaaacagcaaagtctaaagcaaagtttttctatgaggagaaaagcatggaaaagactcatccccatgattcaattacctccatcaagtccctcctacaacatgtgggaattgtggtagttatacttcaagatgagattttggcggggacacagataaaccatatcaggccattatgatcgcctgttttggttacaaacacacatttttaatagtctttctaattttaaggtcttgactttacatgccaatattagtcgacacagttgcttgctaaaggaaaatcttgatttcataactgtcattttttaaaagttgtgtaagtaaattttggtcatgtattaaaatccaaatccatagtatgacaattaagactgcctaaggtcttcattccaaattaactgtcttttttaatagcttgccctcaaatttctctgtgatccatacacattgggatgctcttcatatatccatgacctttactcattctgttctttattggaaaatcccttctttaccacacactgcctaggtccaatcaaagctttcatctcatatcatgttacctgcctaattaagtttttctaattatttcatgtagaagtacttgtgttttttctctggaactctaaacacatcctgtattactcatgtgattcatatcaaaatagtctttatattatagctattcaatgtattatcagctaattagtcggggtcnnnnnnnnnnnnnnnnnnnnnnnnnnnnnnnnnnnnnnnnnnnnnnnnnnnnnnnnnnnnnnnnnnnnnnnnnnnnnnnnnnnnnnnnnnnnnnnnnnnnnnnnnnntgtgtatgtttgtgttttgtgtgaattagaaactttaaagaatttgttttttttttctgtcattgaaaatatagattagtacagttatatttcatgtatttttattttttaaaggttggaacaaatttttctggatacataattttttgattgccgtaataaacatcaagtttcaaaataaagcgtggccattcatatttaatatttaatttttaacatctgtgtatatttatttcaattcggagccctgtaaactcttaatctctgtgagcagtgcgtctgggagcyaccatcacagtttctgagaagtgggcttcaagtattctgcacctgcagctctgctgtgctggttgtgcattctgtgggaaagtcctggttggccttgtgacatgagccattagcttaatgtcaaaaacattccagataaactcatagaaaggggccacaaagtaacaatgtttacttactacaggcttttctcattgactacaagaagccttcttcattgaacttcaaggaggtccatgtggcacatgacaaagataatcttgagaattcaaatgatgaattttttgacctagcttattattttcttttattttctatttgagacaaggtcttkctctgtcacccaggctgaagtgcartcatggcttgcttcagcctcgaactctcaggctcaagtgatcctccccaccaaagcctcccaagtagctaggactgtaggcacaccccagcacacctggtcaatttttttgtaaaatgtttgtactgagtaggtcttgttatgttacccaggctggtctcaaactcttggccttaaatgatcctctcatcttgcctcycaaagttctgggattacaggttgagccactatatttggcttgtagacccagttctcagtatctttcctggcttatcatctggtaatggaaggtaaaactaaatatattctttaattgaattgggtggaatttttaaaccactatgtgagtgttgtctacagtcaggcactcatgaagcagctgcaggaaatgaatcattacagagtaatggtttactgaccctataattttctctggggagctagtggctgagttgcttgcagtcccttttgtgctcacacttaggatgcaacagggagtgatgcttcaggaaacttctagctccaccttcctatgtacctgtgcacatcgtaggactaacagacagagtgacctttctggaaaaagtaaaatataaaatataaaaagtaaaatataaaacataaaatrtgaaaaatataagttttctttaccttttgtatccaggattatgactttcatttttggtaatcattttatagtgaggcattagataagtgtcttttattttaaatgagttatcaaaataaatagaagagagttaaatgaaatctatgtaaatataaataatacatttttatatagctatcctacatgcaaaactctaacagtgataccaatgaaagaataatcaaaatctaattgggaatagaagtaatacatttcttaaaatagttacactttctttagagtcagttaaccatttttcttgatacttgttaagagtcatgccaaaaacaatacccccaccccagaaaaaaaaaaaaaaacaatattaatactttggaagatttggaagacatatggtttgtcatacataatctccaaagcccacaggctggaattgctaagtcacccaaacagcaaagatggcggcccatatctctgtgagctctgtcccagggagttttcaaatctctgctggcctaagaacaatggtggaaatgactggagtcccctgttgggaggtcccacccagtgaggtggaacaggatctgcaacctacttgaagaagcagtctggccatgttttggtagagtagctgtgttgtgctggggaattccttccttctgtggtcgatttggatgctccaaagctcaaatgccagaacagctaagttgcacaaacagcaaagatggtggcccaccccacgcggctgagagttccattccagggaggcccaacactgctatcacggctggttgaaattccaagccagtggatcttatcctgtgaggtgctgtgaaaatggggcccgcagactgtcactgctcagccccctgaattcagcctcccactttgcaattctaaccttccactttgcaagagctacagctacttttgccaggaagccctgaaagccagagtatctaaaggcatcacgtctctacacgtgcctgagtggctgctctgctgagactccacatacctttgtgtgtcagactgaagacctggttaagtgggttcatgaggggatcttgtgacctgagggttacaaaaatctgtgaaagaagcatgttatttggggtagcacattcactcaccacttycctgggtgaggaaattttccttggttctgtgttgatgccaggttggcagtcatcctgccttacttttcttcattctctgtggatcaagttgtttccttaaatagtcccaatgcgagtgcccgyatgtttcagttgaaggggctgtatttactcaccccttctgttcatctttgtgagagccatgcatattacctacttccggtcagtcatcctggccactcctccagcttaaaatatttttagagtatatctcatattaagtgttttcactaatacaaggcatacttctgagatgttgcagatttggttctagaatactaaaataaagcaaatattgcaatgaagcaaatcacacaatttgttttggtttctttttttttttttttttttttttttttgagacggagtctcgctctgtcgcccaggctggagtgcagtggcgcgatctcggctcactgcaagctccgcctcccgggttcatgccattctcctgcctcagcctcccgagtagctgggactacaggcgcccgctaccacgcccggctaattttttgtattttttttttttttagtagagacggggtttcaccgtgttagccaggatggtctcgatctcctgacctcgtgatccgcccgcctcggcctcccaaagtgctgggattacaggcgtgagccaccgcgcccggccggtttctaaggcatataaaaagttatgtttacacaatgctatagcatattaagtctgcaataatattaagtctaaaaaaatacatgccttaatttaaaaacacttaattgctaaaaagtgctaatgatcatctgagtcttcagtcagtgcaacttttgttgatgaagattctcatatcaatgttgatggttgctaactcattttggtggtggccgctagtasttagcatggctgtggcaatttcttaaaaataagacaacaatggcatttgccacatacattaacccaccctttcacaaaagatatttttagcawgcaatgctgtcagatagcattttacccatagaagatcttctttcaaaattggaattaatcctctcaaactctaaygctgctttataaagtaagtttaagtaatattctaaatctcctgttgtcattcaacaatgttcataacatcttcaccaggagtagattccatctcaggaaacaagtttctttgcycytccaaaagtagtaactcctcacttatttgttttatcatgagatttcatcaattctgttacatcattaagttccacttctaattatagttatctttctagttttattatatttgcagttacttattccattaaagttttgttataggaccaacagtttcatatgcttactgtccaataatagtccaattacactgagacgtcagatttggcagcaaagaaggagtttaataattgcagggcactgagcaaggagataagaagrgaaccctaaatccagctcctcaaggagttctgggttggaggttttaaggagatcatagatggtgataggctggaaaatttgggtaattgattagtcagggtaatagggtaaagtcatcagaacaagaaactacattatttgctgagtcagttccttgtggggtcctctagatcagctggcatcagtgaagtctytcagatcagctgacatcagtgagatccttcagaccagccgagtcagtagttttagcagtatgctggacctgaaggaatacctcaaaaggaaagttgatcatttcataatgtttaagttaatatttatagaaggattaagaggaactatagtcttgtaacagggtctgcataattctaggacaacagccaaataactgtgaggaagtgagtcrgagaacaagctaacctaatgattaatgctgaatgtactacaagcttggtttacttttctctttttctttctttatctttgattactttaacaaagtttaaaaagatagtgtcatcttgaaactctcaatatcttacatgatggttgtaagaatcaacatgtatacgctatatcataaatgaacctttaaaatattatgttacataaaagaagccagtcacaaaataccacatattgtatgattctatgcattaaaaattgtccagaataggcaaatctatagagatagaaattcaattagcaattacctaggacaggggaaatgcagaaactaggggtggagagaaaaaggctaaggactatagggcttattttggggagataaaagggctctccaactgattgttatggtagatgcacaattctgtgaatatactatgaaacattaaattttacacaataattgataaatagtatgatatttaaattacatgtcaacaaagtttacaaaaatatgtggaccatgtttagtcatttaatctttagttttgtgtcaaatggactgcagaaacaagatctgtcactgctactgttctggacactcttctaaaatatattgcataagacagatggcatgtccatacaagatccttgatattagctgaaggatagcactcataaacataaaagggaaattaatcacatctgtgtgaacagatcatttaccttcatttgtctcyttgccatccacatgctcagactrttgatttaatgayattgtatgtactttgacttataagggttacattttaacttcttggctaatttatctttggacataaccatgagaaatgacagaaaggaacagcaactggaaaacaagcattgcattgcaccaggatgtctgtgaaatggacttcagtaattttgctaatacaactgagcttttgctttagctctgggaattgtggaaaggtgctggtgtgggcagcagaatacagccattggatgaatataaagacaatcctggatgagcttattcagagaggtcatgaggtgactgtactggcatcttcagcttccattctttttgatcccaacaactcatccgctcttaaaattgaaatttatcccacatctttaannnnnnnnnnnnnnnnnnnntggtcagaccttccaaaagatacattttggttatatttttcacaagtacaggaaatcatgtcaatatttggtgacataactagaaagttctgtaaagatgtagtttcaaataagaaatttatgaaaaaagtacaagagtcaagatttgacgtcatttttgcagatgctatttttccctgtagtgagctgctggctgagctatttaacataccctttgtgtacagtctcagcttctctcctggctacacttttgaaaagcatagtggaggatttattttccctccttcctacgtacctgttgttatgtcagaattaactgatcaaatgactttcatggagagggtaaaaaatatgatctatgtgctttactttgacttttggttcgaaatatttgacatgaagaagtgggatcagttttatagtgaagttctaggtaagtatttttttcaatcagtaacatgaagctctaacttatttgtgtctttgaagcagagcttatataaagccataaagtcagggtagtggggttttggtaagtgaatttataaaacaaaaatacaagatgatctattaatctcacaaatattatagaaaagcttaaattacagggtcagttaaaaccctgtggccatcmctcacacrgaacaccccaggaaatcataaacctatacattagtgcatctaagactttaagcaattacacatctgttttactatacattgttttacatcttaaaaacagtaaaatccatcaaataacttcttactgaatgcatagatttagaatgagtagttacacatttttctacaactatctatataactgcagaaattgttttttcttgtaaacttgttttcttatttagaaatcaaaagatgttcccatattaccagaaggtttccttcacagtaaagagagataatgtctatacctcagatgcaaaaatcaataagggcaatttgaagtttctaatgtttctatactctttcacgaaagaattggaaatcattaatttaaagtccaatcatcttgttgaagtgtgaaggttgttatatctacatagttttttgaaactatgtctctttattagaacatatgagacaaattaaggttgagtacaaatttttatttcaataatttctcaaaaatttctagctataatgtacaaatatatttacttaaaaatattattaagatcttagcttgaatctaaaagagtagttggtacaaggatttcagccatactctcaacatagtccacagttcacttgaaccaaagataaaagaattagcttaatgagttgtgtaaactagactatttcttagaaaattatttttatgggtagagtagaattaattgattatggagctcaaagagttgtttaaatgtccgtatgctactattgaagctttaagagaaaagaaattttctgtttaactttctatggctcattttaataattgtttatgattatgagcatactgatgcgacattagagatgtagcttaacctcacaattctcctactactttgtctttcttataaatayacatgggcaaaatatgtaatacataaaattaaattatatctatatatgaatatgtgtatatatttttcaaagcacagatatttgcctacatttttgcctacaytattctaacccctttcagaaatttacctraagtaattatcttgtgtcatccaccttttttttttctattcctgtcaggaagacccactacrttatctgagacaatggggaaagctgacgtatggcttattcgaaactcctggaattttcagtttccwyatccactcttaccaaatgttgattttgttggaggactccactgcaaacctgcmaaacccctgcctaaggtaaacatacttttgttggttttattttgttsgctttgaattttcagtagaaatgattctatagtcttctttcagagtgtttgacttacactgaaagaaagatgggaaatgggtrgggtaaagcagataccaattagaaactcatgtrcacgttaataccatcacacgtatatgagttttatgagtattacaaatagagaggaatactaaggagactttgaaaatagggttggttaaattaaagtcttcattatgcaatacctaagaaggtattggtcatccaatcaaataatatttacaaagggattagcacaaaacacaggtaagtgcagaattttcagagaaaaaaatagacacagtttctgtccccacataccttacattctacttcaaaagatagaatatgtgcaagtaataaaaattatataaaaactattatctgaaggaaaaacgcaataccaagaaagcatcagtggagataatagaaagtatcctgcagtcactgattagtaagatgagagctgaacaatatgcaggaataggtaaaagaatgacggggagagacagacaaaaaaaaaaaaaaaaaaaaagaagcaggtaaagtggtcaggacagttctcaagtcctcaagtttagtttgcagggagagactaagactcggatgatggtgagaggcaaattagagccagatacgtattaggagttgaaatatttattaagcacattgaaaaactactaaaaagattaagaaataaaaatatatgaaaagattctctttttaaaggagagctttcaagatattcaatggattaaattgcaggagggccagactgtaaagagccaaccattcaggaaattttgcaggattcaggtagcagatgatggaaaagtcgactagaaagttgatagaaatcattatgcccacatttacaaaaatagtggcaacttcatattgtgttgagtggaaaaatattaacacagacaaaacacttaaagtgtctctggaatatagtcagtgactcagaaatattattaattttgcaattatggctattttgttattattactaatactactaattacttaacatgtgcyggtcacttgagatatcattcttcatttaatagaaccagattgttcagtacatcaaaattatattctcttgcagagtcatagttgacagataccctgtggacttgattaaaagtagacatatcagttttgacagtaagatgagctacttgaaattctaaaattctaccataggtaataaggatcttcaccagtattgcagcgtaaaacacttcctcaacaatagaaatgtgttcctttaatatttgcagacaaacttagtgttcacttgatcttactaaagcatttaaatcattcttcattgagaccccagagatttacatattacagcataaacataccctatgagagcagatgatttttgccgtatgacaagcaacttattaaagcttcctgtgggaactcgtctcaacatcatagctgcctgacacagaagcacagagataatgaacaatgcatgtataataaagcacaaataatttataccacttgtatctgaatggcgcccttagtttagattccagrgaattctgtcagcatataagattatattttttatgaaggaacacaataaactcatatattttaaattaatatcacacttttaagacatatgtacaaagcaagcattctttgttacgttattatttaatctcttaaaagatcatttttgtctacataaaactgaaattttattccattgttaaaactcaatatctatgttgaatgaaaattgtatgggctttatatgataactttctcaagagacaaaagctgaggtaagactaatgaaaaatctatgccaccctaccctactcttgaaaaatttccccacccatactaagggaaaaactgatagtgtcagtaggagggggaagagaataggaggtgtagaaggacaagaaaagggatgactagyactaaaatagtgataattactactactagctgttgttattaacttgcagaaagatttgaatgcaagtcaatggttgtgaaacccgttcttcgtttattatgtaaaataattgctaacccaggttgctttcatttcarttaaatattaaattctaagataatttcttataagagaawaagacacttgacaaaatgtatcaggtgttttaaaaatgaatattgctatcagttttataatatgttcacgtgaaatcatacagagaaaaaaattaatcaaggtgtacctattaaacattatggaaaatattcataaaattaacattggaagtaatccaacatcttaaatgaaggaatgattaaaaacttatactatgtgcatacaatagcattacaataattttatcaatgaaatattcaactacactgtcagccatawtacaaataaagtgagttagaaaatgataaatataacaagatgacaagtttttgcaggaggaaaatgtatacayaataagattaaaattatctaaataagtgtcacatgtgtacattgagctatgtaaataggacaaaagccatgatgaaaaaatatattttacataaataatatcacaacataaaaattttagaaaaattttatttaaaaaaatttttttcatgcttttataaaatttcttacattaatcttatattatttttattatgttatcacagaagaagaaacaaccagtccatatcagtgatgaatctgtaaagaggctcgattccttcaacactgggtggataaataaggctctgggcatcaagctagtgagatgaaacactgaacaccagttacattaaatatggctacaggcaactgcaatcacacgcaatacctagatgccccaagtattacctggaatagcagtacaatgactctcatgttaagmttaaaaatcatattttaaaaaaacactctrtaatatgtggtctgcagagttaacatttggacttttttttctttgttttgtgaagaacagttaggaaaagttttaccccaatcattaaatctgaaagtatttaaatttaaacatcggcatatattggacaacgcaagtcagaataattctcaatcgattgcagccaagcacatcttcactaggaatgttacgtggtgtgtgtgagctactcaaaaaagagacaagatctcccctgcagaaaggcctggtggcctcttctrttctggtgcaagtgctgcctctgagacacaacaaagtgatgatgagagttcctcacatgcagttataaacagcacatcaatttaacagtgtgatttcagggaaaagttattccacctaaagaatcacctgaaaaatatgatcattcaactatgtaactatatacaattctgtatgataaatgagactcctggactaattcatagaaattccaaattacattaccagactccagaatgtcagcggttcttaaccaccagcttttatttattttattttttttagtttttgaaaaactaccagaaaactctgacaaactttaagtgaagtataaagcattgtagagaaacataaatgtagatataaaattatcccaactgtgagtagcttatcctcagagctcatagttagggaagtaaaccactaackgtttccaactaagagaattctacagaaaacctgcctgaaataaacacaagggatttagtagaacaacaatatagaattaaagctgagtggtcccactttccaagaacctatattagtaactttagtattgtaagagaagagtctgtgtataatatttttaacattatctccctgacaacaatgtaatagctccatttcttttctcccttacacacatgcacacaaatacatacacatacacacatatttacacaaatatccttaacagcatccacctatctcatattatacatctacttgcaaaaaaactgagtgattgggtcagttaaaaaatattatttactccaataattcctcaaaatactgggattttctctctttagtaatttgcaccaattcttttggtagtgcccgctgtgctaatactcttttgtgatgaagcaaattctttcttcacaggaaatggaagactttgtacagagctytggagaaaatggtgttgtggtgttttctctggggtcaatggtcagtaacatgacagaagaaagggccaacgtaattgcatcagccctggcccagatcccacaaaaggtaagatgaagtgccttactggtgtggaaaactactgaaagaggctgttaaagtttgaagtaatccaattatagaaacttytgataaatgtgaagttgaccaaaagttgaaaaattagaacaaggataatcttggagaaactatgagaagtttgaaaattgtggttgcattttttttttaaatggtgttaagtatgaacattcccctatgtaaatatgctgacaataaattgaatggagaaaggtatttaaaaagtgtttggagacttctcacctcctgtccataaaattttgaattgtgtatgtgatctacatagaaagaatattaaagagtagattgaactcttcatakctgaatatagccttaaatatgcttgtatagcatccaccgacagaagtaatagttgtgcctcagacttaggggttgcatgtggccctggaggagttactacccttggtatgcatgagtagttcctattagcatcagtgggaactcagtactccatatgtattcacaaaaggcaayttgagacccacagttatttttaatttctgatattaacactcatacatactgctgaatttaactcaatatatttcagttaagtgaaaatggtgcttaatgtagtctttagaatgactttcaggtgttttcacaaaaaacgtatatccagaactgtgtccttttagaaatacaagtaaaatttttgataattagcttcaaaacagttttcctaatctcagcagtatccaatgagtgaagaacacttgactgactcttgggtcacctctattacttattgtactctggaagctcttggtgaatgtttacgattatgggatgtagtatttctgtttgcactttaagtcaaatgcttgtataaaatacgtgacaacaaatggagaatattggctctgttagtagttatgcggtatattctctgtttaaggatctgtgctagtataacatgattgaatgttattaatttaggaataataaccaacacatgtgaggagtaggggactaaggagaatgaattccaatcctgtgattaaaagtgtaaactataggccaggcacggtagctcacgcctgtaatcccagtattttcggaggcygaggcaggcgaatcacgaggtcagaagttcaagaccagcttggccaacatggtgaaacccgtctctactgaaaatagaaaaaattacacaggcatgttggcacacacctgtgatcacagctactcgggaggctggggcaggagaatcacttgaacctgggaggcagaggttgcagtgagccaagatcacaccaatgcactccagcctgggcaaacccctctcaaaacaaatgtaaactgtagattctactgtagtatatttcaggatctagaagtcttatttttataaagatggagtctggaagatattgctaatgtattttacttcaacatagggaacaaactttttaagtatattaataaatattcccgtatggttagttttttacatttttaaaaataaactttatggatatgacaaattaaaaaaaagaaacttcctgcctaaaaatttagctgatgggaaagcaataattttctcagatattagttcaaaatcaaaaatatacattaacgatgctaaaataatacagagggtgtttttcattgataataaatttggcattaatagtatgatcaagaataaatttattcaagaaatgtaggtgaagttttggtattgccatgatattggggtcaggtaagagatatcaccaaattctgcccctgtcatttgacccttttgtttaagaattccttagggcactgtacacactacaggtgttatcagaaaaagttacattttaatgggtaacttcactaccacaataacaatagcaggtatttcaaaaagtctgacatgcatcatgcaatttagtcttggcatgtaatccagcctcttgtacttcctgtacattttggaagaggtgtatctgagtaatgttcagggtactattcagagacagaacagcctaggcggacagacaactatcccaagtacccacatagccagatagatttagagaaagagaaaaagcctgccctgctggactgcgcccagccaatgtctgaagcaggaagatgaaagggtggagatggatcctgccctgaaggtggaccctgtgcagtataaaatgtggccccacaaggactctgcactatcagattaacaactcctcccaatggaggaagcagaaggaaatatagaagggagtcaaacagaaggaggccaggcacagaaacaacttcagataccccctctataaaatatagtagaaatatattatcttttatatagaataagccagtgacctttgtgtatttgtcaattactttttaatttcctgcctgataaagctttcttgtaatgacctcttccaacttttgctgaaacctgagttactttaacactgatgtagcaaataaaagttaaacactgtaaattattgtttagtttatgaggattgcttgggagtttcaaaattagtaacttaaacataaaatgtcttggctatagcagaacatgttaatcactattgtcaaagctttgtagcacgttgtctcagtgttaataatcagttaaccaaattcagcaagatacaattttgagttttttcaacagctatgtttttattcatgacaccaacagattcttcatttctatgctgaaaaatatccaaaattagaaatactgataatactctgaatttgtgtcaaaaataaccacctgaaatttattttggaagtagtgcttgataatttataattccaatgaagttatacataaaacctttgcagcattaatctatttcttataagtagcttatttatggacttgttattttgtcaatcaaaggacaacaggctctaatataacaacctacacacaagtagatacatgtgaactacttcccaaattactcaaaaagatatgaatacattaaaattaaatttggaaaatgaaaactaatataaaatacataaaacaaaataagcacgcaggtcattacaaaattgttactattttttacactagaattataaggaatagctaaaatttttatacatttttagaatatttttaattttaaaaaattaaattaatttaacttttatttgtaacttttattttaagttcaaggggacatgtgtagtttttttacataggtaaacttgtgtcatggggggttattgtactgttcgtttcatcacccagatattaaggctaaaatcagttaattatttttcctgatcctcccaccctccaccctccaatacaccacagtgtatgttgttcctgtctatttgtccacatgttctcatctttcaccttccacttataagtgaggacatgccatatttatatttccatccckttgttagtttgctaaggataatggcctccagctccatccatatccctgcaaaatacataattttgttcttttttatgactgcataatattctgtagtgtatatgtaccatattttctctattcagcccataatcaatgggcatttaggttgattccatgtcgttgctattgtgaaaagtactgcarttaatacacctgtgcatgggtctttataaaagaaccatttatagtcygttggttatatacccagtaatgggattgctgggtttcatggtatttttacctctaggtttttgaggaatcgccagtcttccacaatggttgaacwaacttacattcccaccaacagattataagcaagccttttctatactacctcaccagtatcatgatattttttgagtttttaataatagccattctgactggtgtgagatgctatctcattatggttttgatttgcatttctctaatgatgttaagcttttttctttttttttttcatatgatggttggccacacgtaggttttcttttaaaaggtgtaacaattttttaaatgcttgaaattttcattgataatctgattttttctaaggtactattttggaaaatcatgatttccttatatacctaactaattataaaagttgagaaaattaatgtgagtattctatttacattagtctttrartagttcttatttactaacatcccttgatctcattcctactctttatacagttctcacattctataacttttgaattccactcatggaataaaatattttctttattgtaacaggttctgtggagatttgatgggaataaaccagataccttaggtctcaatactcggctstayaagtggataccccagaatgaccttctaggtaagactctggtgaacaaatactgaatatattagtaacagcacattagagtgttaatagttcwtcatgaaacaagcttattgaatatttgttaaggaaaaacaaaatgtaacttctttatattgattttccagtcttaagggagaaagaatacttataatttttggcattttatgatatacacccacattctttatagtctgaatcgggggaatctttatttcaggtgttattatatctcacaaaatttttcaatatcttcctgggctgtctctctgtctcctatttctacaactttacacctgtttttttcctctcccgcagggttatttgaaatgccactaaaaataatagctcttctatcaccagtgactctgtattttctgaagaattaaactgctaatcttaatcatacagtgatgatacatttcacgatgaagtgtgacctgtccttcctcaatcctagcaccaccaccaaaccactgcctgctgccttgcccaccccatatatcacactctgtgactgcacttaaaataagagttmacttcatgcctatctctttgctgtcttcttttttgcacatttttgaaatctagaatgcaatttttcattagcccaactggaaatcttgtattgttttgcagtctgaagtcacacrcaccgtatagccttcagttacataccsagtacaagtacgtgttttttcctcygaagtctgaaacacaattttaatttagttcartgttttagctrgaaarcactgtcactttcagagcctttcattgtgcatctcattttattcctatgartaattttgctaaaattcatccaatcctaggtcatccaaagaccagagcttttataactcatggtggagccartggmatctacgaggcaatctaccatgggatccctatggtgggsattccattgtttgcygatcaacctgataayattgctcacatgaaggccargggagcagctgttagagtggacttcaacacaatgtcgagtacagacttgctgaatgcattgmagagagtaattaatgatccttcgtgagtagaacaatatttttcactaggtggtatttacagatagcttctcttgtcaatagtgagtgtgagtttcatcctttttataagagactaattttgaaagaatttaaatgatttaaccaatctgaaatctgcttttatttttataagttatttaaaaattgaatttgaaacacatacatctaaagaatagccagttagtgaaacaattttctacacaaaaatawttttaaaaggatatagataatacaaaaaatacatttcttaaaaatttgacataattaatccatagaagaaaggaagaataaacctgaaataatataataaaatattttaattagatatctaaaacacctcagagtataaccattttcttgctgaaaaattaacttttattattatcattattgtaacagacttgaaaatgagatttaattttkatagcataaaacccccctgtttatgttataaaatccaaatatatttagtatgtttacagagccatgaagccatcactattacataattttagaacatttttatcaacacaaaagaaactgcaatgacacagaagtcacttcctatgaccgcttagccctggtctaactaatttgtttcctttctctatagattattctctttagatatttcatatgaatggaatcatacagtttagggtgttgtgaaatgacatttcacctaggctaattttttgttgttttttttttctggttttagtttcattcatgttgttgtgtgttttaatacttcatttctttttatagcagtttaatattttttagtaaagatatgtcatattttagttgttcacttatcagttcattggccttttgattgttttcaattgtggctattaggaagattgctacacatgtttttgcataaacatgttttcctttctttagggttgatactataagtggaattgctgcttcatgtgggaactgtatgtttatgaagaactgctaaactgtcttccaaagtacttgtttcattcatgactaccaccagcagtacaacatggttccaattcctccatacttttgccaaacctgttattccctgactttttgttacagccttcttagtgggtgtaaaatratctctcatcctggtcttggattgcattttcattacggctaaaggtgttgagaatcttcatacgtgcctactgatcattcatatatcttctttgaaaacagtctatccaatccttggaacatttttaaactttgctatttgtcttattattaagtttaagaactatttatatattatgggtcatgtcagatatataacttgtaaatattttgtcccactctgggtgcactaaattttactttttgatgttggtctttgaagcacaaaaaatataattttgttaaatttttaataattgattttttcaaacccaaagatatcaatgtgcaaaattccttgtggagtccagctaccatcaattcagcatttatagctactatcaataatgtttttttatataagcagggtatcatctaaaggaatacttgaaaaatactttatcacaaaaaaagaaggataatgaatgataaaaatacctttaaagaagataggaaataattgaaaaagaacacaaaccagcttggacaaatagaaaaaaaatatataaagcaaattggtagatttaaatatgattatacaaatactttcactcaatctaaacagactttagaaaagagcaagtaattagtaaagacataaaacatttgaagaacacaattaacaaatggaatcttataatgtaaaatgatacaaaygcacatacatacacacacaataaacatatatgtatcatatatatcaacttgaagacacattttcctagagcatgtcgaatagttatctgaagtgatatgtggtgggcaataaatcaagatttagtacatataataaggttcaatatcataaagactatatgatccagccatagtggaagtaagggaggttataaaaactataactaacatatctttaaattttagagatcaagaggtgaatcacaactatgtctccacttttatctcaacaattctactcccagttatatacccaacagatatgtataaataaatctaataccatatagaatatttatgacagaattatcaataytgtccaaaaattgttagcaacccaaatatctattaatcataaaatgaagacataatctgtgctttatcaatcaacagaatactacacagcaatggaattacccaacaactgctacattaaaaaaagacactaatgagtacgtattatataattcaattacataaacaagcaaactaatgtatgctattcgaagtcaggctaatccttagttggtggacaaaagtggtgactaaatggttcagaaaaagagagttattctaggcaggttgtgatatcctataccacaatctgaacagtaggtaaatcgatatcttcacctcaagataatgttcaagatgatcttacatttttgaactattcacttagtgtatgaatatttatcttttgtatttaatatttaaatgtttattttatgagatatataatgcattttaaaattctaggactcaaatagcaaaataagcacagaaaatagagaaaatcctagtggttccatcataatgtggccagtaaaagcctctcttagaggtaacattagaaggaagccacaagaagggagagaagcattccttgggttgtagcaagagagagtactccaagagcgggagagaggggaaaaaaatgtgtaaggtactaagatgagaacacctttgggagcttaaagtaaaatagaaggccaatctagaagacagtgtgcaggggaaaagtgttaggaaaagagtttgcccgtgtctaaaaatgtagggttctgtagaccaaataacagagttggattttattctaaaaataatgagaagccaggcaaaagtcttaatcaggggagtgctttaaactgactttaattgaaaaaatcattctggctacagggtgggaaagagtaggagacaaaagagtaatgtagaagcaaagtgactagctatgaggcacgtcactcaccatgacacaattactttttcggaacttagagatgataattctcatattgcattttcacgatctttctcatagcacttaaaagggctcatgatgttgagcatgttctccgtatgtctgtttgagaactaagagtgtaattagattgttcataatacaaaggataaatgcataagggatgaatatcctattttccatgatgtgattatttcatattgtatcaaaacatctcatataccccataaatatatacacttaatatgtaccctcaaaaacttaaacaattaaaaacaaattaaaaatgccttatattttctctgcttcaaaaaaaattaactttctcagctaacattcaatttctactttaaaaatatttctcaatgagagaagtccaatttaaaagccaaactttctatgatgactcaaattaaaatacacaaattcgatgtcaattctttgacatttattttgaattatttggccctttaaaagcctttcgtaaacttgatatggacaggcaaattaacttactttcagtattagggaggagaccatgcttcatatcgtcttatgcccaatttctgcctccaaagaaagaagtaaaaactaaaaggcagaaatgaaatccacaagcagacagcccagtgccacaccctgtgcctgatagttaaagatcgacccctgacctaaccagttatgttatctatagattccagacattgtatggaaaagcattgtaaaaatccctgtcctgttctgttccattctgattactggtgcatgcagcccccagttatgtacccactgcttgctcaatcgatcatgaccctctcacgcagacccccttagagttgtgagcccttaaaagggacaggaattgctcactcagggagttcagctcttgagagaggagtcttrccgatgctcccagccgaataaaacccttccttctttaactcggtgtctgaggggttttgtctgtaactcttcctgctacattactgtctttatttttatctttcagatataaagagaatgttatgaaattatcaagaattcaacatgatcaaccagtgaagcccctggatcgagcagtcttctggattgaatttgtcatgcgccacaaaggagctaaacaccttcgggttgcagcccacgacctcacctggttccagtaccactctttggatgtgattgggttcctgctggtctgtgtggcaactgtgatatttatcgtcacaaaatgttgtctgttttgtttctggaagtttgctagaaaagcaaagaagggaaaaaatgattagttatatctgagatttgaagctggaaaacctgataggtgagactacttcagtttattccagcaagaaagattgtgatgcaagatttctttcttcctgagacaaaaaaaaaaaaaagaaaaaaaaatcttttcaaaatttactttgtcaaataaaaatttgtttttcagagatttaccacccagttcatggttagaaatattttgtggcaatgaagaaaacactacggaaaataaaaaataagataaagccttatgagctcgtattgaaatttgttgaacttatattgaaatttgttgytctaattcacagtatactcacaaaaaaatttactcagcttaactatatttcacacattgtacataaacacaagatcattaagaagtccactgacagtatcagtactgttttgcacatactcagaataatttggcttcattttgaacaggattgtattgttttaactgctgctaaagaaactattacatagttaaattgtacagaaagtctctcttccttttgatattttaagatgagtagtattgcttggcttttataatgcatgcagctttattctcatatttttcctaaaatttatggccaagtgtttactgttttagagcttaagtcatttctcagtggaaattatggggaattagaaatacagcaactcttaccttcttcctactgtaaaattgaactattttgtaacatctttggtttcatgagccaattctattttttctagatatttaaaaatatacatctggttgactttattctcatatttttaattatttcaatagttatttgggaacaggtggtgtttgattaaatgggtaagttctttagtggtaatttctgaggttttggtgcacatatcatgtgagcagtgtaccctgcactcaatgtatataatcttgtatccctcaccccctcccaccctcccctctgaatcctgagagcctattatatttttcttgtgcctttgcatcctcatagcttagctcccacttgtaagtgagaatttatgatgttcaattttctattcctgaattacttcacttagaataatgctctcccactccttacaagttgctgttaatgccattgctttgtttctttttatggcttagtagtattccatggtgtatatatatagtatgtatatgtgtgtgtgtatacttgtatatgtctatgtgtgtgtgtatatatatatatatatatatatcacattttctttatccacctgttggttgatgggcatttaggctggttccatatttttaaaattgctaatagtgctgttgtaaacatgtatgygcatgggtctttttcatataaaacttttcttctgggaagatacacagtagtgggattgctggatcaaatggtacttctacttttagttcttataggaatcttcatatggtttttcacagtatttgtactagtttgcattcccacagcagcataaaactgtcccctttttcccacatccatgccaacattgtattacttttggatttttaaattaggccattcttgcaggagtatagtggtattgtgtctggaattggtgggttctttgtctcactgacttcaagaatgaagccgcagaccctggcggtgagtgttagagctcttaagctggcgcgtctggagtttgttccttctgatgttcagatgtgttcggagtttcttccttctggtgggttcttggtcttgctggctcaggagtgaagctgcagaccttcgcggtgagtgttatagctcttaaggtggcgtgtctggagttgttcattcctcccggtgggctcatggttttgctggcttcaggagtgaagctgcagaccttctcgttgagtgttacagcccataaaagcagtgtggacccaaagagtgagcagtagcaagatttattgcaaaaagcaaaagaacacatcttccacagtgtggaaggggactggagcgggttgccactgccggctagggcagcctgcttttattctcttatctggccccacccaatcctgctgattggtagagcccagtggcctgttttgacagggcgctgattggtgcgtttagaattcctgagctagatacaaaggttctccatgtccacatcagatttgttagatacagagtttcgacacacaggttctccaaggccccaccagagcagctagatacagagtgttgactggtgcactcacaaaccctgagctaaacacaaggtgctgattggtgtgtttacaatccctgagctagacataaaggttctccaaggccctaccagagcagctagatacagagtgtcaattggtgcactcacaaaccttgagctaaacacagggtgttgattggtgtgtttataatccctgagctagacataaagactctccacgtccccaccagactcaggagcccagctggcttcacccagtggatcccacactggggtcgcaggtggagctgcctgcctgccagtcctgcgccatgcgcttgcactcctcagcccttgggcgatggatgggactgggcgcccttgagcagggggcggcactcgtcggggaggcttgggctgcacaggagcccatggtgggggtgggaagctcaggcatggcgggctgcaggtccccagccctgccctgcaggaaggcagctaaggcccagtgagaaatcgagcgcagcgccagtgggcgggcactgctgggggacccagtacaccctccgcagccgctggcccgggtgctaagcccctcacttcccgggccggcaaggccggccggctgctccgagtgcgaggccggccaagcccacgcccacccggaactccagctggcccacaagcrctgcacgcagccctggttcccgctcgcacctctccctccacacctcactgcaagctgagggagccggctctggccttggccagcccagaaaggggctcccacagtgcagtggtgggatgaagggctcctcaagtgccaccaaagtgggagcccaggcagaggaggtgccgaaagcaagcaagggctctgaggactgccagcatgctgtcacctctcagtattgcattgtgcttttgatttgcattttactgatagtgaagttgagtattttttcatacgtgttggccaattatatatcttcttttaagaattgtctatttattaccttagcctactttttgaacggttttgtttttctcttgtggatttgttttagttctttgtagactctggacatttgtcctttgtcagatgcatacttcctgaatattttcaattactctgtgagttgtctatttacacaactgattatttcttttgctggcagaagctttttagtttaattaaatcacaactgtttatctttgttttagttgcatttgcttttggatttttggtcatgatgtttttacctaacccaatgtctagaagagtttttgaaatgttaccttctagaattttttattgtttaaggtttagatttcattatgtgatccatcttgagttgatttttataaggtgagagacaaagatgcagtttcattcttctacgtgtggattgccaattatttcagccccgtttgttgaatagggtgtcatttccccactttatgttttcgtttgctttgtcaaagatcagttagctgtaagtatttggctttatttctggattctctattctgttccattgatctacatgcctgcttttataccgataccatgttgttttggtaactttgaatatgccttttaacatgatgggtaatgtagagaggaggtgccagctgggcttcctgggtcaagtatggactcagaaagctgtgaaactcactcatttactgcaggaggacttacttcgatcctggatgaataatattgaagataaatgcttaaaatattcctaacaccaggatttgtgcatgtgttttcttccccaagaaagctataaacaatgaaaattttgctgtaagtttccctgtgtcctctcttcctctctcccttccccattcccgaaaactaaagtgaaagaaatgttaactgcctgtttttctgtaaccagtgggccttatctatactcctaattccagttccttgtaaacatcctttgtaaagtcccataagatcctgtctcctttgccatacagctgcaaggtcataaagtagataaaacctaagttgcaattctggttttcctcaagatctaagacatgttacaaagagttaattgtctttgtttctcatctggtaacatctacccgctgcacatatttcttaccttaaagagtttaaaaggcaatcgtataatccaactctgcctacactttcgggaccccttccacactctggaagctttgtactcttgttctgctcgataaaacctactgctcattctcggtccgggtctctatcacttgccgtggtcagctgccgcaccagtttttggtgtggctaggcaagaaccttaggcattacaatgtgatgcccccagatttgttctttttcttagtcttgctttggctatgcggggttcaaagctgagaatcaaataacaactcatccattttcacaatagctgcaaaaaaaaaaaaaaaaaaaaaaaaccttagaaatatacctaaccaagaatgtgaaaggtctctacaaagaaaaatacaaaattttgctcaaaaaagtcatagatgacagaaacaaatggaaatacagcccatgctcatggatgggtagaatcaattttgtgaaaatgagcatattgccaaaagaaatatataaatccaattcaattctcattaaaatatcatcatcattcttagcagaatgagaaaaaacaatcctaagtttcatatgggttttattatcatttttgacctttaataacaattgtaagtccttaattttaggttgtgataatatagaaattgcactttaaagggacttagtgaattttcaatcttgctcaacatacatgtacatatacatgtccatttcttttaaaacaagacacagcatcaattaactagctaatggatatgttgtgaaattcaatgtgtattttgaagacagcttgaaataattattattattctacataactataatcatttttttttattttccacaaagccttttgattcatccctcctataaatataatatggacatataaatttttagcatgttaaaaatatatacaaagcataaaaaaagtttataaattttgtggaaaatagataaatcaagtcataaatctcctttaatctacacatcagggaagcactttatgatcaaactagtccagattgacagaaatctacttgtctttgtcactaaaagttcttaccattaaccaattctcacaaaaaatattctccagggtaaggtttgattaaaaacaaatatatatgtatatttataattttatacacatagataaatcatgtaatatataaacacatacacactaaaacattgacaagatagagaaattatagaaaatttcatacaattcatccaggaattaatacagatataaagaaaaacagaacttatatagtgtcaaagattaataatgttgtcttatgcttataaacctgaattaattcacataaaacctatcctataacacacataacaaaagattggtatccattgttcagtgagaactacaaatcaccaaccaaaacagacaatctaataaaaaattgatgaaaatatgaagaagcaatacaaagtaaaaatggccaataagatataaaagactaaaaagctactgacgctcacaaaaatagaattaataccaacaaattaatgccatagagaagatttgcaccccataaaaacctgagaaatctatttttgagggagtataatttgaaataacactcaaataaaatgtaaatatgccatttgaaactgaagttttatatatagagatctgtcatgcagaaatccttgcatataagcacatgaatgaactaaatttctccagcacttaaatggctttcagtcaatgaacacgtgtmcctccaacaaatgtttgaatgtagccattgcagagaacaggctgattatcacattacgaaacagaaaaagtagtttccagaaaaacaaataagtattttttgtaataaaatatatgtaagctagtacaaagaagaaagaatctcgaaaaatacgtgtaattccaaggatgagaatttaaatttttattctatacaaatctgcaatgtttaactttacacaacattttcatgtattaattatgagatttaaaatttaatttgtggaataaacacattaattcaagaca

SEQ ID NO: 93740 - DNA, 36275 bp, Homo sapiens
ctgctagcacatttccagccaatttaggattgtctggggtttggtggcccctgcaatgaatgatggcaactttctgtgggagcctggcagcttgaaggagcttgctgatgagagagccacttatgacagtattgtttgcagtgaggaaaccccgttctttccagatggatgagtgtgagtgcactacgtggaacacataaggagaatttgaatatattgatctgttttccggatgctagaatgagagctcgagtgagggcaatgagttcagccttttgggaggtggtgcctaagaggagcagattgacttcaatagtgttggggggtgacactatagcatagccagcatgtcggtgtccttgatgtaggaaggagctgccatctacaaaccgagtaaaggacgcatctggaagggatttttctgttaggtttggaaaaggtataagaaaggtttgaacagtattcacacataagagtgtgaagaagagtcttgggcggttgtagcttcgggtaagagcatggccgggtttagatgggaggtggttagcatggtgatgtggggagtttctatgaatagagcatacagctggaggagccgtggggcagagaaaagacttagtacactgcggtgagctaacatgtctttgatgttatgggttgaataaactgttaggttggcatgaagagatagttttaggcttttaagagtgaggacagcaactgccaccaatgctcaggggcaggcaggccatccgagaactgtggcttcaagctgtttagggaggtaggcaacaacctggccgggtgggtcccttagactgggttagaacacctagtgcaactccacgccattcatcggtatagagggagaaaggtttggtgaagtctgggagagtgaggatgggggctgagatgagagacttttggagtagatggaaaggttgggtaataggctgtgcaggttttaaaggctcatggagagggcctttagcagcttggtacaacggtttggtaagtagagcgaaggaggaaacccagagcttaaaatatcctgctaatcctggaaaagagagaatttcttgcttagtttgtggaggcgggagggactgaaggagggagtatgtggtctgttgtgagcccttgcattcaggggtaagagctaggcctagataggtgactggggggtgcatatttgggctttcttaggggagacctgatacccctgttctgccaagaggtttaaaagggagatagtatgtatgggtgttgcagtctctttgagaggggctacacaggagcagattattaacatattaaagaagagaggatgattttagggataaagtacagaagttactagcaagggcctgtccaaaaaggtgggggctgtctctaaaaccttgaggtagtacgcaccaggtgagctgacctgaaaggtgggtgtcggggttttcccaggtaaaggcaaagaggttttgggaatcagggtgtaaaggaattgtgaaaaagcatcatttaggtttagaacagaaaagtgggtggtattcgagggaagtgaggaaagtaaagtatatgggttagaaactactggacacactgggagtacagcttggttaatgagcctgaggtcctggactaagtgataagttccatctggctttttaacaggtagaactgatgtgttaaaaggagagtttgttgggcagagtaggtgactggtgaggaggagagaaatgataggctttaggcctatgagagctgcttgggggatgagatactgcttctgtgataggaacggggtgggctctttaagggtgatgtggatgggggtgtggtgctctgtgaccgagggtgtggaagtatcccaaacagtggggttaactacaggtgcgggataaggaaaagttgcatgcttcagggtgggaggtcggaggagtagaagaaagttagaagcctgttagaagccttggaggggtctgggttgatgtgttgggtactatggggaatgtggaagtggagagtagtgtggagttttgaaagaatatctctgcctaggagcggagctgggcatgaaggcaggactaagaaagagtgactgaaggaaaaggtgttcagggagcagaaaagtggaggggggtcttggggtttggagacttgtccattgattcccacaacagagacttgggaggactgggtgggtcctgaaaatttaggtaaagcagagtaggttgctccaatattaatttttaaaaaacatgcatgcctacctgccaccatcagggttacccttggctcagatgaagcaatggtagttgctgggacatctgttccagggcactgtcagtctttagtggcaaggccgttgagatccgagtaggaggttttggccagctcggaaagggatggaggcgatccttgctggagccgctcacagcctgactttcactgagtcctccacagagggggcacagcctggtgagcacagctgggtttgggcatggcctggaccagtagccttcattgccacacttgaaacaggcgccaggtggaggtgttttgctaggaggcttctgtatggagctgtggccctgtgggcctgcagggtaaaggcaagcattggaaactgtttttttcttttactttcctcatcacaactgttaaagactttgaaggctaaattaagaaggtcccactgtggggtttgagggccgtcatcaaccttctgaagcttgcgccaaatatcatggtagattgggtgaggaactgaaggtttgaaatagtggttccttctgggctggctgggtccaggttggtaattttctcatggcttcagttaaacaagagagaaaaagggctgggtttttgtcaggaccttcggtgatttctgaaagtttttcatagtttaccactttatgggcaccctttttgagtcctgcaaggagacacataatcatgaggtcttgatggctgtgtccagaggccctgtcttgataatcccagtgggggtcctggttgggaactgcctctgtgccagtaggctgggcaggagcttgatgatgaattgtattagcatgcacctgagctagggtccaagtacggtgctggtcttctggggtgagggtggaagagaagataagtagctgtcatgccaggttagttcataagactgagtaaggtactgaatctccctaatataagaggtaggatcttctggaaatgaactgagtcttttgttagtttgagagagatcagtgagggagaagggaacatgaactctaacaataccttcagttcctgctacttcccgaagggggcattctagcactggcgctaaagtacgggtggggcatgggccaaagatggtgccggagctagtatgggcaggagagaaggaagaagccagaaggggttcctgctgagggtttgaagagggaaggggggttgagttgataggcattggaggatagatacgggtgtaaggtggcgggatgggtttacaggctccgtgagagggctgtaaggaaggagaatgagtacaggcaatgctagagttttcctgaggagaggatggtataggaaaagaagtgggtgatgctggctgggaagatggtggctgggaagatggtggctgagaagacaatgaggaagcttggggagttaatgaagttggttgagatggaggggtagggtctgggaggggtggacagcagtctgctccatccaatgaggaaaaagaggtagggtcgggaggataaaggcaatgagggcggcgagaatgaagaaggatttgaacaggtaagcaagaattgcagaggtcgggctgtgatctgagtgcaaaaaggcctggacacaaggaatttctccccattttcccagtcatctgcaataactgcttaagtcagttaaaactgtaaagctgagtgttccatttgcgggccatttggacccgttatctaattcatactgcgaccaggctttatcgtataaaaaagacaaggcacttatggcagatatcttgcctgaggcctaaggtttgcagatttttaatgaggcaggctggagggctgttttttggaattgaggaccgggagtttcccataatgaagggtagctcgagagaacagggaaaaaggagaccatcctggacagctggagggagacgataaaaggagttatcgtctccgctgcctttttggttcctggaatgggatgaaatggcttagaggcatccccctaagaccagatgaccagcgagtgcctggcgcacgctggcgccttcttggatcagtgttggatttttggactggagaaaccaagagaggccatgtagattttgccctgttaaccgggctccaagggaaacttaccagtaggcgagatcagtggctgatgcgcatgcacagagaggcgactggaggctgaggagcttcctctgtctaattgctgtggcctgctctctggggtggagggataggtccacaagcgacacagacctgagcccctcctaggatttggcaccagatgtaaggttcttgaatcagtttgaaccccaacagcgcgccaacagacaacaggaggcggtgtggagcaacatgctgttttaatgaacgcctggttgcaggtgggctgaggcctaaaatggcatcagccccaagtgaggatgggacaggggttttgtagtcctctgtaaacagtaagtgtcccagtctgttgtgactgctatgtagtacctggatggcctatttcttgatcttcaggggtacatctcttccagccagggtaagtgtcttctggccggctctcttcctgcttctgctatcttgctgacacacgctgctgatgcaagtggtcttgcatcttggggctgggcctgagaagggaggagttactcatcccttcaagccttcaggtcctgaggagaatctttgaaccccctgcatcactggccaccctcctgatagatccctgtgatgccaggcaggaatgagccgcttgggtatccagagagctcccagtgcctttctgctacttcctctacccctgtattttgcttggcttggttctctaatttgactcagcttcacataaagtcaggaacttctcctgcaaacagaacttcagcttctccagtggggatgtgtattctggagagggggatcaccctttcccacttccattgttggggcactcacagtgtttgggatgtctcccaggtcctgcaggagcagtacgcttcctgcagagggtgtgtggatcctctcagaattgctggtctgttcttgcagttgatctgcagctaaaattcacaatgcaagcctctgcatgctgctctgtctggagctgcaatctagtcctgcatcccatctgccatgatcactggaaaaccctcatttattttttaaagggtccagaaaatgctaatctatagagatagaaattagattagtggttgcctagggtaggatggatgcaaaatttcagagtggggggttagaggctattgtatagaatcttttggagataatactgattattgtagtggatgtaaaattctgtgaatatactaggaaacattgaactgtacacactaattggtgagtcatatggtatatgaattatgtgtcaacaaagttttagaagacattacttgcaccacgatattaaaaaatgccgtttgagttgtataattacttcttctctctatgtcaagggcaccgaacaggcaggagcctctcacttgccactgttcttaacagtattataaaataattacataagacaggttacttacatattctaggtcataaaaattattgcttgactagagtaattgtaaacataaaagaacaccaaacacactaaaataaatatgaggtcatcaatcttttgttggtctccttggcatgcacctattcagactgttagtattatgtatttacttcaaattttagcagttatattttaacttgattgatttttcctcagatataagtatgagaaatgacagaaagaaacaacaactggaaaagaagcattgcataagaccaggatgtctctgaaatggacgtcagtctttctgctgatacagctcagttgttactttagctctggaagctgtggaaaggtgctagtgtggcccacagaatacagccattggataaatatgaagacaatcctggaagagcttgttcagaggggtcatgaggtgactgtgttgacatcttcggcttctactcttgtcaatgccagtaaatcatctgctattaaattagaagtttatcctacatctttaactaaaaatkatttggaagattctcttctgaaaatkctcgatagatggatatatggtgtttcaaaaaatacattttggtcatatttttcacaaytacaagaattgtgttgggaatattatgactacartawcaagctctgtaaagatgcagttttgaataagaaacttatgatgaaactacaagagtcaaartttgatgtcattctggcagatgcccttaatccctgtggtgagctactggctgarctatttaacataccctttcygtacagtctycgattctctgttggctacacatttgagaagaatggtggaggatttctgttccctccttcctatgtacctgttgttatgtcagaattaagtgatcaaatgattttcatggagaggataaaaaatatgatacatatgctttattttgacttttggtttcaaatttatgatctgaagaagtgggaccagttttatagtgaagttctaggtaagtcatgtgtctaactggtgcttattaagttctaacttttctgtgcctttgaaggtgagcttatataaatataatgtcagaagatagtgtttttaagggaaattatgaattgcaaatgtaagatgatctatcagtctcaaaaatattatagaatgttgaccttatagaatcagttagaaccctggggccatcactactacaggacacccagagagtcataaaccttcattgtaaagcactaatgatttctttaaactatcacatatcattttgctatacattttttcatctttaaaaaaagtcaatagatacctcaagaaacatcttcatgaaggcagacacataaatttagtatttacacatatttctagaaaaattatcaatgcaggattgaggaatttgtttctctttgagttcctcagtttcctcatttagaaattaaattttgtttttcatgtaagaaggattccttcacagttgagtaatatagtggctctactccagaaacagaagcctaaaacttgagatttctaatgtttatayattccttcaataacaggttgacaattatttctttcaaaaactgaaatcttgttgaaagtgaacatctaagttttaatctatattttattaaactgcatctctccatcaaagaaaataggggccaaattaagggagagcacatatctctatgtcaataaattctgaaaatgttttaattctcatttgtaaatatatttattttaaaaatctaattatattaagatcttamgatgaaccaagacagtagtaggtgtaaagatttcagtgttgagctcaaaaaactcatggtttactttgagaaccaaggatcaagggactagcttaataaactgtagacactagagtacttcctggaaagctgttttcatgggtaaggtaagatgaattaattgtggaactgaaagagttgtttaaaggtatatttgttactattgcagcttcagagggaagacaaatgtgtatttaagttcatagtggctacattagtccattctcacactgctgtaaagaaatacctgagactgggtaatttataaagaaaagaagtttaatagactcagttcyacatgactgggatgcctcaagaaacttagaatcatggtgaaaggctaaggggaagcaagcttggatcttctcacttagtggcaggagagagaagtgcragcaggggaaatacyagacacttataaaactatcagatctcatgagagctcactcaatatcatgagaacagcatggaggaatccacaccatgatccaatcacctgccactgggtccctccctggacacatggggattatggggattataattcaagatgagaggagatttgggtggggacagtcaaaccatattagtgacttattttaataattatttatgattgtgaatatactgatgttacattaaagatgtgatttcttcttacagatctctgaatacattgccttccttatatatacatatgagcaacatatgcaataaataaaatctaaattatgactatatataaatgtatttatatatattttatcaatgcacagacattttatatatgtttgggtatgttattccaagtcctttcaggaaaatacctgcatattcaaataacaattctcgtgttagctaccttttgttttgttttgtttttttccatcaggaagacccactacattatttgagacaatggggaaagctgaaatgtggctcattcgaacctattgggattttgaatttcctcgcccattcttaccaaatgttgattttgttggaggacttcactgtaaaccagccaaacccctgcctaaggtaaatgtrttcttgwttcatttgtttgcttgacattttcagaaggaatggctggwtatgtttctttcagagtgtttaactcagagtgaggggaatatgggaggtcaaaaacaaggacttgccattagaaaatcatatatttctrtastatcacaagtatgtgaatgttattatcattaaagaccaaagaggtttactagggagattttgaaaacagggttggttaaagtaaggccttcattgtgccacccaaaagatagtatgattcatttcttcaaaaaatatttgtagagtgattaatacaaaccacaggtaagtgctggattttcagagaataaaggtagcacagtttctgctccctcatgccttacattgtactttgaaagatagaataaaaacaagtgaaaaagaaaagtctaaaaagtgttataaggaaagaccacaatgataaagaaatatgcagaagagatcccaaactcattgacaattaaagtgagtactcaataatgtgcagagataggtgaaacgatgaggggwtgakaaacacccaaaaagaaaaccagaggccaggcaargtggctcacacctataatccctgcactttgggaggcagagaaggcatgattgcttgggctcaggagtttgagaccagcctgggaaacgtggtaaaacctcatctctaacaaaaataaaaaataaaataatagccaggcatgctggtgtgtgcctrtagtctcatagtcgtagctacttaagaggctgaggcaggaggcttgcttgagtctgggagcagaggctgcagtgagctgagaccacaccactgaactctagcctgtgcgacagagcgagactctgtctcaaaaacaaacaaataaacaaaaaaaaaaaaagtaaaggcttgcattaaggcagaaaagtagaaaagcaataagggcagttcccaggaactccaaatttaatttacaggaaaaggttgagtaaaagtcaatgatgggcygggcgtrgtggcttacacctgtaatcccagcactttgggaggccaaggcaggtggatcacctgaggtcaggagttggagaccagagtggccagcatggtgaaaccccgtctctactaaaaatacaaaagttagccaggcatgttggcaggtgactgtaatagcagctacttgggaagctgaggcaggagaatcacttgaaccccggaggcagaggttgcagagagccgagatcacgctattgcactccagcctgggcaacagagtgagaatctgtctcaaaaaaaawawawaatatatatatatatatatgtaatttgatatacccatagggacaatggagagctactgaaaagagtgaaaagagttaagaaatgaagagatatgatcagatttccttttaaaaaatcccaatattcccaatgtataatattgcaaaaaggcaagtttgtaaaatgtaaagatcatttaggaacttttacatgagtttaagcaatcatgactacttttataataataatcacaacttcatattgtgctgtgtggaaaaaaagtagttaccacagataaaacacttaagttgtctctgacacacagccagtgatccaaaaatattgttgatattatgattatttyagtcattatttttaatactttaaattagctaacatgtgccagccatttaagatatcagtcttcatttaatagtgattgattttccaacacatcaagattatattctctagcaaagtcctagagaacagatactctgtgtacttgtttaaatgtaaatgtttaagtttgggcagtcagttgaacaagctggaaagctaaagttgtattgtaaaggtggaggctcttcattaatattctagcttaaaaggtaattctgtgtactcttatcttattctcaaaaaaaaattcctcactcacattaaaagaaagtgatagtgccagtagcagggggaagagagtagcagaataaggacaagggataaatgactagtagtacaatagtgattattactgatactagcatgatctcggctcactgaaacctccaccccccaggttcaagcgatctgattctcctgcctcagcctcccgagtagctgggattacaggcacctgccaacacatctgactaatctttgtgtttttagtagagacagagtttcaccatgttggcyaggctggtcttgaactcctgacctcaggtgatccacatgcctcagcctcccaaagtgctgggattacaagtgtgagcctccgttgttgttaacttgcagaaggtagacttgaatccaagtaaataattgtgaaactgattctctaattcttttgtacacaaaataattgttgcgacaaatttgcttgcttttccattatgtattagattctcagataatgtttgtatatttcaaaagaataagactcttgccaaaaagtatcaagtgtttgaaaaatgcatataggcattgcctttataatatactcacatgaaactgtacagagaataaatcatgatggtaagattcaatatcggtagcaaatactcattaaaaaaactctggaaataattcaaatatcttacattaagaaatggttaaaaacttacataatgtgcataccaagccattacaatccttttttcaaaacaatgtttaattacactgtcagccgtggtacaggtatagttggaaactaaggaacaaaatgatgagtagaacaagatcacagtttttttgtagaataaaaaggcatatacaatgagaataaaattttctaaataaacatcacatatgtacattgagttatataaatagaattaaacccataatgaaatggtacacattttaaattgagatagagatatgggtaaatgattttctttttctaaattttcatacttttataaaactacttacattgatcttctattaccattactttcataaagacatcacagaatgagatcagtgctgatctgtctataaatagatgttttattacttcaatactgggtgggtgaagcagacttttggcagtgaatgagacaaaacattgaactcaagttacattaaatgtggctacaggcaactgcaattacactgagttcctggatgcctcatgaattatctctaatagccatacactgaatctccaattaaaactgatgtcaggccaggcacagtggctcatgcctgtaatcccagcacatcgggaggctgaggcgggtggatcacaaggtcaggaggtcaagaccastctggccaagatggtgaaacctgtctctactaaaaacagaaaaattagccaggcgtggtggcaggtgcctgtaatcccagctactcaggagactgaggcaggagaattgcttkaacctgggagkcagaggttgcaatgagccaagattgcatcattgcactccagcctgggtgacagagaaagactccatctggaaaaaaaaaaaagatgtcataaagttaaattatattttttaaaaatacttaccaatatatggtctgaattgacatattttagaatttctttttttatttgtaaacagttttataaagaaatttcccccaatgattaggaccagaaagtatatttgttatgacagaaggggttggtcattattttactgagaaaaagagaatttwgaacaaaagggacaacagcaacaaaaagatgagtatacaattttgatatgatatccaggaaacttatgggtctacatttcttttcctctttctctctctcttttttttttttttggtgtgagaatacattgagcgatgtggcattagagaatggatttaagtttaaaaacagggacacatcaggaaacacaagtcagaataattctcattcatttcaaagcaaacacatattcaccaggagcttcatatagtgtgagggagctactctagggggtgagcagatctccactggagaaagtcctggtgacctctcccactgtggttcaagtkccccctgtgagacacagcaaagtgatgatgagggtcccccacattcagttatacatagcacatcaaattcacagtgtgatttcaggacaaaaggtgtcatagtcatacctaagcaatgacctgagaaataagatcacttaattatgtaactatatagtatataatactgtattataaatggaattctcagaactatttcccagaaattccaaaccacaataccagactgctgaatgtcagtgattcttatacttcagcttttaaggtgtttttggggggtgggggtgtcgggggcagtgaggggtagtggggtaagactaggaaaccctaactttaagtgaaatataaagggttagagagctagaagctaaataaatgtagatataatatcattccaattgtaactaacttttcctcawtgctcatagtcatgtaatggctccaatgactcctaactaaaagaactgaacagaaaaaaataaaataaaataaaactacyccaaataaacacaagagatttrgtagaaccacaaaaaaaattagaattgaagccaagtaaagctaccttccaataacctatgttagtaattataatattataaataaagtgtctgggtgtaayattttctagcattatctcctcctactgcagtgtcatagctttgtttcatttcctccttacacacacatacatacatgcatatgcacacatatttacacaaatttgcatgaaagatcccacatatattatattacacatctcctttcaaagaaactgaatgattaggtcagtttaaaaaaattactccaatagctyctgastttctcatcttagatgtttgtaacaatcctgtcaayagtgttttctgtgctgttgctcttttctgatagaacaaattctttcttcacaggaaatggaagagtttgtgcagagctctggagaaaatggtattgtggtgttttctctggggtcgatgatcagtaacatgtcagaagaaagtgccaacatgattgcatcagcccttgcccagatcccacaaaaggttagataaagtgccttaactgtggatggctactaaatgaatctgttaaactcttcaagagtccattacagaaatgttctgcctgaaaatttaactgctatgatagttctaattatctcagacatctgytcaaarcaaaaacatatatggaagatcttaaaatcataaagagaggagttttggttgataataacgttggcattaatattgtgatcagaaggaaatatatttaagaggtgctagtgaagtttggtattatcatggtatcgtagcatgtacatagaaatcactaaattctgccctgtcatttgctccttttggtttacaggattttagaaggtactgtatacactgtagatattatcaaaaagcagttaaattttaataagttactgtactatcacaataacaataagcaggtatygaaaaaactttgaaatgcatcatgcagcttcgtcttaccaagcaatctggcwgtttttacttcccatgyattggaataggtctatttagygttctgttcagggtgccattcagagaaagaatgtcctagtctgactagccactgckctggaggtacccacctagccaagtagatttagagaaaaaaaaaaaaaacttgtctgctctgctgacttgggtgccactaatgtcttaagcagaaaaatgtaatggaaaggatggagatagaatcctgcttttagggtagactatgtgcattattaaatgtggcccaacaaagactatgctctaagaatcagattagtgccttctccagattgaggaaggagcagaaaatataaataaacatggtaggaacttattttctaatctatacaatctttgtgtattttcaatttacgttttagtttcttatctgacatagccctctctgaatgatctatgcaagtrtttgctgaaaacacagagttactttaacactcccatatcaaatacaaggtcaacacttgtaaattctactccagtttataaagattgcttgggaawtctaaaatcagtaccttagtttggtactagacatggtaatgactggctatagctgaccatatatcaaggctgtcaatgctaggtagtgcatcatctaagtgtgaaagatcagttaagcaaaawgyagcaaaatacaattttctacattytcagcatctgtattgttaatcatgaattgtcaatgggctcctttttcctacattgttagcatttacaaaagtagcaatactgataatagtctgaatttgtgtcaaacactgccacttgaaatttttcctgaaagtagcacttgatagttagcaaatgaaaagaaattacacatactacatatgtagcattatttctcaccatatgtgcagtttaaatatttagtcttttgtaatcaatgatgtcaaattcataaaataacttatgactagtagacaagtggatataagtaaactcttctcatatcactcaaaaattaataaatttatattaaatttggaaggttacagctagtataaagtatataaaataaatatataggttattactaatttgctacttttttattactagaattaagactgcctaacaattcttaaatatttgaatatttcattgataatcttgtgaaccccaaatatctgatacaggtctcagtacatttagaaagtttatttttgccaacttgaagcagggaggaggcattcctttgactttctgattagcctctccaaggaggcaatcagatatgcatttatcccagtgagcagaggggtgactttgaatagaatgggaggcagtgatttgcttagtgactttggggcccccaggcttattttccttttacatttaaaaaaaatcttttggagaaagcattttagaagaaaatgagtctctggtctcaggttttcatctgatctctaatggcaaggaaggtttattcctaagcaggtcctgagttattaggaaagttcatttttagtaggttgtgaagtctcatgtcctatgaagacaaaataaagggagaaagggagaaaaacaaaaccaaacaaaagaaaaatccttgaaaattaatataggcccattactctgaagtccataaatcagtaggcaggtatgaaagtggattatgtatgtaaattggctgctgttattttcttctggagtttaagttgtctagcttaatttgtagggctttatgaaagcatgacttagtttacagtgactccaaactaggaaaaatggtggaaagggaggaaaaaaaacctgaagacactattttgaagacgtgtcgccatgaaaaattagaattcagtccaaactgtagacagtaataaaagttgaaaaacattaggcaagactagaatctaacaacaggtatactgttatttttgaaacataatttttctgtcttcagtttcccaattttactaaagacaaaccatggtacaactgatttgctttattatacttggcctgattattgtatacagaggaggaagaataattttttatttacataggcttttaaagtggctttgatggaactttgtcttatagaaagaatctcagataggacttttttaaagctgaggaaagccatagatttctaccatcaaatacctacgagttgggtgaattcctctcctcttggggttccaaaataaacttggggttcctgggcctgtcagaaagttacattctttgcttaacacagttcaggaaccctgtacagggaccttatagatgaaggtatgaggccagttttcccaaggggttttattggctccataagttaagtttgattccctaaaggaaagcccaccataccagtggaagccttgataaaataaccagtttctccaattgtgttttgttaaaaatgaaaatagattcttattgcacttatgcaaataactgtattgacaaaagtaaaaaatactcacaaatagtttccaaattctgaaaaatcaggtagagggaaacaaatatgttctaaatttttttcataggagtatactaaattgttaaaagctgttaatagctcaaaaaaaaaaagattccttcactctgaaaaaaaaacaaaacaaaggatcagcaatgttttaagcaaagtctaaaagattactttagttttttattatttcagtccatgtagttaattcctgttctgcttgatactcatgaacattttagttctccatgagtcctgaaagtttttcttccattctaatgtcacaatctccaaaattatcaaaaactttttttcaagagcacctgttagaattttatggctgagtataaaatcgccttctaaagaggaccaaagtaagacaacaattgtctgtggaggacaaaaagttttagggcagactcagtcaaagacacaatggacaaggaaatttgttacctctgtggcacacaataacttaacacatataattgttactgataacgtacacactaagtcatatcagaattataggagtttcccataattttggaacacataacaataacatacttatataaatacagctcaaaaagaccaaacaccatttcatatttgacaatgtttcctgtataatttttatacaaaataaaccaaattatgtcatttttggatgttagggaaactaataaattaaaggattacttaggtcagaaaaaatcataatttataatttgtttggaaaatttctcaaatatcaaaggtttaaaacacttaatatcacaggtaagataaatcattcatttgactaatgtggtaactcaaggatttcaaaaaaaggcaaaaatcatcattctttgagagaggagactcaatttgccaaacaataagccctaataaaatagcatgaagccaaataactttgtttttcaaaattttatgaacaatctataaaattctaatcttgaccataagatataactttcctcagcctttcataacctttataatctttattaagaagtcagtttatgcttccagaaaaccttgttaatctgacacaggggcccatatgttggtcttgcattagtgtgtctttgacattaatgattaatttgtaaataaactaacttatctctcagtatcagttcttaaaatctcacacacccacctcttctgtgatagtccctggaccttgagragctgaatagcttttagaaagcactgttagcattatgccacaacaaacagaacttgaggaaaaaaacttatatgagttgaaaatgagttgaaggatagtgttgccatttcacaccctttatggtttagctttgaaataaaaatgataacagttttttcccaaaacaaaccttactgcctgtggactagattgcttaaggccacagggttagaagttatgataatcttacttaattcaagatgtggctattttcattaaaccaatatcaatgtcttatttattaaaaaattacacaagcaaagatcattctgttttgkgcttggtttacagttttgtaacccttatgtcaaattttgacaccttaaagtatttggcaacaataagtatgaaattgyttgattaataaatgcaaacaaaaatatatgctggaaattcttaagacatttctaatattatcatactttagcaataattgtaaagttatcttatttataaaagattttattgaagttacataaacttgaaaaagcatttgactagtcttttttttctggcaaagtatttaattcaagcacttttattttcttaagccaattaattagagctcttttatatattttcagtaataaaacaytgtgtacaaaacacataaatacatacacacattaagcatgccaatagaartacatcttatagatttatgaaaactacattttgccatattagacttccaaattcttgataacctgtttcaataggtaatctgtatgaatacttgatcaccataggcagttgtaagctaaatagtcttacatttgcatattaaaagaaaccaagtgaaaattaaatagcaaaatttacatcataaggtacagagacaaaaaatttggtgtgctggaaggaaaataaaatggattcaattgcctattaaacataaaattatagaaattataatggccttttaaatatatgcaaacacatgtacacacacacaaaagattctatggcttttacttcagaactttagccatgagataaaaaaaattgaccagcttgcagacaaaaacctgttgaatccatagtgtggtttttatcttaatagaaaaataaaagcaaatttaaagcaagaagaaaagaattttttttaaaaagagagaacttaggaactctatagcttgcaggacaacctagggttcttaatgtatatgtgcacaaagaccgtattaccttcattttacataaactctgccaagtagaggtgtcataaaacctaccaagtgatatcagggggtcattcttcttgttttctcatcattcttagattatttgtttcccactttttttcctaaaaggaggaactgagctgtggcctagggtttatgtgtggtgaatcaatgtgtgytgcttgtgggcagtactccacagtgtgtcaccactgagttgtttccaccctcttacatgtctcagtttctctctccagaggtgtatgacctctgagagggctcaaaatgctgggtgatctgccctcatatgtgtttcctggactagcctttttttaaaagttaatttttmttggggatttccctgcagggccactccatgtcacagggggtcaaccccaagacactcccacaaggcccccagttgcttaggggtgccttttgcctgggaggagcagatgccctttcactttggagctgagaaaactcagtctctcattttcctatgtaaaccacagttcagtttctcacacaaatccacacagacaagccaaatgagattaatttggggaataaaaacaatagaggagaccctttacaacacatctccaaactagaattaggattcttaaacaacaacttcctaggaggaaaaaaatagcaacagtcaatactacttccagtaaactgtactcagccaccccctactttgtaactcgtctgccattacacatgccaaggtaaaatcctctcacagtacaaggtaatctgtggtaatctcaaagccaaagagatcaggtcattcaacataggaaaacagagctttggactgagaaaaaaatctgcccacaactcttggaactccacaaagaaaacagacacccctaaaggggtgagtggtgcctttgttctgaattctttaaaagagttcaagtcattagaagccttctctagatttttcatactgcaaatggcaaaaggcaaaaggaggtatagggtggaggaaaagtaaacaaaagaacatttgtttttttaaagacaggaagcaaacacagaaaccaagagcatggtttttaggttttgttttgttttgttttgttttctcttttgcgtctgcaaagaattttagccaaattagacaggctttgttacccacaatttggaattctcactcagatttgatcaagtcaggtaaagttcatcaaatctgatgggagaaatactggaatgtacaaaaaaaaaaaaaatcccagaaatgtgatcactaagcactgtaatggtaaggagaaattaagtccagctagttgttaaacattaaccaagacaaaaccgcaattcagctgtttacctacggatgggtttcaggccaaaactgccctctgccatcctagaatcaggaaagaaacctcaaattcatcctccctcctgggagcgagctcaaactccatagagttacctgccttccattgtcatggaaacaggaaatcttgcctttcttgtaggaagcaagtaaaactccaaaaaaaacaaaaaggagttgtacagcaaaataaacttcagatcttgtctgaattttggggtatcagagattctctggaggggttgctcccagacctcagccaattgtcttctttgtttgagccataaatttagctcatgctggtaccaagcactgataggacatttatcaaaggtcagggaacctccactcagaatctcttcatggttaccaaaatatgaaccctgaatatatgagacagttctcagataatttagaaagtttattttgccaaggttgaaaatgtgcacccatgacacagcctcaggaggtcctgatgacatgtgtccaaggtggtggggggacagtttggttttatacattttagggatacatgagacatcaatcaacatatataagatgaacatttgttcggtccagaaatgggggacagctagaaacaaaggcagagcaacttgaagcatggaaggggcttccaggtcataggtagatgagagacaaatagctgaattcctttgagtttctgattagcctctcgaaatgaggcaatttgatattcatttatctcagtgagtcaagggctgactttgaatagaatgggaggtaggtttgccctaagcagcttaacttttccctttagcatagagtttgggttgccaagatttattttcctttcacaatctcatgtgtctagctattatgttagaaatgtcattatttctttatatacaaaattgattataaaagtaacgacattaaacgtgggtattcaacttacctcaaacttttagtagttctcattacttgacatcacttcttcttatttcttcatcttttatatggattaactaactgattattaatctcttcagaattctaacatgctatgtttttagagttctattcattgaacaagatattttccttgccctaacaggttctatggagatttgatggcaagaagccaaatactttaggttccaatactcgactgtacaagtggttaccccagaatgaccttcttggtaagattctggagaacaaacagtgaatatattagtaacagcaaattggagtgataatagttcaacataaaacaaacatatttagcatttattattggaaaactaaaaaacaaatcaaatttaactactttatatttattttccagtcttagtataaaaagaatgcactatagtagttggcattttattacatacagtcacattctttatggtcagaataaaaatctctttgttcaggtgtaatttcctctcacaggttttaaataacatcctggattttctgtctgtctcctatttatgcagctttacctctgttctttcccctactgcagggttatttcaacaggcactgaaaaatagcggacacttttctattaccagtgactctactttttatgggaataaataaccaatctttatcatgataaaatgataacacatttcatgatgatgcataacyggtccttcctcagccccacctccaccctactccctgctgccttttaaaaaaaattaaatattttaaatattttaagtatttaaatattttttaaatatgtaaatgtgacctcattatttataatacttaaaagaccacgttcttgtatacccaatcttattctttttttttgcacattttaattttttaattaagaatatgctttttcattttgttcacctggcaattcttctgaaatttgaaaacaatttcaatgcagttttgtgggtataatgttacctagrgaacagttttgctttaagttccttatattgtgcatttcttattcaattctcataccttgtaattaataattttgttaaaatgcatccacttttaggtcatcccaaaaccaaagcttttataactcatggtggaaccaatggcatctatgaggcratctaccatgggatccctatggtgggcattcccttgtttgcggatcaacatgataacattgctcacatgaaagccaagggagcagccctcagtgtggacatcaggaccatgtcaagtagagatttgctcaatgcattgaagtcagtcattaatgaccctgtgtgagtattacagttttgtgaccaggtggtatttataaattattttgtcaacagtgaatatgaattttaacccgtttttaagagactaattttgaagggattgaagtgatttaaccaatgtaaaatctgtccttactttccaccagacagtttatttcaaagttacatttcaaccccacagatttaatgggtcaccaatgactgcaatgaattataaaatcaaaaaaattaaagatatgtagataattattttaaatatttttaatgatagaatgcacaatgaaaagaaagaacataactagagaaatatgatatttcaattcaatacctaaaatttctgaaagtatgaatctattctttctcaaaaatttatttttattatcattattttaagaaatgtgataatgaattataatttgcatagcataacattcactaaaatttaaaatctaaatatatttagtatgtttacatagttacaaagccacagccctaaagaacattttaatgaattcaaattaaactcataatgtatgaagtcactcccaataaacctctagtcctagaaaaataccatcttactttgtttctcaatagattattctcttcacatattttatataaatgaaatcatacaatttatggtgtttcataaatgacttctttcacttagcataattagttttagttttatttatgttgtaggatgtatcagaactcattcatttttatttctatataatattctttgatatgtttataccaaaattacccatttatcaggtcatggacattttaggtctttccaattttggcatttatgaacattgttatacatattttccgtgtaaaaatatgtttttacttcttttgaggagatgctaggagtggacttgctgagacatatgggaaattgttgtttatgaagaactgctaaactgtttttcaaagtatttgcatcatttttcattaccaccagctggataggagggctctaatttcttcacactcttcccaacacttgttatcacctgtctttctattacagccattctagtgtgtgtaaagtggtctctcattatggttttcatttgcatttccttatggctgaagatgttaaccctcttttcatgtgcttactggtcattcacacatcttccttagataaatttctattttaatcttgtgaatattttgtctttttctatttatcttatggattcataagaattatttatatattatagatacaatcccttatcaaatatgtgattttcaaatattttcttccactatggacagatagatttttttttttactttttggaagaygccttttgaaatacaaaggtttcaatgttgataaaataaatatgtaatacttaacttttccataatccaaaggaaatactatgaaaaatgctgtgcctagaccagctaccatcaattcagagtctattactcctaccaatattattatgaggttaggtggtaccagctaagggaatacattaaaaacactttaccaaaaaattagtaagacaagaaatgatttaagatacttcaaaaaaagtaagaaagtaaagaaacataaaacaggttagaaaattaaaatatatatatatatagaataagatgctggatttaaatgtgaactagagaaagaaataaagggtattcaaataggaagggaagaagttaaattgtctctgtttgcagatgacataattctatagttagaaaacccctttgtcgcagctccaaaattccttaagctgataagcaacttcagcaaagcctctggatacaaaaatcaatatgcaaaaatcacaagcattactatacactgacagtacatgatttgacagagagccaaatcatgaataaattcccattcacaattgcaacaaagagaataaaatacctaggcatatgcctaacaagggatgtgaaggacctcttcagggaggactagaaaccactgctgaaggaattaagacaggacacaaacaaatggaaaaacattccatcctcatggataaaaagaatcaatattgtaaaaatggccatgctgcccaaagtattttatatattcaaagctattcccatcaaactaccattgacattcctcacagaattagaaaaaaactactttaaatttcatatggaaccaaaaaagagcccatataaccaaggcaatcctaagcaaaaagaacaaagctggaggcatcatgctacctgacttcaaactgtactacaaggctacataaccaaaacagaatggtactggtaccaaacagatatatagaccaatggaacagaacataggcctcagaaataacactacacatctacaaccctctgattgttaacaaacctgacaaaaacaagcaactggggaaaggattccttatttaagaaatgttttggaaaaactggctagccatatggagaaaactgcmactggatcccttccttacaccttacagtaaccaaaccagcatagtactggaacaaagacagacatatagaccagtggaacagaacagaggcctcagaaaaacaccacacatctacaaccatctgatctttgacaaaccagacaaaaacaagcaatggggaaaggattccctattaaataaatggtgctggagaaaccggctagccatacgcagaaaacggaaactagtcccctgccttacaccttatacaaaaattaactcaagatggattaaagacttaaatgtaaaacccaaaaccataaaaactctaggagaaaacctaggcaatatcattcaggacataggcatgggcaaaaatttcatgacacaaacaccaaaagcaattgcaacaaaagccaaaattgacaaatggggtcaaatcaaactaaagagcttctgcacagcaaaataaactatcgtcagagggaacaggcaacctacagaatgagggaagatttttgcaatctatccctctgacaaaggtctaatatccggaatctacaagaaagttaaacaaatttacaaaaaaaaaaaaaaaacaacaccatcaaaaagtgggcaaaagatataaacagacacttcttaaaaaaagacatttatgcagccaacacacttatgaaaaaagctcaatatcactgatcattagagaaatgcaaatcaaaaccacaatgagatacaatctcatgccagtcagaatggcgatgattaaaaagtcaaaaaacaacagatcctggtgaagctggggagaaataggaaagctttttacatttttgacgggaatgtaagttagttcaaccatcatggaaaacagtgtggtgattcctcaaagacctagaaccagaaacaccatttgacctagcaatctcattacttcgtatatacccaaaggcatataaatcattctactataaagacacatgcacatgtatgtctattgcagcgctatctacaatatcaaagatatggaaccaacccaaatgctcatcagtgatagactggataaagaaaatatgatacatgtacactatggaatactatgcaccataaaaaggaatgagatcatgtctgttgcagggacacggatgaaatgcaaagccattatccgcagcaactaacacaggaacagaaaaccaaacaccacatgttctcacttataagagggagttgaacaatgagaatacatggactcagggaggggaacaacacacaccgggggatggaaggggagtgagagtatcaggacaaatasctaatacatgaggggcttaaaatctagatgacaggttgatcggtgctgcaaaccaccatggcacgtatatacgtatgtaacaaacctgcacattctgcacatgtatactggaacttaaagtaaaaataaaactttttaaaaaaatttgaactgaccaggtgcagtgactcacgcccgtaatcccagcactttgggaggcygaggagggcagatcacgaggtcaagatatcgagaccatactcctggccaacatagtgaaaccctgtctctactaaaaatacaaaaattatctgggcatggtggtgtgcacctatagtcccagctactcaggaggttgaggcaggagaatcacttgaacccgggagacggaggttgcagtgagccgagatagtgccactgaactcctggtgacagagcgagactccatctcaaaaaaaaacaaaaaagcaaaaaaacaaaaaagtgaacctaccagyactcacattaaatttaagcagaccaaaaagaaaagacaaaatagtgatctttgaaatattttatttaaggagataaaacatttgaagtacacaattaaatgtaatctatgtgttatatatgtgtgtgtgtatatatattgcacatttatctgtatatatgtatccatacatatatctctggttgtgtgtgtgtagacagaaaataaacatttttaaaagagtttatggagaccgggtgtggtggctcacacctgtaatcccgacactttgggaagccaaagtgggaggatcacatgaggtcaggagttaagagaccagcctggccaacatggtgaaatcctgtgtccactaataatacaaaacttagccagatgtaggggatgagcacctgtagtcccagatacttgggagattgaggcatgagaatcacttgaacccaggagatgcaaattgcagtcagccaagatcactccattgcactcaagcctgggtgacagagagactctgtctcaaaaaaaaaaaaaaaaaagattatatgaaatagttacctgaatttaycatatgctgggccataaataaacactaagtaaattgtataagattcaaattcataaaaattatatgttctagtcatactagaaataaattataaatcatccaaaaacgataactgaaaacaatctgattctttaaaataaaaaatattttttaaaaaattcagtcaacaaaaaattctaattataaatgtgcctttctctcatcaactattcttccaagtatacatccaacaaaaatgaataaatatttaaacctaataaaatatacaaatatcttaataccataattattagtaaggtcaaaaaatgttaacaacacaaatatccattaatcacaaaatgaagagatcatctgtggtctttgtcaatcaactgaatactctctacaccaatgctattaaacaactgctaaccaaaaacagaaatgaatatgtattatttaattcaattatataaacaatactaatctatgatatcagaaatcaggttaatacttactttgaggataaaaatagtgactaaaatggcccaggaggagagagttcttctatgcagtttgtgataaattggtgtcttcactttgggataatgtttaagataatcttaaaattttgaggtagtcacatagtatatatacatttatcctatgtatttcatacttgragttttactgtagaagatatacaacatattttaaagttccagaaatcaaatagcaaagtaagcatgaagcactagagaaatcctatgggtgcctatagtgtggccaggaaaagactctccaagaggtatcatacaaggggaagcctcaaaaagaaatagaagcaaacctcaagtagttgcaagaaagaatgctcaatgagagagacacggggaacaaaaggtgtaaaggggctaaggtgagaacaccttcaggagtttagagaaaaaccgaaggccattgtctctagaagaaagtgtacagggggaaagggctaggacaagtaggtgcctgtgtagagttctctagaccaaagacagatttggaatttattcttaatgtaacaagaaaccagatggaaatcttaacaggtgagtgtcataatttgatattaatttggaaaatattctggctactagaaggaaaatatggtagaagacaaaagattagagtagaagctgagaaactagttaggaggcatttcaccagttgtgtcacaattcttctttaaatacgtcaaaatgggctgggcacagtggttcatgtctgtagggccaacactttgggaggcagaggcaggagaatgacttgactacaggagttccagaccagtatgggcactacagcaacacctcatatctaaaagtgtaaaaaataaaaaaatatagccaggcatggtggtgtgcagttgtagtcctagcttctcatgagactgagatgtaggattacttgagaccgaaagagaaaggctgaactgagccatgatcatgtgactgcactcagcctgtgtaatggagcaaaagcctgtctcaaaaaataaaaaaaaattaaaaagatcaaaaagatcattctcaaattccatttccactatcttacttatagcacttagaatggctcataatattttctgctccagaaaacattaactttcccaccgaaaattccatttttcayttttaaaggtatttgtcagtgataaaactccaatttaaaaaccaaactttctgtaatgacatgaattaaaacattgaaatttcatgccaattcagtgacacttactttcaatcatttgtgtgacacttttcaaagaccatccatagacttgatatgcttaagcaataaatttacttttaatgttgatatctttayatttatccttcagctataaagagaatgtcatgaaattatcaagaattcatcatgaccaaccaatgaagcccctggatcgagcagtcttctggattgagtttgtcatgcgccacaaaggagccaagcaccttcgagtcgcagctcacaacctcacctggatccagtaccactctttggatgtgatagcattcctgctgrcctgcgtggcaactgtgatatttatcatcacaaaattttgcctgttttgtttccgaaagcttgccaaaamaggaaagaagaagaaaagrgattagttatatcaaaagcctgaagtggaatgactgaaagatgggactcctcctttatttcagcatggagggttttaaatggaggatttcctttttcctgtgacaaaacatcttttcacaacttaccttgttaagacaaaatttattttccagggatttaatacgtactttagytggaattattctatgtcaatgatttttaagctatgaaaaatacaatggggggaaggatakcatttggagatatacctaatgttaaatgacgagttactggatgcagcacgccaacatggcacatgtatacatatgtagctaacctgcaygttgtgcacatgtaccctaaaacttaaagtataatttaaaaaaagcaaaaaaaaaaaaatacaactcttttttttaaaccaggaaggaaaatgtgaacatggaaacaacttctagtattggatctgaaaataaagtgtcatccaagccataaaaaaaaaagaaaagaaaaataaaaataatataaaaccttatgggcttatattgatatttattattctaatccaaaagttacacacgaaagttactgagcttcattatgtttcacacattgtatttgaacacaacaacattaagaactccactcatagtatsaacattgttttgcaaatactcaaaatattttggcttcattttgagcagaatttttgttttactttagccaatgaaatcttcaagaattaggaggaggagccaagatgaccaaataggaacagctccagtctacagctcccagcgtgagtgacacagaagacgggtgatttctgcatttccatctgaggtaccgggttcatctcactaaggagtgacagacagtgggcacaggacagtgggtgcagcacactgtgtgtgagctgaagcagggcaaggcattgcctcactgaggaagtgcaaggggtcagggagttccctttcctagtcaaagaaaggggtgacagatggcacctggaaaattgggtcactcccacctgaatactgcacttttccaatgggcttaaaaaacggtgcaccaggagattatatcccgcacctggcttggagggtcctacacccacagagtctcactgattgctagcacagcactctgagatcaaactgcaagatggcaacaaggctgggggaggggcacttgccattgcccaggcttgcttaggtaaacaaagcagccaggaagctcgaactgggtggagcccaccagagctcaagaaggcctacctgcctctgaaggccccacctctgggggcaggacacagacaaacaaagagacagcagtaacctctgcagacttaaatgtccctgtctgacagctttgaagagagaagtggttctcccagcacgcagctggagatctgagaatgggcagactgcctcctcaagtgggtccctgacccctgacccctgagcagcctaactgggaggcaccccccagtaggggagaactgacacctcacacggccgggaactcctctgagacaaaacttccagaggaacgatcagacagcagcattcgcggttcacgaaaatctgctgttctgcagccaccactgctgatacccaggcaaacagggtctggagtggacctctagcaaattccaacagacctgcagcagagagtcctgtctgttagaaggaaaactaacaaacagaaaggacatccacaccaaaaacccatctgtacatcaccatcatcaaagaccaaaagtagttaaaaccacaaagatggggggaaaacagagcagaaaaactggaaactctaaaaagcagagcacctcttctcctccaaaggaacacagttcctcaccagcaatggaacaaagctggacggagaatgactttgatgagttgagagaagaaggcttcagacgatcaaactactccaagctacaagaggaaattcaaaccaaaggcaaagaagttgaaaactttgaaaaaaatttagacgaatgtgtaactagaataaccaatacagagaagtgcttaaaggagctgatggagctgaaagccaaggctcgagaactacgtgaagaatgcagaagcctcaggagccgatgtgatcaactggaagaaagggtatcagtgatggaaggtcaaatgaatgaaacgaagtgagaagggaagtttagagaaaaaagtataaaaggaaatgaacaaagcctccaagaaatatgggactatgtgaaaagaccaaatctacgtctgattagtgtacctgaaagtgacagggagaatggaaccaagttggaaaacactctgcaggatattatccaggagaacttccccaacctagcaaggcaggccaacattcagattcaggaaatacagcgaatgccacaaagatactcctcgagaagagcacctccaagacacataattatcagattcaccaaagttgaaatgaaggaaaagatgttaagggcagccagagagaaaggtcgggttacccacaaagagaagcccatcagactaacagcagctctctcagcagaaactctacaagccagaagagagtgggggccaatattcaacattcttaaagaaaagaattttcaacccagaatttcatatccagccaaactaagcttcataagtgaaggagaaaaaaaatcctttacagacaagcaaatgctcagagattttgtcatcaccaggcctgccctaaaagagctcctgaaggaagcactaaacatggaaaggaacaaccggtaccagccactccaaaatcatgccaaaatgtaaagcccatcaagactaggaagaaactgcatcaaataatgagcaaagtaaccagctaatatcataatgacaggatcaaattcacacataacaatattaactttaaatgtaaatggactaaatactccaattaaaagacacagactggcaaattggataaagagtcaagacccatcagtgttctgtattcaggaaacccatctcacatgcagagacacacataggctcaaaataaaaggatggaggaagatctgccaagcaaatggaaaacaaaaaaaggcaggggttgcaatcctagtctctgataaaacagactttaaaccaacaaagatcaaaagagacaaagaaggccattatataatggtaaagggatcaattcaacaagaagagctaactatcctaaatatatatgcacccaatacaagagcacccagattcacaaagcaagtccttagagacctacaaagagacttagactcccacacaataataatgggagacgttaacacaccactgtcaacattagacagatcaacgagacagaaagttaacaaggatatccaggaattgaactcagctctgcaccaagcggacgtaatagacatctacagaactctccaccccaaatcaacagaatatacattcttttcagcaccacaccacacctattacaaaattgaccacatacttggaagtaaagctctcctcagcaaatgtaaaagaacagaaattataataaacagtctctcagaccacagtgcaatcaaactagaactcaggattaagaaactcactcaaaaccactcaactacatgtaaactaaacaacctgctcctgaatgactactgggtaaataatgaaatgaaggcagaaatcaagatgttctttgaaaccaatgagaacaaagacacaacataccagaatctctgggacacattcaaagcagtgtgtagagggaaatttatagcactaaatgcccacaagagaaagcaggaaagatctaaaattgacaccctaacataacaactaaaagaactagaaaagcaagagcaaacacattcaaaagctaacagaaggcaagaaataactacgatcagagcagaactgaacgaaatagagacacaaaaagcccttcaaaaaattaatgaatccaggagctgtttttttgaaaagatcaacaaaattgatcgacggctaacaagactaataaagaagaaaagagagaagaatcaaatagatgaaataaaaaatgagaaagaggatatcaccaccaatcccacagaaatacaaactaccatcagagaatactataaacatgtctatgtaaataatctagaaaatctagatgaaatggatgaattcctcaacacatacactctcccaagattaaaccaggaagaagttgaatctcttaatagaccaataacaggatctgaaattgtggcaataatcaatagcttaccaaccaaaaaaagtccaggaccagatggattcacagctgaattctaccagaggtacaaagaggagctggtaccattccttctgaaactattccaaacaacagaaaaagagggaattctccctaactcattttatgaggccagcatcatgctgataccaaagcctggcagagacacaacaaaaaagaaaatttcaggccaatatccctgatggacattgatccaaaaatcttcaataaaatactggcaaaccgaatctaacaacacatcaaaaatcttatccaccacaatcaagtcagcttcatccccgtgatgcaagcctggctcaacatacagaactcaatgaacataatccatcacataaaaagaaccaatcacaaataccacatgattatctcaatagatgcagaaaaggccttcgataaattcaacacaccttcatgctaaaaactcccaattcactaggtattgatggaacatatctcaaaataataagagcaatttatgacaaatccatagcccatatcatactgaatgcaaaaaagctggaagcattccctttcaaaaccggcacaagacaaggatgccctctctcactactccttttcaacatagtattggaagttctagccagggcaatcagcaagagaaagaaataaagggtatggaaatagaaagagaggacgtcaagttgtctctgtttgcaaatgacatgattctatatttggaaaaccccatcatctcagcccaaaaatttcataagctgataagcaacttcagcaaagtctccaaatacaaaatcaatgggcaaaaatcacaagtattcctatacactgataatagacaaactgagagccaaatcatgattgaacttccattcacaagcactacaaagagaataaagtacctaggaatatggctaaaaagagacgtgaaggatttcttcaaggagaactataaaccactgcccaaggaaataagagaggacacaaacaaatgaaaaaatattccatactcacagctaggaagaatcaatatcatgaaaatggccacggtgcttaacgtaatttatagattcaatgctattcaaatcaagctaccattgactttcttctcacaactagaaaaactactttacattttatatggaaggaaaaaagagcttgtatagtcaaggcaaccccaagcaaaacaaaacaaaacaaaacaaaaaaaagcggctggaggcatcactctacctgacttcaaactgtactacaaagctacagtaaccaaaacagcatggtactggtaccaagacagatatatagaccaatggaacagaacagaggcttcagaaataacaccacacatctacaacaatctgatctttgacaaaactgacaaaaacaagcaacgggaaaactgggaaaacttgctagctatatgcagaaaacagaaactgatcccctttcttacaccttatacaaaaattaactcaagatggattaaagacttacatgtaaaacccaaaaccataagaaccctagaagaaaacctaggcaataccaagacatagggataggcgaagacttcaggactaaaacaccaaaagcaattgcagcaaaagccaaaattgacaaatgagatctaattaaactaaagagcttctgcacagcaaaataaactatcatcagagggaacaggcaacctacagaatggaggaattttttgcaatctatccctctgacaaaggtctaatatctagaatctacaaggaacttaaatatataagacaaaaacaacaccatcaaaaagtgggcaaaggctataaacagactcttctcaaaagaatacatttacgtggccaacaaacatatgaaaaaaagctcatcatcactggtcattagagaaatacaaattaaatccacaatgagataccttctcatgccaattagaatgacaatcattaaaaagtcaagaaacaacagatgctggagaggatttggagaaataggaacacttttacactgttgatggcagtgcaaattagttcaaccattgtggaagacattttggcaattgctcaaggatctagaagcagaaataccatttgacccagcaatcccattactggatatatacccaaaggattaaaaatcattgtaatataaagacacatgcacatgtatgtttattgcagccctatttacaatagcaaagacttggaaacaacccaaatgcctaccaatgataggccgaataaataaaatgtgtacatatacaccatggaatactatgcagccataaaaaatgagttcatgtcctttgcagggatatggatagaaaccatcattctcagcaaactaacataggaacagaaaaccaaacactacatgttctcgctcattagtgggagttgaacaatgagaacacatagacacagagaggggaaaatcacatatcagggcctgtcagggggtctgggacaaggggacagaaagcatta

SEQ ID NO: 93741 - DNA, 28009 bp, Homo sapiens
ggaaggccaatgagtcagagatttggtctttttagatcatcgtattttctcagatgttctgttcatttttcttaattttttaatttatttttctgtgactggttgatttgaagaaccagtcttccagacggagcaggtcacctacggagtgaatcccatcaagctagcagcagacatctcagaaggaagtttataagccagaagagacttagggactgttttcagtgtccttaaagaaaagaaatttcaaccaacaattttgtatcctgctgaactaaacttactaagggaaagagaaaaaagaaggcttctctggcaagcaaatgccaacagaagatagttctagtggatcagccacataagaagtccttaagggcgtgctacacatagattcaaaagaattaccccttctactacaaaagcacacttaaacacatagtccacaggcactataaagcaaccatgcaatcatgtctgtataacaaccagctaaccataccatgacaagatcaaaatcacaaataccaatactaaccttgcagcatatacagggactctctttgaatgtacactggctaaatgtaccactcaaaagacatagagtatctgatacgccagacacaagagtatgttgtatacaatagacccatcttacatgtaattatataataggcttgaaatgaaagggtacagtaatatctatcctgcaaacaagaaatgaaaaagagaaggagttactattattatgtaagacaggctttaagtgaataaaaatttaaaaagaaaataaatgatatgacctaataatagaatatacaatccaacaagcagtttttattatcctaaatatatactcatccaacattggtgcaaacacctttataaaacaagtatttcttggcctatgaaaagatttagacagtcatacaataatagtggcaggggttgacaccacactgacagcattagacagattattgaggcaaaaatgtaacaaagaaactctggacttaagcttgacgcttgaccaattggacctaacactctgcagaacactccaccccacaaccatgaaatttacattccactcatttttacatgaaacatagtctaagatcaacaacaacctttgttatgaagcaagactgaatacatttacaataattgaaatcattccaaatgcaaatcacaggggaggtataaaatgtcctgcaaggaaaaggacactatgtcatcttcaaacaatggaaaaatgctatcccttaacagaaaggagtggacctcttttgcagattcggagttcaggggagtctagaaactgaagattttaactgcaatgaattatttctcaaatgtcttataatttcactctatctaaactgagaccctgaatatggttagtgatcagactaggctgggaattcagctagaactgagctgggcttatttttaaaattcagtcctggacttaagattcagattcatttggtggtggggaccgggtgcttctacatgaagtgagagtctctgtatatgctgcagttagggaagcaggagctgaggagagacagagtaatgtgattttaagttcagctccctataaacacacacacctgcaatgaagagtccagatgtcccaatacccaaaacgatacatgatttcaagataataacagttatgttttgatgtattcacacaagaaagtgtcaaggatagttttcttggcataaatagaataatcagttttgtcctgttgtctgaccacccacaactagacacagcttaattaacctttacagagatgagactcctacataagaaaaacttaaaacaaaggtgttgcattcaactccttgccttctgaggatgccctactctgtaatgtcatagctttcaatgaattgtcttctcattgcactctgtgactgaccttgaattccttactgtgtggaatccaataaccttctcttggtgtctgaatctagacccctttttctggtaacacttccaaggagacttttctggctttcaccgtttgccttaatttgatggttattggtcctcactcttccattattttctcccaagcattaattctgcagaaaaaaacatttgcctctattgtggtcataatttctacttttcccatattgataaatttgtgatatatcctaataagtaaagctttccctttcaaaatactaccagcataatttaccattactgaaagtatgaaaaatttaaattatcacattccaggggctatttgtgttctctgtaccaatagtgataggattctcattacaactggtagtgtatgatccaactctaaaatctcattttgttgtctgttcttttttttctgacctctcttggtacatattatcaaatgttgggtgcttccaagaagtagactctaagctgaatattttttgatggagataattagggagatttcttgaaaataacatctgtgaaaaagtaggaagcaagattggacagtggaacaaaatagtacataattcagtgcaatagtttgaatgtctgagtgcccccaaaattaatatgttaaaattcttataaccaaaatgattgtattagcagacagaaccttttaggaggtgtttatgtcatgaaggcagagtcctgtttaatggaattaattcttttgaaaaatatgctcacaataactcattcatctattttccccattaagacatggtgacgggttgccatcttggaggaatgcccaataccagcatcttgatggtgaatctttcagcctcaagaactgtgacaaataaatgtttgttgtctgtaagctagccaatgtatggtatttttctatatagcaccctgagcatgctaagacatgcagtctcagcataggtttcatctcacccactggaaattctgaagctaagttagcccttcagagttggtccaagttgaaatgaggagaatgggcctttagagtcctacatgtgaccaggcattggatattggctgtcttggaaaagtcactacatactagatagctttcagcagagatgtactgagagagagagcttataggtgaggtatgtcagttgttcatcacttcatcagctggaaagtaatttctatattcccaaaagggaaatctgggtgacacataatgcctgcactcaaggacattgaaaatattgaacaatattgccactctgcaggcaatatttgctcagaaactgtgttcaaatatctttttaagaaagatttacctcatttcagattaacagattattaatagaataaaaacaaatatctctattttgtgacatgcatcttttccttcctaattctacttgatgtaaatttctatttagactttttaaaagtacaacttgcctgaattacaaggcaatctgtgaaacaagttaagtagtaggcatttagaagataaatattttctaagactgagaaatgtaagcaatgttgcaaatattcagaaaaggaaattattgtgatttagacaaaatattttcaaatgaaacaaagtaactgtaattgtacttaaaacatatctgtttggataaaaataaaaggaatttctacagtcagaaaaacaatgtcaaggaacatgaaatgaagctaatataataagtgtgaaactacatagagaaaatgaagatattctatttgagaatgtttagataaataagaatagatcacaccactgcctcattgttgacagaatgatgctttcttatactagaaactctttatatacaattaaattatctcttgttctggagacagccacatttacaataagcaaataacaataaatttattattcacacatacaaacacaaaatcattcatccttttctttattctcttgctttccaaaaactctattgtcaacacttaaatcattgtgacattgattgacattgatatgtaccaagttagagaaagttagaaagaaagatagcattttaacaagttgtctaagaaatgggcttttttgtttcttatgctgacagttgtattctagctctgagtcctgtgagaatgtgctggtgtggccagtgaaatacagtctttatatcaatttaataatgatacttgatgaacttgctcagaaacaccaagaggtaactgtgcttgtcaccttcagcttccatcctcattgattccaacaatttgctgttaaatttgaggtttatcccacatcttttactgagaatgaacttgatttcatttttatgaaattgatcaagatatggacatacaagtttccaaagagtacattttggcatatgattcaaagatacaaaaaacacatattatgaatgttctgatactgttcaaaagctctgtgagtatgctgttttgaacaagaaacttataaggaacaacaagattccagaatttatgtcattcttgcagatgtcatttctcattagtgagctgctatctgaacagcttaatctgttaaacatttgttatacatttggtctactatcatccatttacaactggcagtatgtaccaagaactctgtggaggactttcattacctccttctgatgtagctgttgtcatgtcagaacttagtaccaaaatacatttacagaaagatgaaaaatcttttgcattttcttcattttaactttgcatttgataattttaacaaaaagaagtgtgatcagttttacagtgaagtattaggtaagttagtggttaatttattcccttttccctccaatatgtggaaggaaactttcctttctttgtgtctgttagagtgtgttaatgaattaaaatagaaaataaccttttttgttatttgaaagatgaggtttggcaagttggtggagacactgaaactctcatacattgttggtgagaatagaaaattattcacccactgtgaaaaagtctagcaattcctcaaaagtttacacatatatttaccacataattcaataattgcctttctaggcatatacccaagaaaaataaaaacatgtctacagaaagcatgtacatcaatgttaatcaacgctattcataatggccaaaagtggaagaaaaacaatgtccgtacactgataaatgaataaataaattgtgtttataagtagcatctgatactatttggcaataaaaatgtgaacgctatttataatggccaaaagtggaagaaaatcaatgtctatccactgaaaaatgaataaataatttctgcttataagtagcatctgataaaaagcaataaaaatgaaatccttatatacactattctatggatggtcctttaaaaacattaaactaaataaaagtagccagccacaaaagaccacatattatatagtttcatttatttttaaaaagatcctgaataggcatatttgtagaggcagaaattagattactggttgcccagtacagtgtgggtgcagaaattcaggtggggagatgacagttaatatacaggattttttttttttttagataaaactgattgctatgttggatgcacaagtctgtgaatttactaggaaatatttaattttaaataatcattcatgaatcatatggtatgtgaattatacttcaacaaagttttacaaaatattccttgaaccaagatattcaaaaattctatttgcattgtataattacttcatctctcattctgtgtcaaggggcctgcaggactctctcacttgccactgttcttgacactattataaaatacattatataaaacacgatatttgcaaggtcattaaacttaggtggatgacaccaaatataaacataaaagaaacatcaaacatccttgagtaaatatgaagtaatcgaactttgtctccttgccatccatgtactcaggatgctcatataatgtatttactttgaattgaaggagttatgttttaacttgattgatttttctctgtatataagtatgagaaagaaacagtgactggaaaagaattatcacattgcacaaggatggctctgaaatggactacagttctgctgatacaactcagtttttactttagctctgggagttgtggaaaggtgctggtatgggccgcagaatacagcctttggatgaayatgaagacaatcctgaaagaacttgttcagmgaggtcatgaggtgactgtactggcatcttcagcttccattctttttgatcccaackactcatccactcttaaacttgaagtttatcctacatctttaactaaaactgaatttgagaatatcatcatgcaattggttaagagattgtcagaaattcaaaaagatacattttggttacctttttcacaagaacaagaaatcctgtgggcaattaatgacataattagaaacttctgtaaagatgtagtttcaaataagaaacttatgaaaaaactacaagagtcaagatttgacatcgtttttgcagatgcttatttaccctgtggtgagctgctggctgagctatttaacataccctttgtgtacagtcacagcttcastcctggctactcatttgaaaggcacagtggaggatttattttccctccttcctacgtacctgttgttatgtcaaaattaagtgatcaaatgactttcatggagagggtaaaaaatatgctctatgtgctttattttgacttttggttccaaatatttaatatgaagaagtgggatcagttttacagtgaagttttaggtaagatttttttcarttagtaacatgaagctctaacttatttgtgtctttgaagcacaacttgcataaagccataaagtcagggaagtggagtttttgrtaaatgaatttatgaaatgaaaatacaagatgatctaccaatctcacaaatattatagaaaagcttaaattatrgggtcagtgaaaacgctgtgaccatcactcatacagaacaccccaggaaatcataaacctatatattagtacacctaagactttaagcaattatatatctgttttactatagaatgtttcagatcttaaaaacagcaagatccgtcaagtaacatctaaccgaatgcatagatttagaatgagtaattacacatttttctacaactatctatataactgcagaaakttttccttctaaatctcagttgtcttatttagaaattaaaagatgttcccatgttaccaggaggttgtcttcacagtagagagagataatgtctatatctcagatgcaaaaatcaataagggtaatttgaagtttcaaatgtttctatactccttcactaaataattggaaatcttttatttaaagtccaatcatcttgttgaagtgtgaaggttgttatatctatatagtttatttgaaactatgtctctttatttaaaaatacgagactgattatggtcgagtacagatctctatttcaataatttctcaaaaatttctagctataatttacaaatatttttacttaatattattaagatcttagcttggatccaaatgagtagttggtacaatgatttcagccatactcacaaaatagtccacagttaacttgaagaaccaaagataaaaggattagcttaatgagttgtgtaaactagactatttgttagaaaattgtttctatggttactgtagaattaattgattatggagctcaaagatttgtttaaatatctagaggctactattgaagctttaaagagaaaataaattgatgtttaattctctatgacttattttaataattgtgagtatactgacatgacattagagatgtagcttaacctcataattctcccactactttgcctttcttataaataaacaagggcaaaatatagaatacataaaaaataaattattcctatatatgaatatatgtacatatttttcaaagcacacaaactttaccaacatttttgcctgcattattctaacccctttcagaaaattacataaagtaattatcttaygtcatccacttyttcttttctttattcctrtcaggaagacccactacattatctgagacaatgaggaaagctgacatatggcttatgcgaaactcctggaattttaaatttcctcatccattcttaccaaatgttgattttgttggaggactccactgcaaasctgccaaacccctacctaaggtaaacatactttcgttggttttattttgttggcttcaaatttcagtagaaatgactstatagtcttcattcagagtgtttgactaacactgaaaaagatgggaagtaggtggggtaaagcagataccaattagaaactcatgtacatgttaataccatcacacgtatgtgagttttatgcatgttacaaatagagaggaatactaaagaaactttgaaaataggkttggttaaattaaagtcttgattatgcaacacctaagaaggtattggtcattcattcaaagaatatttacaaagagattatcacaaaacacaggtaagtgcacaattttcagagaaaaaaaatagacacagtttctgtccctacataccttacattctactttgaaatatagaatataagtaagtaatgaatattatataaaaactattatctcaagaaaaaacccaatgctaagaaagcatcagtggagataatagaaagtatcctggagtcactgatgagtacgatgagagctgaacaatatgcaggaatagggaaaagaatggtggggagagacagacaaaaagggaaagcagataaagtggtcaggacagttctcaagtcctcaggtttagtttgcagggaatgattaagaatcagatgacsctaaaaggtaaattagagccagataygtattaggagttgaaatatttattaagaacattgaaaacatcctaaaaagagttcagaaataaggatatatgaaatgattctttttataagaaaagcctccaagatattcaatggattaaattgcagaagggccagactgtaaagaccgaaacattcaggaaattttccatggattcaggtagcagatgatgaaaaagtggactacactgttgatagaaataattatgcctacatttacaaaaatagtgccaacttcatattgtgttgtgtggaaaaaaatattaacacagacaaaacacttaaaatgtctctggcatatagtcagtgactcagaaatgttattaattttgcaattatggttattttattactaatactactaactacttaacatgtgcatgtcacttgagatatcattcctcatttaagagaaccagattattcagcacatcaaggttatattgtcttggaawgtcatagatgacagatacccttggacttgattaaaagtagacatatcagttgtgacagcaagataagctagttgaaattttaaaattcttccataagtaataaggatcttcaccagtattccagcttaaaacacttcctcaacaatataaatgtgtgcctcaaatatgtgcagacaaacacagggttcacatgattttaataaagcatttaaatcattctgcattgagatcccagaattttacattttagagcataaacatatcctattagagcagatgatttctgccttatgacaggccactcaataaagcttcctgggggaactcgtcttgacatcataggtgtctgacagagaagcacagagataatgaacaatgcatgtataataaagaccaaataatttctgccacttgtttctgaatagtgcccttartttcaatacgaaaaaaaattccgtcagcatataagattatattcttttcgaaggaatacaagaacttcatatattttaattaacatcacattttaaggcatatgtaaaaagtaaggcttcttcaatggattattatgcaatctcttaaaagatcatttttgcttgcataaaactgagaatttgttccattgttaaaactcagtatctatgtttaatgcaagttgtataggctttatagagtcagtttcttaagagacaaaagttgaggtaagactaatgaaaaatatatrccactctaccctactcttgaaagatttccccactcacactaagggaaactgacagtgccagtagaaggaggaagagagtargacaatgtagaaggacaagaaaaaaaggttgactggtagtacaatagtggtaataactaatactagctcttgttattaacttgcagaaagcattgaatgaaagtcaatggttgtgaaaccagttctttaattgtttattatgtaaaatatttgctaagccaggttgctttcttttcaattatatattagattctcagataatttctatatattttaagagaataagacacttgacaaaatgtatcaggtgttttaaaaatacatattgttattagttttataatatagtcatgtgaaatcataaaaaaattaatcaaggtgtaccttttaaacattatggaaaatattcacaaaattaacattggaaktaatccaacatgttacatgaaataatgattagaaacatatgcctacaatagcactaaaatrattttatcaatgaaatgttcaattatgctgtcagccataatacacatacagtgaataagaaaattataaatataacacgatggcaaatttttgcaggaggaaatgtatataaaatgagattaaaattttctaaataagtgtcrtgtatgtacattgacctatataagtagggcaaaatccataataaaaaatacataatttctataaataatatctctagatagaaattttagaaaaaattatttttaaaaaacttttcttactgttataaaatttcttacattaactttgtagtatttttataacattatcacaaaaggagaaacaaccagtcaatatcagtgatgaatctctacacagaggttagattccttcaacactgcatagaaaaacaaggctctggcatcaagccagtaagatgaaacactgaacacgagttacattaaatgtggctacaggtaactgcaatcacacacaatacctagatgccccaagtattatgtggaatagtagtacagggactctcacgttaacttaagattacaaatcacattttaaaaaacgttctgccatatgtggtgcacagtttacacttagacacattttttctatgttttgttaaaaaccactggggaaagttttaccccaatgattaaatctgaaagtatttaaatttatatattggcatacatyggggaactcaagtcagaataattctcaatcaattgcagccaagcacatcttcaccaggagtgtaatgtggtgtgcgtgagctactcaaaagagagacaagatccccctgaagaaaggcctggtggcctctcctattctggtgcaagtgctgcctctgagacacaacaaagtgatgatgagagttcctcacatgcagttagaaatagcacatcaatttaacagtgtgatttcagggcaayacgtgctccacctaaacaataacctgaaaggtacaattattcaactactaactataaactgtacaattctgtattataaatgagactctaaggactgattcataaatattccaaatcacaatactagactccagaatgtcagtgattcttaacccccagcttttattttttattttattttttgaaaaactactggaaaactctgacaaattttaagtgaagcaaaaagcattgtagagtaacgtaaatgtagatataaaattatcccaactgtgagtagcttttcctcagtactcatagttagggaagtaaaccactaatggcttcaaactaaaagaattctacagaaaacctgcctgaaataaacacaagtgatttagtagaacaaaaatatagaattaaaccctagtggtgccacttttccaaggacttatagtagcaattatagtattataagtgaagatctgggtatatgttttaacattatctccctgactacaatgtaatagctccttttcttttctccattacacacatrcagacacatacctacatacacacacatatttacacaaatatccttaacagaggccaactatctcatacatcttcttgcaaagaaacagtgattgagtcagttaaaaaatattatttactccaataattcctcaaaatacttgattttctctctttaatattttgtaccaattctttcggtagtgcctgctgtggtgatactcttttatgatraaacattttttctttttcccacmggaaatggaggagtttgtacagagctctggagaaaatggtgttgtggtgttttctctggggtcaatggtcagtaacatgacagaagaaagggccaacgtaattgcaacagcccttgccaagatcccacaaaaggtaagataaagtgccttactggtgtggaaaactactgaaagaggctgttaaagtttgtgatctacatagaaagaatattaaagagtagactgaactatttatagctgaatacaaccttaaatatgcttgtatagcatccactgacagaagtaatagttgtgcctcagacttagtgattacatgtggccctggggtagttactacccttggtatgcatgagtgattcctattarcatcagtgggaactcagtactccatatgtatccacaaaagggaacttgagacccacarttayttttaatttctgatrttaacagtcatacctactgctgaatttaactcaatatatttcagttaagtgaaaatggtgcttaatgtagtctttagaatgactttcaggtgttttcaactaaaaatatatatccagaactgtgttcttgtagaaatacaagtaagatttatgataattttcttcaaaagagttttcctaatctcagcagtatccaatgggtgaagaacacttgactaactcttgggccacctctattacttattgtactctggaagcccttggtgaatgtttacaattaaggaatgtagtatttctgtttgtactttaagtcaaatgcttatatgaaatatgtggcaacaaatagagaagactggctctggtggtcattatgcagtatatactctatttaaggatcagtggtagtatagcatgatygaatgtcattaatataggaataataactggcatatgtggagagtaggggagtaaaaagaatgaattccagtcctgtgattaaaagtgtaaactataggatgggcatggtggttcgcgcctgtaatcccagcactttgggaggccaaggcgggcrgatcacgaggtcaggagatcgagatcaccctgaacgatatggtgaaaccctgtctctactaaagatacaaaaaattaggcaggagtggtggtgtgtgcctgtaaccccagctattcaggasactgaggcaggagaatcccttgaaccaaggaggcggaggttgcaatgaggcaagatcacaacattgcactccagcctgggctacagggccacactctgtctcaaaaaaagtaaactagtaaactagagactctactgtagtatatttcaggacctagaagttttacttttataaacatggtgcctggaagatgtcactaatgtattttacttcagcatagggaacaaactttttaagtatattaataaatattcctgtatggtaagtttttaaaattttttaaaataaactttatgaatatgacaaataaaaaagaaagttcgggcctaaaaattagagcttttgggaaagcactaattatctcagatattagttcaaaatcaaaaatatacatggatgatgctataataataggctgtttttcattgataataagtttggcattaataatatgaccaggaataaatttatttaagaaatgtagatgaagtatcgatattatcatgttatwgggatcaggtaagagttatcaccaaattctgcccctgtcatttgacccttttgtttaagaattcctgagggcactgtacacactacagatgttatcagaaaaagttacgttttaatgggtgacttcagtagcacaataacaatagcaggtatttcaaaaagtctgacatgcatcatgcagtttaggtttgccatattatccagcctcagatacttcctctacattttggcataggcctatctgaatgatgttcaggctactattcagagaaagagtggcctaggccaacagacaactagtccaagtacccacacaaccaggtagatttagagaaagagaaaaagcagcttgccctgctggactgggcccagccaatatctgaagcaggcaggtgaaaaggaaaaggtgcagatggatcctgacctgaaggtggatcctgtccagtataaaatgtggccccacaaggactcagcactaattaccagattaacaacccctcccaatggacgcagcagaaggaaatataggaaggagacaaacagaaggaagccaggcaggggaacaggttcagatgccccctccatagaacatagtaggaatatattttcttctatatagaataaaccagtgacctttgtccatttgtcaattactttctaatttcctatctgataaagctttcttgtaatggcctctaaattttgcttaaacctgagttactttaacagtgatgtagcaaataaaattaaacactgwaaattattgttcagtttatgaggattgctttggagtttcaaaattagtaacaacataaaaatgtcttggytatagaagaacatattaatcactgttgtcaaagctttgtagcaccttgtctaagtgttaataatctgttgaccaaattcagcaaaatacaattttgaggttattsaaaagctttatttttattcatgataccaacatgttccttatttctatgccaaaaaaatccaaaattagcaatactggttggtaatactctgaatttgtgtcaaaaattgtcacttgaaatttttcttggaagtagtgcttgataatttgtaattccaatgaagttatacataaaacccttgcagcatttatttatttcttgtagtagcttattttatagacttgctattttgtcaatcaaaggacaacaggctstaatataataacttacagacaagtagatatattgraactactcatattactcaaaaagaaacgaatacattacaattaaatttggagatgaaaactaacataaaatacataaaacaaaataaacatataggtcattactaaattgttacttttttttataccagaattacaatgactccctataattttttatactttttttataatatttttatttttttaattaaattaacttttatttttaacttttattttaagttcaggagtacatgtgcaggttttttacatagggaaacttgtgtcatgggggtttgttgtactgattgtttcatcacccacgtattaagactaatattcatttattatttttcctgatcctctctttcctcccatcctccaccttccaatacatctcagtgtatgttgttgccttctatgtgtacatgtgttctcatcttttagcttccactcataagtgaggacttgttacacttggatttcaattcctatgttagtttgctaaggctaatggccaccagctcaatccttatccctgcaaaatacatatttttattctttttatggctgcataatattctgtagtgtatatataccatattttctttattcagtccataattgatggtcatttaggttgatttcatgtccttgctattgtgaatagtagtgcaactaacatatagtttcatggatctttatgacagaacaagttatagtcctttggttatatacctagtaatgggattgctgggtttcatggtatttttgcctctaggtttttgaggaatcaccacactgtcttccacaatgattgaactaacttacattccaaccaacagagtataagcattccttttctatacaacctcgccaacatcatgatattttttgagtttttaataatggccattctgactggtgtgcgatgttatctcattgtggttttgatttgaatttctctaatgatgtgtgatgttaaactttttttcttcgatggttagccgcaggtagttcttcttttaaaaagtataaaaattttctaaatacttgaacttttcattgataatcttatttttctaaggtattactttggaaaataatggtttcttatatacctaaatcattataaaagttcagaaaataaaatgtggttattctttttgcatcagtctttgagtagatttatttactaacatcccttgatttcatttctactctttttacagttctaacattttataacttttgagttccactcgtggaataagatattctctttactgtaacaggttctttggagatttgatgggaataaaccagatgccttaggtctcaatactcgactgtacaagtggataccccagaatgaccttctaggtaacactctggtgaacaatactggatatattagtaactgcacattagagtgttaatagttcatctcgaagcatgcttattgaatatttgttataggaaaacaaaaaagaacttctttatatttattttccagtcctaggggaaaagaatatgttataattgttggcattttgtgatacacactcacattctttgtggtcagaatcagaggtaatctttatttcaggtgctattatatctcacagaatttttcaatatcttcctgggctgtcyctctgtctcctgtttctacaaytttacacctgttttctcctctcctgcagggttatttcaaatgccastaaatataatagctcttctatcaccagtgactgtattttctggaggactaaattcctaatcttaaagtaatgacacatttcatgatgaagtgtgacctgtctttcctcaatcttagcaccaccaccaacccactgcctgctgccttgcacaccccacatatcacactctgtgactgtacttagaataacacttcatttcatgcccatctctttgctgtcctcttttgtgcacattttaaaaatctagaatgctctttttcattagtccaactggaaatcttgtattaagttttgcagtctgaagtcacaccaccatatagccttcagttacatctccaacacaagtacctgttttttcctctgaaatctgaaaagtaatagcaaattagttcartgtgttatctagaaaacactgtcactttcagagcctttcattgtgcatctcattttattcctatgaataattttgctaamattcatccaatcctaggtcatccaaaaaccagagcttttataactcatggtggagccaatggcatctatgagrcaatctaccatgggatccctatggtgggcattccattgttttttgatcaacctgataatattgctcacatgaaggccaagggagcagctgttagagtggacttcaacacaatgtcgagtacagacctgctgaatgcactgaagacagtaattaatgatccttcgtgagtagaacaatatttttcactagatggtattaatagatagcttttcttgtcagtagtgagcatgagtttcatcctttttataagagagtgattttgaaagaatttaaatgatttaaccaatccgaaatctgcttttactttttatctgttatttaaaaattgtatttgaaccccatacatctaatgagtaaccagttagtgaaacagttttctaaataaaaataattttaaaatgatatagataatataaaaaaatacatttcttaaaaatttgacataatgaatccatagtagaaaggaagaataatcttgaaataatataataaaatgttttaattaaatatctaaaatgtctcagaatataactattttcttgcagaaaaattaatttttattattatctttattgtaacagacttgaaaatgagatttaattttgatagcataaaacccacctatttatggcaaaaattccaaatatttttactatgtttacagagtcatgaagtcatcaccagtgtataagtttggaacatttttatcaacgcaaaagaaactgcagtgacaccaaaatcacctcccatgactgcttagtcatagtctaacaccaatttgttttctttctctatagattattctctatagatgtttcatataaatggaatcatacagtctagggtactgtgtaaatgacatttcacctagcctaatttttttttatggtttttagtttaattcatgtcgttgtgtgttttaatatttaatttcttttacacttgtataatattttttaatatagatacgtcataatttagttgttcatttatcagttcattggcctttgtgtaaggagggtatcatctaaagaaatactctaaaaatactttatcacaaagacaatagaaggataaagaatgatcaaaacacctttaaagaagatgggaaataattgaatagaaacacaaaccaacttggacaaatagaaaagaaatataaaacaaagtggtagatttaaatgtgattatacaaatactttcactcaacctaaacagacttttttaaaaaaacaagcaaataatgagtaaggacataaaacgtttgaagaacacaattaacaaatggaatcttataatgtaaaatgatatacacacatgtacatatacaatacacatatakgtatcgtatatatcaactggaagacacattttcctagagcatgttgaatagttaatagtcatttgaagtggcatgtggtgggaaataaatcaagacttaggaaatataaaaagattcaatatcataaagactatatgatccagccatagtggaagtaagggaggttataaatactattactaaaatatctttaaattttggaaattaacaaaatacacttcaaatatttaaagtcaagaagtaaatcataattatgcatgcactgttatctcagcaattctactctcaattatatacccaacagatatgtataaatatataaatctaatggtatatagaagagtggtcatgacagaattatcaacagtgtccaaaaagcgttagcaacagaaatatctattcaacataaaatgaagacatagtttgtgctttatcmatcaacaaaatactacacagcaatggaattacccaagaacggttacactaaaaaaaataracactaaggagtacatattatataattcaattacataaacaagcaaagctagtgctgctattcaaagtccggttattctttagttggtggacaaaagtggtgacaaaatggttcagaaaaagagagctattctaggcaggttgtgatatcctgtaccatgaactgaacaataggtaaattggtatttttgcctcaagataatgttcaagatgatcttccatttttgaactattcacttagtgtacgtatatttatcttttgtattttgtatttaaatatatattttatgagatatataaatcattttaaaaattctaggaatcagatagaaaataagcacagtaaacagagaaaatcctagaggttccatcagattgtggccagtaaaagcctctcttagaggtaacacttagagggaagccacaaaaagggagagaagcatgccttgggtatagcaagaaagaatactccaagagcgggagagaagggataaaatgtgtaaagtgctaagatgagaacacctttggaagcttaaagaaaaatagtaggccaatctagaagacagtgtgcaggtaaaagtgttagaaaaagaccttgccagtgtctaacaatgtagggttctgtaraccaaataacagagttggattttattcttaaaataatgagaagccaggcaaaaatcttaatcaggggagtgccataatctcactttagttgcaaaacatcattctggctacagggtgggaaacagtaggagacaaaagagtaatctagaagccaagtgactagctatgaggcatgtcactcaccatgataaaattcctttttaggaacttagagatgttaattctcagattgcattttcacatctttcttrcagcacttaaaatggctcatgatgttgagcacgttctaatatgcctgttttagaactaatagtgtaatgtggaatgtgttcataatacaaaggataaatgcttaaggaatgaatatcttattttccatgatgtgattatttcactttgtatcaaaacatctcatataccccataaacatatgcacttaatatggacccacaaaaacttaaaattaaaaaattaaaaacaaattaaaaatgcctgatactttctctgcttgaaaaaaataactttctcacctgactttccttttctactttaaaaatatttgtcaatgagaaaagtccaatttaaaagccaaactttgtatgatgactcaaattaaaatacataaattctatatcaattctttgacatttactttgaattatttgacactttaaaagcctttcatagacttgatatctacaggcaaattaacttactttcagtgtcggtatctttatttttatccttcagatataaagagaatattatgaaattatcaagaattcaacatgatcaaccagtgaagcccctggatcgagcagtcttctggattgaatttgtcatgcgccacaaaggagccaaacatcttcgagttgcagcccacaacctcacctggttccagtaccactctttggatgtgattgggttcctgctggcttgtgtggcaaccgtgctatttatcatcacaaagtgttgtctgttttgtttctggaagtttgctagaaaaggaaagaagggaaaaagggattagttatatctgagatttgaagctggaaaacctgatagataggaatacttcagttgattccagcaataaatattgtgatgcaagatttctttcttcctgtgacaaaaaaaaatcctttcgaagtctaccttgtcaagtaaaaatttgtttttcagagatttaccacccagttaatggttagaaatattctgtggcaatgaagaaaacactaggggaaataaaaaataatataaagccatatgagcttgtattgaaatttgttgcacttatattgaaatgtgatcatggctcacttcagcctcaacttactaagctcaagaggttctctcacctcagccccccaagtagctgggaccataggtgcatgtcaccatgtccaactaattttttattttttgtagtgatgagatctcattgtgttctccatgctgatttcaaactcctgggctcaaacaatcctcccattttagcatcccaaagggatgagattacaggtatgtaccaccataactttacaaaatgagatttttatataagaatgattcaaatgttcagggatgaaagagtcactaacataaaagaagaatgggatgaggtgagaaggatgaatacaaaaataattagatattcttgaaatcagaaatgtgctccctaattatatgaaatgttgtttgattacataaaataaagtggaaatgaatgattgactgaacagcccacaagaagaatcacttaatgctctgaaaattaccagtaaactgattaaaatctaaaattgctttctgttaaagctttactgattagtttttcttccaaagctctcttgtttctagttgttttcttggtcttaactacccattatatgctttgttaaagtgtttatgccctgattcaatgtgattatctcaatttttatttcattctgtcctaactcttgcaacctgcatgtcctctttattattgatcaatccaactgcaaagttcaccttacctgactaaggattattcattaagttttacttgtttatctgacatttattattttgtctctttgctagtcactctgagccatggtcatgatgacttaggattctggatctcttatgaataacaaatttatccttaataaagtctctatactaaagaagaatctaatgaaaaatatcacttgataaaatgagtgcagtacgtgaacaaatttctgactggatcataaacccaaaaagtgattaatcaatttattatttagggactaacaatgaaatcaattatatatcattatataatttgaattggtaaaaattaatatttatcataggtaaagcacaaaataactggcgactccagtgctggtttgttgggagtatgaatagagtggtgataggtgaagggcacccatgggcccagcacaacaagaatccctctaaccaggtccgagctagcaactactgaaatcaaaaatccaacctactagtatctcaatttttaatatatatttggacattagacaagtgaccaccagtggaactgtggactcagtggctcaaatctaagctcacctttgtctgaacctctatatggcccccaactttcaaaaaagaaagtcatgcctcctactcatccaaactttaccaagattcagtgtcttagggtacaacttaaaaataataacaaatgagaaatttgaaattttatgcctcaccagttttcaatttatcgtccctcatatcctaatacagctttatgatactgaatcaggatcctgtaagcattcctcctttgccagctagttgaaagttaagcttcatcaatagaggacactcgagtgatggtgaggtgcttgatgcaggaaggtgcatcccttccaagactcacactttagttattcagtaatgtttatcattaatattggagtttaagaatatgaatgttaaagaatatatttaagaatactaaagaatatactttaagaaggcaagaggaaaacttctaatagcacatttgttttaccttttattaaatattgcattctgcatagaaattaattcagaaaactcctacataaaccatttatatgagtcttttgtaatcactgaaagaaatagactgttgacagtcaccttttaaaagggtgtataccattcaactcttaggtataccatttattattttgtttcctgcaaactcaaagcatctaggagtgagattacaaaaataacaacaacaacaaaaaagcagtgttggctaatttgtcagcatatggaagttaaatttcttacagacacacaacttctgtgtaaatgtaaatcacttggccattctagctctattatcaaatttatagtttcccagagacaaacattgctttggcttttgtctggttttggatagttggttgtcttttctcttcatgcttccttatctcctttatttcatttatttttaattaaaaaacaaagagacaggaattacctatatttcattgttgaaggttaaattttgtttgtatttgtaccttagttccacacttttttctttctggaaacgtatatgataaacatatgcttgaaaacaaaggattacatggatattctgaactcccaaaaagagaatctcatgactaagccaatttcacatttctaattagcatacttgctttcattgagtgttttgaaatttaactaaacataaaattaaaaaaaaaaaaacctctaggctagtgtatatatagcactaactaaagagaggaaaactagaattacagtaataacaaaattaattgaatatcataaagaattacatgcaggttgttagactataatattaaaatcataattaccttttaactataggaaaactctagtttattagaaagactacataaatctatgcttctacttttatgttcaaatacactgaatagagttcctatacaatcaaatacgtggagaatactattgagcatgaatcttctctttcttatatcattccccaatttttatgttcatttgagctaacgtatttaaaatgtttcctttggagtcatcagaatatgtctcaagatttcaaatcctgcaatgtggaatagggacttaatgcactatttttattttattattaacaaatgacaagcaagggatatgttactaaagcaatagaaaagatcactaggcaaataataagttgtgtccacatacacaaccataatgctttccaaattgttatgtaaatctaatgcctgttatgcaaattgaaaaatgagattcaaattccaaatggaaagccatactttctccattgtgtgaatagcttcttataaggattggaggttctactgactttttgtggaatctgagccaggcctgaagtgataagatcaaccttttcttctgtaaggttttgcacaactgactccagagaaaacacaacaacaccatcctcatcagagctctggacaaattcttccatttcctacagaggaaaaactttcttcattataaagatgcaatgccacatagaataatatagtttatgtatacttctaaaataaaattttgaagttgacatatatatagttatatcatccctattttctgaggtgcattttagaatagaaatgttcaagtttgtgttagaaacatatggcttcagtacataataattatttactagaaaaagcacacaaccaaataattataaagaacatttaagtgagaaatgtgcagctcatttaatatttaatagacatcaaattctaaaaacataatggtttgcaaactcataaaactatttcaacaatatcaagtgtcaatttgctggcattttgtgatgtcaacaaaataataaaattttaaaaaccccacatcaattcccccacaaaagtacaactagtagctatccaaatacacaaatgtcactctgaattcaccagatctcaagagagaaggagaaaaccccaagactcacggacatgaaaaacttatgattggtaagatgaataattattttggactgtaccaccccccttccacacaccaaaatgataccactgtgagagaatttccttttacctgcggttactgaaatgggaagagggaatttcaagtggacatatattctatgcataatgatatgcatatctggtcaagaaaagcaaaactacgtaacacacacacacacacacacacacacacacacacacacacatattctatgttccaaagaagctgagattacaggagtgggccaccacacccagctactttttgtatttttagtagagatggagtttcgccatgttggccaggctggtgttgaactcataacctcaagtgatcctcccgccttggcctcccaaagtgctgaaattacaggcatgagccacgatgcctggcccctatctaaccctattcttgaaaggttttcccattctcattaaggaaaatgatagtgccattaggaaggcaaagatagtaggtggagaaggagaacaagaaaaagaatgactagtagtacactcatgataattactgataatagctgttattagcttgcagaaagaagatttgaatccaagtcaatagttgtgaaacctgttctctaattctttattacataaatcaattgttactttacccctaattgcttgcttttcaattgaatatgagtttcttttaaaatttctgtatattttaaaagaataagatatttggcaaaaagtaccaagtgttttaaaaatgcattggagtcataatatgttatataaaagcatgcagagaaaacaataaatcaagatgtatatattcaatatttatggaggatattcataatataaacattggaagtaatccaaacatcttaaattaaggaatacttatactctgtgtatgtcataccatcacaatcattttatcaaacaaatattgttatttaattacactggcacccataatacaagtttagctggaaactgaggatctaaatgacaaatatagcaaaatgtcaacttatttaaagatgaaaaggtacatgcaataatattaaaattttcttaataaatgtcacatatgtacattatattatataaataaaataaaaaccataatgaacatataccatttttacattggtaatgcctctgggacagaaattataggagcattttattttctttttaaaacttttcatatgtttataaaatttcttgcattgatcttttttttttgaaatggggtcttgctctgtcacccatgtgggagtgccgtgcacgatcttggctcactgcaacttccacctcccacgttcaacagattctcctgtcttagcctcccgagtatctgggattacaggaactcaccaccacacgtggctattttttttttttttttgtattgttagtagagatgggttttcaccatattggctaggctggtcttgaaatcctgacctcaggtgatccacccacctcggcctcccaaagtgcaaggattataggtgttagccaccgtgctcggctcttgcattgatcttgtattacttttgtaaagttttcacagaatgggaaaaaaatagcccacatcagtgatgaatctgtaaacagaggatatattattttaacactgggtagatgaagaaggctctgggcatcaggccagtgagacaaaacactgaatacaagttacattaaatgtggctacaagttactgcaatcacatgcaatacctgaatataccatgtattacctggaatagtactacaatgactctcgtgttgacattgaggtcttaagattaaaaatcatattttaaaaaatactcagcaatttgtggtctgcacagtcaatattttctttcttcatttgtaaggaacacttaagaaaaagttttaccccaatcattacatttgaaaatatttaaatttaaaaattggcatagactgggaaccacaagtcagaataattgtcaatcaattccaggcaagcacatcttcaccaagagttgaatataatgtgagaaagctactcaagacagttaccagaactcctctggagaaaggcctggaagcctctcccactaaggtgcaagcactccctgtgagacatagtaaagggatgatgagaattcctcacacccagttacaaatagcacatcaatttagctgtgtgatttcagggcaaaatgtgtcctacctaaaccttgacctgagaaatatgatcattcagctatgtaaccatttactgtataattctgtattacaaatgggagtctctggcccatttcacagaaattccaactacaataccaaacacctgaatgtcagtgattcttaatcaccagcttttaataacgattttttttggtaaaaatactggaaatttctgacaaactttaagtgaagtatgagggatatagtccaatatgaaatttgatggtgtgtgtaaacaggaaattcaatgaaaaatggataataattataaaaaatgacaaaagttattgatgtttaagaaaacaaaaatgaggtcaataaatcattatcctacaaaatatttgcaacctataaaaacctgagaaatctattcttgaagaagtataatgtaaattaatcttttcaaataaatttaaatatatcatttgaaactgaagttctacatctagaaatctgtcatgcagaaatccttgcacgtaagcacatgtatgaacaggatgtttcctccagcacttaaatggctataagtcaatatcttcaagatatttctgggatagtatttatttcctctatgtggggcccatttgtgaacatctattttatatttaaacatctataaataaatatatttaaaagttttaaaaaatattagcagttatagaaatctaaattcacaaaattttagtaatttttctgatttctatgtcaatatacaataaatattacaataacttagtgactgctgctgcgtacttcaacaggttttatatatggtgattttgagatataattcaaatactttgacaatacttctgtcaagtcatattgtttttctttgaactttggcaaaccttgtggctgtttcaacaaagagaatgcagtagaagtgatatagcttaactttcaaggctctcttagaaaagcatacattccttctt

SEQ ID NO: 93742 - DNA, 47129 bp, Homo sapiens
tggtggtgcgtgcctgtagtcccagctactcgtgagctgagatgggagaatcacttgaacctggaagatggaggttgcagtgagccgagatcgtgccacggcactccagtctgggcaacacagcgagactctgtctcaaaaaacaaaacaaacaaaaagcataataaaaataattacaggagtggctaataagcacctgctcaacatcactaatcattaggaagatgcaactactctaagccacagtgagataccacctcacacccattgggatggttactgtaaaaacaaacaaacagaaaataacaagtgctggcaataaggtggagaccctgggactcttgctcactgctggggagtgtgaaatggtgcagccgctgtggaaaatggtgcagcagttcctccagaaattagacagacaattaccatatgatcctgcaggtccacctctgggcacatccccgagagaatcaaaagcagggccttgaacagatgtttgcacgctgtgctcatggcagcattactcacactagcccagaggtggaggcaacccaagcggccatagaggatgaatgggtgaacagactgtggcgtgtccataccagggaatgctgttgagcctcagagaggagggaactctgacccatgccacagcatgcggggatggtgaggacattgtgctgagtgaaataagccagtcgcagcaggacagatactgtatggtctatgagggacccagtgtagccaaattcatagagacagcagaatggcgggtgccagggactaggtgttgggagggggaatggggagttcttgtttaatgggtacagaatttcagtttgcaaaatttgaaattgggattatgactataattggggtctagaactgttctatcatgcaaacccccattgccctgtcccctccccacacccctacccctggcagccatgagagttatctgtccccacaggtttgcattctggagagtcccctacaaatggaatgagactgtagatactcgctggagaccactgctgtcactcagcacaatgcctctgagactcgcctaagtgccacacgtgacactagtgtttgtgttgttaatagtattccattgtggccgggcgcagtggctcatgcctttaatcccagcactttgggaggccgaggcgggcggatcacgaggtcaggagattgagaccatcctggctaatacggtgaaaccccgtctctactaaaaatacaaaaacaaaattagccgggcgtggtggcaggtgcctgttgtcccagctactcaggaggctgaggcaggagaatggcgtgaacccgggaggccgaggtcatgccactgcaccccagcctgggcaacagagcgagactccgcctcaaaaaaaatagtattccgttgtatggctctcccagtgtgtttacccattcactgttaaggagattttgggtgtttgcagtttctagtttaactagaactgctataaacatctgtgtgtgggtttttgtgtgaatacacattttcagcattgttttgcgccatcacaggggaaaccttctttttttttgttttgagacagagtctcgctctgtcgcccaggctggagtgcagtggcacaatctcagctcactgcgagctctgcctcctgggttcacgccattctcctgcctcagcctcccgagtagctgggactacaggtgcccgccaccatgcccggctaatttttttctgtgtttttagtagagatgcgtgttagccaggatggtcttgatctcctgacctcgtgatctgcctgcttcggcctcccaaagtgctgggattacaggtgtgagccaccgtgcccagccggagaccttcttaatcagataacattagcttcaaaatgaaacctgaaaactaatcaaccaggcctccgtcttcaccctgcagtcatttactggaccagaacttggaagatccagccactctgtttctgtagtgatgtcaaaggaatcatcattggtttccccatgtgaaaggcaaagcttatttgttaatggcaacatgacgtgttaggatcaaggaaaggtccattccgcagttttcacaattcccagagctcttgggaaaggaagagttttccaagtttgatcctcatgatatcaaaattaaaatgttcttacccaaaaaatgataactcctgttattagcttattattattattaaactgatactgagtgtcagatggggtgaacagattaatacaaagtggcatctctatttagatgagtctttcattaaacaggaacacacagagtaaaacacactggaatggccctttctccagcttccaatagggaagttggattgattattatgttggcagtggagcaccttccagaagaaacatgagctagaaatgatacccaagtctttaccttacccttagcaactgacagaagtgaagccattgcagaaggctctcttgctaataactttttttccccagcatatttctcaatgtgacagtattgttctgaatgatgaaggcaaccacttttcatttggattcagaaacacttggaagcagtgataatatgtcttttcttttcttcttcttcttcttttttttttttgagatggagtctcactctgttgcccaggctggagtgcaatggtgcgatctcggctcgctgcaacctccgcctcccaggttcaagcaattctcctgcctcagcctcctaaggagctaggactacaggtgcacaccaccatgcccagctagttttttgtatttttagtagagatggagtttctccacgttagccagtatggtctcgatctcctgacctcgtgatccgcctgccttggcctcccaaagtgctgggattacaggcgtgagtcactgcacctggccgaaaatgtgtgtttttaaaactaagtgaagataatacagttagggatcatgaagtctaatcccattttttttttttttgagacagactctcaatgtcacccaggctgcagtgcagtggtgccatcttggctcacggcaacctctgcctcccaggttcaagtgatcctcccacctcagcctcctgagtagctgggactacaggtgcacgccactacactggctaatttttgtatttttttatagagatggggtttcaccatgttggccaggctggtcttgaactcctgggctcaagtgatccccctgccttggcctcccaaagtgctgggattacaggtgtgagccactgtgctcagctggatctcatttttaaattgaggcatctgagtcccggagggctttgattcccggcccaggcttctttcctttgggtatagatttagcaatactctggtctgacccaggcagatgttcttgttttattatacatagcgatctctcttgttagaactcaattctaagctcatgtcttattctatgttctaattgtgttaacaggcatatgtgcattgtcgtgtatggtgctcagtcatctagggaggaggagcatcctagaatgggagaaagtatcatataagagaaagaacgctaacctcaggtagctctgggctgagattctagctagtagctgtgttatccctaggaagccctagtttcctcatctgtaaaaatagcactactggatcaaataattgggtggattaatgtgtgccacatactgagatagaggtgtcatctgtctccatctatccattcacctcagtgttgaaagttgaaatagattgaatgaaaatcacaaaaagggtatgggatcctgtatttgttctattaagaggtagcatatttcttggtaagtgaagatagacccccccacacccccgcgaaaagaattagaacattgtcacatagcagttcctcttctggggttgtatcttactgaagcacttgccccaatataaggatgtttgttgcattactatttgaggagccaacttacctaaattatctgaatgtccgcaagctggaatgatccaagcctctgtgtgctgacttggacatcttcccataatatttgctttctggaactaaaaaaatatataaataacatatatatatatttgggatcttaaacctgcatattaagatctactggtagatgttagttttatctgaaagtttccacataaattgtgagcaccaatgcccatctcaaccatttggttgccctcctcaaccagtttggttgatccaatgccagcgcccagctcccactgcaggcatcaccacacgaccctgatctggcagacgctgtgcacagggacgtctacgggggtgggaggatgggttccagggaaactgttctttcttaataaaaaggaactgatgtggttggagctgcccttgctcccctctttgcatcttcaacgtgggccagatgttcagaactgcagtgacattttgtgcccccaggatgccaagcaaggggcacaatccagccgaccaaggatgacagagacgagacagagaggggtcccagtggaaccaagaacagctgaatgaacaccagccaccacctcctagtgcactcctggtctatgaggaaataaacccccacgtgtaaattgctctagttgttctatttcttgcagctgaacacattctaatcgacataactgtcaggggaaaagaccttcagagaaatgtgcatgttgtactgttttgtgaaatgagattatgtatgattgcacaatagttgtgagcacattgaaagactggaagggcggctgggcgtgatggctcacgcctgtaatcccagcactttgggaggccgaggcgggcggatcacgaggtcaggaaatcgagaccatcctggctaacacggtgaaaccccgtctctactaaaaatacaaaaaattagccaagcgtcgtggcaggcgcctgtagtcccagctactcgggaggctgaggcaggagaatagcgtgaacctggaaggcggagcttgcagtgagccgagatcacgccactgcactccagcctgggcgacagagtgagactccatctcaaaaaaaaaaaaaaaaaaaaaaaaaaactggaagggcaataataggtaacaaagtactgagcacctactatactaggtacatctcattgcagccactctataagatggatgcttcacggttatgctcatttaagagtgagacaactgaggttccaaggggtttaataactttctcaaatcatgcaaccaacagatagctagcttgggactcacagccaggtctggctggccctagagaaagtgcttccaccaccatatgcaccccaccagtgcctactggctgcacagaccgccaccagccctagcagcagtgatttctggagagtgggatgggagaatgggctggtggtgaggaggtttgtctttatccacttctttagtgtttcctttttaacaagcaatttttgttacaaaagtggacatccagagatattgacaaaataacactggtgccaggaactgtgctaggaatataatagttttcttccggatctggatctctactgtggatatccactggtcatacatgcctactggaaataaaaagcattctttcctaacttattccaaaccctggctaaaggaattctggggttgccattatgttactatgtgacctacgtcccagataaggaacctgcgaatctgccacctccgccctcgggagagccaggccctgcagtcactatatgtgaagaatcctttggagcctggaataagagggttttatgcatcattttttaatcaactggatttctcacctcccacctgtgcctaaatggtggcttcttggtatcttgaaagggggtgctcagcaggagaaagcagctccatgtttctgggcagcccgtcctatttacagactgctgcggctccctggcagctgccacagtccccgaggccagagggagttccttgagggccccagcagttgtttgagtcatgtgttttgggcccttttccttagagatcctggcagggccagcacagatttcttatcggcttccacactgcggagctgcagccctcagaagtaagcaaggtttcctgccgggagaaaaggatttgaagcattccagccaaaatgacggacagaagccccttcgaaaccgacatgctcaccctgacccgctacgttatggaaaaggggcgtcaggccaaagggactggggagctcacccagctgctgaactcaatgctgacggccatcaaagccatctcctcggctgtgcgcaaggccggtctggcccacctgtgagtcctggggagcaggcatggggcacagagcaccccaggcccaggcaggggtgtgggagctgcaggtgctttggcaagaaactgggtccaaagcttattggccctgtgtgccctagatggaagctgcatttcaagttcctatcatgtgtgctttgataaaggggcctttgacttgttttgagaaaggaacgaaaacatgctatgaagaaatacacatataatttttccagttattataatgataccaagtgcagtggcttgttgcattaaaatatgtattgtgttatcatgacttgtacttgcacagagagagtctcactggaacaaagaagtagaggggtgacgtgaaatatctctttatgcctyttgcagacatgagtgttttattgtaataagctttgcaaatatgttaggagctggaaattatgtacgacataggaagcttggtagagccccttcctgcatctgctctctcatcatctaaaggagtgttttgctggctacgtgttttatttcttctctgtgactctttctttatcttcacctccacttggtgtgcaggaagccaggaggtgctagtcctgggaggggagcgcagaggtttcttccacagggttctctttggtgctttatcccagcayagatgaggccaggttcacattacactgctgatggtcacagcccagtgtccagtttaagtctgtaataaaaagaatccggtggccaggcacggtggctcctgyctgtaatcctggcactttgggaggccaaggtgggtggatcatgaggtcaagagatcaagaccatcctggccaacatgttgaaaccctgtctctactaaaaatacaaaaattagttgggtgtggtggcgggcgcctgtagtcccggctactcgggaggctgaggcaggagaatcgcttgaacctgggagatggaggttgcggtgagtcgagatcgtaccactgcactccagcctgggtgacaggacgagattccatctcaaaacatacaaacaaacaaacaaaaccccagctttctttgggcttcccttgtagtaattccaggggaggtcctctcaggagctgaaggaacacatattttggggatgaaagagactcaaaatgaggagctaacaaagtccaatcatttaaaatatttactctgagcaattaagtgcttttaacacaaaaagtgatagcattagattacaagatgtaattatcatttgatcaccacagactgtatttatttaggggtggtgacccagtagcaggacccaggttaacggtgcattatccttgctttttycctgtgggtggatgcttcagctctgtttttacctcatttggcaataacagccacgctctgcatttaatcgccttccagaatgtgagggcaggcggtgccctgttctgctcctgtgggtgacagccctgctgagtgacggtagacagggactttgcctctccctgtgcggaccctgctatcctcaatgcggttgcctgagtccatctcagggtgattcatccacataaattgggctccccctctgtgcagggctcttggctaggcagtggctgccatggtaggggtcttgcttatctgctgcaaaactctgactttatggcggttgagcaaggagacaaagtggccctaggaactggataattgaggtgcttattaatttggcatttcctaccgtgtgataatgggcgtgatttactcttgctaggaccttagattccctttgtgaaatggagagtatagtagcatccctaactcttagggttgttgcagagttagcgagcgcatgtgatgacgatttcaactgtgccggccccgtaagacacgcacagtgcctgtcactaccgcggttccaagcccagaccagatttgcctgtgcctgagccgtcaatgaccactggcggcatttgaggagcctttcagccccccactgcactgtgggagccactttctgggctggccaaggctggagcccactccctcagctttcagggaggtgtggagggagaggtgcgagcgggaactggggctgcgtgcggcgcttgcgggccagctggagttccgggtgggcgtgggcttggcgggcccgcactcggagcagccagccagccctgctggcccccggcaatgggggacttagcacccgggccagtggctgcggagggtgtactgagtcccccagcagtgctggcccactggcgctgcgctcgatttctcgctgggccttaggtgccttcccgcggggcagggctcgggacctgcagcccgccatgcctgagcctcccatccactccatgggctcctgtgcggcccgagcctccccgacgagcgccaccccccgctccacagcgctcagtcccatcgaccacccaagggctgaggaatgygagcgcacggcgcaggactggcaggcagctccacctgcagccccggtgcgggatccactaggtgaagccagctgggctcctgagtctggtggggacrtggagagtctttatatstagctcagggattgtaaatacaccaatcagcaccctgtgtttagctcaaggtttgtgagtgcaccaatcgacactctgtatctagctgctctggtggggccttggagaacctgtgtgtggaaactctgtatctaactaatctgatggggacgtggagaacctttgtatgtagctcagggattgtaaacgcaccaatcagcgccctgacaaaacaggccactcggctctaccaatcagcaggatgtgggtgggccagataagagaataaaagcaggctgcctaaaccagcatcggcaacccgtttgggtctctttccacactgtggaggctttgttctttcgctcttgctgctgctcactctttgggtccacgctgcttttatgatctgtaacactcaccgcgaagatctgcagcttcacttctgagcccagtgagaccacgagcccactgggaggaacgaacaactccagatgcgccaccttaagagctgtaacactcaccgcgagggtccgcggcttcattcttgaagtcagtgagaccaagaacctaccaattccggacacaccaccaccacccaggcaggggaccgcaagcccctggctccttttggggagatctttctagcaagggctccgtgaatgcaatttaaaagttatgagagtctccttttccccttctctttcctcttcttatggtgggaacaagagaggctggagtgcccgcctggagcctctccttggctttctcatggccgtgggggatcattcctttagagactgttagttagctttagtgtcagtcagaacactgcaagatactgtcctacgggctagagagcccctttcmcccatcatctcaggtgaagctattgcygggaactcacatctcctggtgagtttccattctttctaggaggaggggtgctgcccagtgcctggagagagggtgcagggggtcggctgaggggtggggttaggcggatgagggggcatttgcaaagcgcaggacagaggctgtttctcagctctgcccaccgcaggcctgggcctgctgttcatyctccagtggcaagcgcrttcagattccatatcgaaccaaggcctgtgtttgtggtcccctgaaactcagatgcagtcagcctagttttgttgctgctgttgcttgcttgcttttgtcttgaccaggaggcacagtctttggggtgaggctgctaggagtgttttccaagacagctgactgctcacgtcatggttcctcagacaccaaatgatgtgctgtgggtgggggttggtgttggggggtgaggtgggggtgctgttcagggaagagggtgggaaatgagtttgcccccagcttaaggtagatcagtggttctcaaccctggctacctgttagaaccacctgagatttccttcaacaaataaatagcattcacatcagtaggcaaaggaaattcctttcttgccatcctttcctcataactcagtgagcagacatggagcatgggctgtgtgtctgggcactgcagaaacagacagaaggatggatcctgccctctgcaagcaggtcatgcagcaggaagccagtccgtgagtgtggtgaacactgaggagggatgatggggtgtttctggtgtgtggggcccacttgagaggaccagggaggcgtcccagagaggaaaaggaggaatagcaggaagaaagccgggcagagagcactgctgtggtgggaacaccattagtgaaggcgagaaggaccagagccgcttgctgggtgctggcccagggacatctgcggctgttggaacgtgagagggtggcggggtggctgagccttgctgtagtggtgcagggtggacacatgaaggatacggcttccctcagaatggaaaaaaaaatcctgccattgtggaagctcacagacaataaacaggacctagatggtggtcagggcagaggagaaaatgcatcgagtaagatgttggggaccagggaatgctgctccaaacagacggccagagaaggcactactgagagatgatccttgagccaaagcttgactggggtggccgtcacatggctcttgaggaagagtgtcccaggtggggcagcaaggccactgggcagtcagtcacaaggcaggtgtgtgccttggaggtttcagaggctggggctgaccctgtgaggatgagagagacgggcagccatgccaacccgggcgcagagattccacggtggtgcctgacacccacttgcggggacttggattttgcctctgggtaagactgggggcactttaggaggacccctcctgctggtgtgttgagaaccccctgaaggggcgagggtggaagtggggagacctttgcatatgaatgctctaaaacccaaagcctctagatagaattattttgagggtctccctccatcgctcargctgcagtgcagtggcgtgatcacagctcactgcaacctccacctccccaggcttagatgatcctttcatctcagcctccaaagtagctgggactacaggtgtgtgccaccacatccagctaatttttgtatttttttgtaaagacagggtctcactgtgttgcccagactggtcttgaactcctgggctcaagcgacctacacgcctyggcctcccacagtgctgggattacaggcacgaggccctggccctgactggcatagaattctcgtagtagcactctcttatactgcttgggatggcagtgaagaaaaaaatgaaataagtctgcccccacatttccttctcagttcaagtaacaccaagctaccacagggcaattttaattcattccagcagggcactgtgtgaggacaatccacaaagacttgaaattccagggcttggccgggcatggtggctcatgcctgtaatcccagcactttgggaggctgaggcgggtggatcaccaggtcaggagatcaagaccatcctggctaacatggtgaaaccccgtctctactaaaaatacagaaaaaaattagccgggcgtggtggcgggcgcctgtagtcccagctactccggaggctgaggcaggagaacggcgtgagcccaggaggcggagcttgcagtgagcagagttcgtgccactgcactccagcctgggcgacagagcaagactccgtttcaaaaaaaaaaggaaaaaagaaaaaacaaattccaggagctggaggccacagtcctttacttttggagtcctcagttatggcaatgggtctgatttgatgagtccccccatctgctccatctccycgtgctgagactgggtttgtgttttagtgagactgagtcctgggtcatctcattggaaggctaagaaaatatgacaacgactccaaggtgtaagggaggcaaggctgagaggtatcctgccaggcataatcgccttcttctgcacgtgtgacttggagactccagagacacagaacgagaggggactgcactgctggcgttttagggtcccaggctctttgctggagttaagaccccctagtgacttcctcattcagccttttgtcttctcaggtatggaatcgcaggaagcgttaacgtgacgggagatgaggtgaagaaactggatgtgctatccaattccctggtgatcaacatgstccaatcctcctatagtacctgcgtcctggtctcagaagagaataaggacgccatcatcaccgccaaggagaagmgggtgcgtcatggggctgcggtgcccgctcgccagtagatgatgatactgagccggaaataagctgccttrcttttctttaattcccgggattctcctctatttcttaacatttgttttctggaaacaaaggattacatacttctctacttggaaatcttgtgctgtctagagaaagaagactccacagtaggacagtgattcattcaggaaattgttcagagtgatgcaggaaccgcctcagtgggcgcttgttcgtggctgttcacttaatcagtaacaagagccaaatttttgggggcttaaccttgtggagtccagggaagagctgtactgtacagcctctcaccgccccgccttctcattccacccccgcccccagccggcactttgcgaggggttacagtttcagcagagatttcttagtgcctgacaagctgttagrctggtccagaaacaaaaccacaagcctcctgtgctcttacctcgtaggatggtgaagtcggtgaaggaaggcacggctggggagggtctgcattcactatgggttcacacacagcttattatacagagaggtttgccaatggccaaaagtttcaatcaatgttcagctgcaatatagtcaatagacaagaggccatttctttgtgattagctggaggaatggaaaagaatttaaagtaaagccaaatttatttaacctctgctctatgccaggtactgcaaaaggcacttttgccctcgtctcacataattttagctacatcacactattacttccaactttcagtttcagttgatatgactcttgtttctctctccagtctgatctaccattgtcttctcctattggcctaagccacatagccacataggtcttcatgtcagttcctttatttatttatttacttatttatttatttttttgagacggagtcttgctctactgcccggctggacaggctggagtgcaatggcgcaatctcagctcactgtaacctctgcctcccgggttcaagcaattctcccgcctcagcctcctgagtagctgggattacaggcatgcgccaccatgccccgctaatttttgtgtttttagtagagacggggtttcgccatgttggccaggctggtcttgaactctgacctcaggtgatccacccgcctcaggctcccaaagtgctgggattacaggcgtgagccaccatgcctggcccgtggcagctcttgaatactccaaacctgctgatctctctgtcgaaaattcttctttctaggatgggcgcggtggctcacgcctgcaatcccggtgctttgggaggctgaggtgggaggattgcttgagctcaggagtttgagaccagcctaggcaacataaagatacaaaagataaaaatttagctcggcatggtggtgtgcacctgtagtcccagctactcgggagtctgaggtgggagaattgcttgagctcaggagtttgagaccagcctaggcaacataaagatacaaaagataaaaatttagctcggcatggtggtgtgcacctgtagtcccagctacttgggagtctgaggtgggaggattgcttgagcccaggatctctaggctgcagcgagctctgaccacaccactgcactycatcctgggcaacagagtgagactctgtcaaaacaaaacaaaaacaagaaaacaaacaattttgctttctaggtctctgtgtgtttcttcattccttaattctagtcaggtctgtcatcaaatgtgaccccccctcatggctctccagcccccagcctatgtgggttttcgttagggcacgtgccacagcctgcttgtatgtgtcctgacctgtgtgctctctgtctgttctcccactggaatgtcagtgccatgaaatccagccttgctgccgggatcgctgaccccccggaaacaaaccccagggccttgaacacttacttcccagcatatgctggaagctcaacatgtatctgctgaatgcatgcatgcatgaatgaatgggctaaattggatttttttttwaaaaattggattattatagagatgttggggaatttccaagtttacaaattatctaacttttctactctggctgagcaaggaaaaaaaacagaaacaaagctcaaatgaagctaggccaatactcattggaaagtcagggaaaactaaatcaagtggagggagaaatgaccctcatttctcttgaagttgcattacccgtgtttaattggcctgggggttccggtcgccatcactaagggtctctcgtgaccttgcacacagggggctataaaaaggacctggggcttcccttggtggcttgagctgcctgtgayagcagagtgggtgggtgtgggggacgttggtctctcaagacacacccactttatcttctggtcttcgcatcagacaggtgagatggatacaaaacccagaggagtatttgtgtataaactggcaccctgccctccgtaagtcatggtgttttttgataaagatatgctgtggttctcaatctctttttgatgtggtgtactctgccacgcacagccctgacacagagcaattgtgctaatgggaagatgtgctgaycagttggtgctttcctctctgatttaggggaaatacgtggtctgctttgacccactggatggatcttccaatattgactgcctggcctccatcggaaccatctttgccatctatagaaaggtgagtagacaggctgacattttacacctccttcctgtggtggtctctggaaggttcctgggctgaaaaccgtgtgtttggagtcctaccctttgtcttcccactaacgagaaaagccactgtaggcaaaccaccaacttttctctgcctggggctcctcattagaagaactggattggcgattctttctctgcctactttctggcattcctgggagggtaacacagaaggacagctgagatcttgttttgaaagtctgggtgcaacacaaatgtcagacatggcattaggttccaggtggcattctgaatctctgacatcctctccccctcttgcctcatctctcctgtccccagccacagaaagttttctgctaacgctcattggattagattgaactaatctaacctggaaggtccacrgtgatctccctatttgaaatctgaacccctgagtacacctgaaaagtctttgttgccatgtaatgctgggtattcacagatcctggggactggcatatcttttgggccattctgcctaccctgaaatcctagcaacagagagctgggtgggtttgtgacatccagcaggactagaaacttcacaattcagaaaacttgtccttcattctatataaagtgtacaacggcaataaaatccatagcaacctcgccagctgcggtggctcacgcctgtaatcccagaactttgggaggctgaggcgggcggatcacttgaggccttgaggctaggtggtcgagaccagtctgggaaacatgrtgaaaccccgtctctactaaaaatacaaaaattagccagggtgatggtgcacgcctgtaattccagctactcaggaggctgaggcaagagaattgcttgaacccaggaagtgcaggttgcagtgagctgagatcatgccactgcactccagcctgggtgacagagcaagactctctcaaacaaacaatccatagcaaccaaagagaaaaataagcagagtgccagttacattgtatttgagagtcttctatgtattaggaagttgattaaaccgtgctcttacagagtcttgagatagggaatctatggcagaaatatgagtatttaaggcctgtatagtttgggttatattgtgagaataatctggtagatatctaattctcagccttaattcatgcacaagtgttgccttgggttgtagttaggatatctaaagccatatgatttaaagacattgtgggattaagacatagtagcagtttgcttttctgtgtcttgtggggctgagggtatgttttgggcattattcaggaagtatgtacagcacttagttttacttatacttcatggtccccactgtcaattatatttggggttcctgtggggcttgayaacaggttggcaaaatatacatatttaacaggctgggcatggtggctcatgcctgtaatcccagcattttgggaggctgaggtgggtggatcacctgaggtcaggagtttgagaccagcctggccaacatggtgaaactccatctctactaaaaataccaaaaattagctgggcatagtggcgggcgcctataatccctgctactcaggaggctgagacaggagaattgcttgaacccgggggcagaggttgcagtgagctgagattgcrccattgcactccagcctgggcaacaagagtgaaactgtgtctcaaaaaaaaaaaaaaaaaaaaagggggctgggaagggtggctcatgcctgtaatcccwgcaatttgggaggccgaggcgggcgaatcacgaggtcaggagatcgagaccatcctggctaacatggtgaaaccctgcctctactaaaaatacaaaaaaattagccgggcgtggtggtgggtgcctgtagtcccagctacttgggaggctgaggcaggagaatggcgtgaacccaggaggcagagcttgtagtgagccaagatcgcgccactgcactctagcctgggtgacagagcgagactcygtctcaaaaaaaaaaaaaaaaaattagccaagagtggtggcatgtgactgtggtcccagctactcggctgagacatgagaattgcttgaacctggaggtggaagttatagtgagttgagattgcactgctgcactccagcctgggcaacagagcaagactccctctcaaaacaaacaaactatacacacacacacacacacacacacacacgcacacacacacatatttaacagattataggaggagctatgaatatttatgaagatggtcctgacatatgtgtattgaataaatatgcatgtatgacccatgtttattttggggtggaatgtattccatttaggtcctgtatatcaaaagatctttctaggacataaaggcacacagtgtgtgctttctgtaaactggccagacctagcccatggttggtggtcttttatcaggagagctactgaaatttagtcttttgtctaattaaagctgtagtcttggctggtggaacaagagcctgggggtgagttagtcagctgatcttaaggccagcgcttgtttggctgctagagaaaaagaaaaacctatggcagttaggacatggtttcctcttcaaaataggagtgagtgactaacccttgcctggcgtggccttaggtcccgtttctaattgggtattttattgtgacaaacagcctattttgtcaatcttagggttttcagttgtgcctaattccaaaaagtgggggaaggtatagggaggcctgtctgatcccgcttcctgccatggcctgaacttgtttttcagtttatctggggatttccttcggccaagaggcaggtccattcagtctgttgagaggcttaggattttattttagtttatattctcccttttttgtcaaggtattccrggggcagtattgatggccaagcttttattttgtcccatgtggatgctggggtggtatggttaccttcccagggtccatgatgttcctcgatgggacccctatggcccagggacttagagtcaaaacagtggaagccagttaaatgttccaggccagatgggaatggaggtggccaggcattcattaaccttaaaaccccttttaagcaatgtaaaagccaaaaacccaaagccaaaaggcaagcttccaaaattgacttatctacaaatctatacatcgagctactgtgagcttggctagtagcacttagctgcacaaracacaagccttttgttcagctgttgaagcctctctgtgtccgtcctggatttggaggctctgaattaatttgatcccataagactggcccttactatgtcagacgctcacttcttccactatagtctttaggcctgggggattgaatagtttcaattctggaggtaaaacaaaatacaaagaattagtaatgttttaaagtatcataagcccagcctagttctgagaatgacaggaaaggaggcttataggtagttaagcattttaattatttggtattaaggcatagaataaatcatattactttagacagaggcaaaattaataaattaatcttactggttttgactacaaggctgtccttgtgtctcattaaagcaggtgactttgattgtcacctttgcctggatccagagacaaggctttggttagcttgagtttggtatcagatactggcaggagccaatgccttctttagatgaaatatgtgcacccaggagtcaaagccctgtaacttaactgcacaaggatttgttaatagtacctgataagggccttttttagggactagaggtagtgatactagagactttgacctgtctggaacctgtaaaatgattttaaaacctagtggtgattaatttttatagctttggtaaaccccagcagaaagtcagaaacttaatttaggattcaattttgaaaaagttaaagatgttaaaaggctcaaaacaattgattaaaacagaactgtaggtcattgttaaacaatagttgctcatttaaccagagtgataattgaaagattgaaaaggcaatccaggctgggcatggtggctcacacctgtaatcccatcactttgggaggctgaggcaggtggatcacttgaggccaggagttcaagaccagcctggccaacatggctaaacactgtctctgctaaaaatacaaaaattagctgggcgtgttggaccagccacttgagaggctgaggcatgagaatcacttgaacctaggaggcggtgattgcagtgagctgagattgtgccactgtactgcagcctgagcaacagagcaagattctgtctcaaacaaacaaacaaataaaaggcaatacagaacgttatatggttgtacaaactttaacccttttagatctcaacttttctaagcaattaaaacctaataaagacaacataggaattattttgataaaatgtaaaatgttgtttcttaagtgaattaccagacagggaaagaaaaacctgcagtgtagctgcttctctttaggggaagcctatttggataacctggaagtcaaactgtgagtgtatcagggaaatagataattctcagtaactgcatgagaagctttctaatcatattgacaaatttagacatatcaaggaaagtacagaatcaagtaataatgtaggaaaacattgcttttctagacctttaagataaaatgttttagtgccaggccataataataaaattggaggaaaaagatcacaagagttgaggaaaaagctgaatgagagagttatcctctcaggccttctcaaggggagaaaaagctgaaagcagcaagacacagcaaagccaaacttctgagatatgattctgagaagtttttaagagaaagaggttataaaagtaaaatttcttgttattaggagcaaataaataccttaagacagacaaccttgctttaaacatagggggctattataaagaatccccttttaattataggtaacttaatcacatgcaaaattcttttataaattctccacaaactttaatacaatttatacaaaccatttatgacatgcttaaactttttgacttgtcctgaattttgtttctttagatatcagtcattatttttaggacaagaatttaccatacaacttttttttttttttttttttttttgagacagagtctcactctgtcgcccaggctggagtgcggtggcataatctcggctcactgcaagctccgcctactgggttcacaccattctcctgcctcagcctcctgagtagctgggactacaggcgcccggcaccaygcccggctaattttgtgtatttttagtagagacggggtttcaccgtgttagccaggatggtctccatctcctgacctcgttatctgcccgccttggcctcccaaaatgctgggattacaggcataagccaccgtgcctggccaagttttttttttaatatataaaattattctctcttttaaaataaactttatttttttttttttttttttttttttttttttgacagagtctctctctgttgcccaggctggagtgcagtggtgcaagctccgctcactgcaagctccgccttccgggttcacgccattctcctgcctcagcctcctgagtagctgggactacaggtgcccgccaccacacccagctaattttttgtatttttagtagagactgggtttcaccgtgttagccaggatggtctcgatctcctgaccttgtgatccgcctgcctcagccttccaaagtgctgggattacaggcctgagccaccacgtccagcctataaaattatttttacaatacgaatacaattcatagaattatatagtcattagaatttttatttctactaactttaaattttagtggaaacttagtaagcaagaagtcctgaacggtttgtcagatgttagcattttatagatgaagtcatttcacaattttagaaccatgttttcccatattttattgtaaattagtcccataatttattataatttttaaaaaattagaagtaaaccagacatccaataagcatttattatttaatttaaaataattttaagattttaaattacagaaaaaattcacttaaaaaacatatttcatttatgtgtatttaattttttaatctttaagtttatctagattctttctgaaaacagatattatacaaagttagtcattatttaaagttatttccctgttaaccattttaaaagtccgaacattaggtgaacacctaagtaagaacctcaaagttaaatccatggtcattttgccaatagctcagaggattcagttgctttcattgaactaacaatcctaacttagtcttatttgtcaaaaaaattacacaaagattactctgtgtttggctgggttataatcttacaatctttgcgccaaaccctgacactttaaacatttagcagagacaaatacaaaatttatttgcttagacacaaatgtatgctgatgattctgaaggcatttttgtttttattttactaataatttttgaagccagttttatttatcaaagattcatgcgaacttggaaagcatttgaacttaatttatgtgtactcacttacttataaagccaatttggtagcatgctagacacgacagaacataactataacatgtacattacataaacatatctaaacatgtatacatccatacacaaacaaaggtctaagagcttttatctgagaactctaatcatgagatagcatcacaaactcactgacctataaaagctggcttcaagttgtttttctgacaaaaytggaagctgtccacgtggctaactttgtttgccctgataggtaatccaaggaaagctggcagccaaaatttggggtaaagcagtctctatggcagtttgggtttttttctttttaaatcttttcccctttttgctgttcagtttcaaatgagttttcaatgtttatattcaatttagaccataaataatgagtcttgtctcgcgccagcagtttaataacagcagatttaaagcaggcagaaaagagaggaaggtagagagctaaagaagattctacttaactccacagtgtaggttaaccatttgaactctgaatttttcttgttgtaatttgcccatcagtttaaaatgtgcacaaaaatgggccagaatatgtaaccagtcccagagaagatgacaaaatcagaggccatgatgttggaaactgtttttctccttcaaggctgaacccctggattggacaggaaatgagaaaaagaaaagaaagagatgtagaggacaaaggtcaagttttacaggaaggaagaggaaagagaaaggaaggaggggaggcttgtgagcctttcagccactgcaaggcttggggtcagtaccctcaccacccrggtgtatctcctgtcagggagagcctcagtgccccagacctacatggtgtgggatgaacccttcccacctttgcaagtcaccagtcaaggtgaaatgtttctagccagagggagctgtgggtgcttttggccaagaggaataaggctgtgggtgccccaagattatcaggaggatgacttggaagaagtggggggagggagggctgagtagagtcccaaatccctcacctcagtttccaatgcccccccaaccccagccctggaacagcctgaacccagcaaggccccaagggtgccacaaatacaaacaaatacaaatgcataaaatgctcaaatggtgtcactagtggccaagtctaaatagagcagagtcccagtgacatcccaaaagaggcagayggtggtcaaatgcactccgactaactcaccaagttccraagtttcaaagttccaaaattccaaagtttgtcacttctctaaaagtcactttcagtgcaccagtgaaatattggaggtagcaggcactgcagcaggaagagaaagagaggatccccaagacaaaagcatctaggcagctgcaggagactccctagcattccagccaaggggtcaggtagccacaagcaactggagcctacaggcagccccacaggccctgtccaatagaaaccagaccatgggcttgggcccccagagcacactgtatgggccactaaaattgtaactgaatgcaggtccacatgctcactgcctgcagagtccagttaacaagagtgaggcctggtagatagaaagtgactttattaaccacaactagtaaaggggaagtggccagattcccatcaaagcaaccactttgactatttcgggggaagggaggggtttaaaagaggaaaacttgattaaggagggcatgcaagagaattgtgctgagtacagtatctctgggtcttgtttttatgattatctttggtgccagtccacctggacctcaggctgacatcatctcaacagtggccgagttgttaattagctgcatggaagtaatctctggaattttgcagctaggtctccatgcttggtctgtcygtctcaagattacctcctggaacttctaagaaggcacataatagatactagcatgcagttagctaaatgtgcagggagtatatatggtgagaaagggagctattttatagctaagagaaaagrcttctgcagtttgcttcaaggttatatcttgaaacccaagagaagggaaaaatgttttaaaatatattatgaagttaagctgcccagttacgttaggaagatggaaattaaaaccacagtgagacaccattctcctcttccagagtggctaaatctaaaaagactaagcataccaagtgttggcaaagaaactggaattcttatacctcattggtgggactatcaaatagtataactactttggaaaacatttgataggacctactaatgctaaacagatatttacacactatggccaagcaatttcactcctgggacccacacagaagaaaggaattctgtgtctgcccaaagatggagaaattagtcatagtagccccaaaccrgaaaaatccaaatgcatatcaacatgagaatggagaaataaattgtgatatagtcatacaacagaaaactacatagcaatgaaaaagaacaaactgctatgtataacaacataggtaaaattgcaaagaaataaacttgaaaatcataagccatacaaaagaacatatgcagtgtcatttcatttagatgatgttccaaaccagataaagttagatttggtgataaaggtgagaatagaggttacctttggcaggaggtgatagtgactggaagagactactaggcctggcttcactaggcttaaagtccactaggttgctggaaatgttatataaatggatctggatgttatgtaaaatattctrtaaatacacataagtgtatattatatatttgtaaaaatttatcaagatgtaccattaagatttgtatgctctgctatatgctttatacctcaacaaaaaggaaaaaagtccacatttcataatttctaccaccaaatacatggagctcttgcaattttcattaattttaccaaaaagtagtggtaggaagcaccacttatctgatgggctcagatatttattggtgtagaaaaaaataaaaagacgcactaaatcatttgcaaactactataaaatttactgagaaaggtgtcatggcaatgaagattgctgatataaactgggtttttgaaatctcaggaccgtgttagacaaatacaaaaactgaaccattcttttttttccatgcatagaaataaattacagatgagttgatgagtttggtagagaggtggggaataaaaccagaaagaaaagacaagaatatttgtgtcaccctgtcttgatgtaggagaaattcagtctaaacataaagacaagagaagaaaacatatggaatgtcatgaataattttaattttaaaactgcactgcaaaaacaggcaccataaataagaaggcaatgacaatcgaggaaaatatttgtracatatacaagacattaatatcctttatatataaagagctattaaaataaacaagaagttgaatatcctgatagaaaaataagcaagacatgaaagagacaacttacaaaataaaaatggtcaaaataaacayataaaaggttttacctgactcataaaaaatagaagttaaaacaaaagagatgtcattttgtccacctgtcaaattgacaaagttgaaaagacaatgctatcttgtgtttaccrggctgaattaaaatgaactctcttattattagtggtaaaagtataaattgatgcactctttctggargacaatttttcaatatgtatcaaaagatttttacccaattatttaattattgggaatttatcttgggaaaatgatcagagaattgtgtatttatgcagtagattgttaatctcaggttgccttgtttttcaaaaggataaaaagagaatattagaaacaactccacatgcatacatttgacaacttagatgaaacgaaccaatgtctcaaaaactacaatactctaactcacccaatataaaatagatactttgaatggctatctacagggctcaatactattaagaaactcatgcccaagaaaagaaatctccaggctcagatggtttactggaaaaacataacaaatattcacagattattcagtctcttccagaaaagakaataggmaggaacacttcccaattcattttatgaaaycagtgttatcctgatacaaaaaccagacaaagattgttcaaaaaaataccacagaccaatattccttatcaataaatgcaaaaactcttaacaaaatattggcaaatagaattcaacaatacataaaataaattatacaccatggctgagtggggtttattctggtgatggaagactgatccagtattcakaatcagtcagtgtaatccaccatatcaacaggctaaagaagaaaaatcacayaatcgtatctattgatggagaaaaaacatttgaacaaattcaacactcattcattatttaaaaataaacttgctgaggtaggaggattgcttgaggccaggagtttgagaccagcctgggcaacatagcaagacccccatctcaaaaaagacattagctggagagsggggtggtagtgcatacccgtagtcccagctactcaagaagttgagatgggaggatgacttaagcccaggagttggaggctgcagtgagccatgaccaagccactgcactccaccctgggcaacagagcaagaccctgtctctgaaaaaacagaaagtcttagaaaacaagaaatagaggaggagcgtcccttaactctatcaagtacatctacagctagcattacatttaatggtgaaagastgaatgcttatactctaagatcagtaacaaagcaaggatgtcctcactcgccactgttacccaacatatgtaatcctgaaagttgtagccagcacaataaggcaaggaagatgatgaaacacatacagattggaaagcaggtaataacactgttcttgcagacgacatgatggtctatgtagaaaatcccaaggaacctacaaacagaaaaccaaaacacttctagaactagtgagtttagcaaggtcacaggatacaagatcaagatacaaaatcaactagatttctatatattagcaataaactaattcgtaattataattacattttaaaatatgtgctatttacaatcacacaaaaaatggaacagtataaatccaaaaaatgtgtataggattcttatgctgaaaatcactrcatgtatgcatgtatatatgtgtgtgtgtaaactcatgtgtgtgttgtgtgtgtgtgtgaattaaatgcaatatctgtggactggattgtgctaggtgatgggtaaacagacaggaacaagacggagttggtacttgccaccaagttgctcacagtctagctgggaagtcagacactaagcccgtgaatgaaaatgtgttgggagcttcagagaagcagctctgagtgctcatggygtcaagcrctggaagaccagaccatgaggtcagaacatggaggcaagaacattcgggtttacaaagcttctacgtacatcacaacaatgctgtactccarttctaggtttctggaggagagactcacattgggccagtttgaatcacwaatctatgaatctatccttgaccccatcaaataagtgtgcgtgtgtgtgtgtcgtgggagacggggtaactcaatacaaatgwagcagctaagagtccccattttggataagggggtgaggaagaatcattttgcaccggttggatgtaccaagggccacagaaggaccagaaggagcaccaacatttaaggaatcagaggaagaggtgctgccgggaagagargcaagtgagaaggagcatccacagagtcagagagaaaggcagaatcagggcttcctgctgctgggcgagttgtgcagccgctccagctgcagtaggttgttaatcttaggtggttttgctctcagagttctccctctgagccatggaggtgatggtgcyatctgccccaaagggctgttgagtgtgcagagtgagacactgcacgctcagctcagtgatctgagttgtgagtatcgtggcttgggaacatggcttatgatgaagaggggctayggttttagcatctgggagtgcttttcttgtcaggctacagasacatgcgtttggaaaacaggaaggaagaagtccaagaatggcctttgccatggctcagctagaactgttggcaacatggccactcgtttcctctggatggatttgcagcagcttaaaattcaaagaaccgygcttccttcagtgattcraggagatctgaagcccaggcccctggcaaagtgttctctccagagacaacaataacacatggcatttatccctctcttccacagacctcagaggatgagccttctgaaaaggatgccctgcagtgtggccgcaatattgtggccgcaggttatgcgctgtacggtagtgcaaccctggtggctctctccacagggcaaggcgtggacctcttcatgcttgacccggtaggtacagaatatggcatcatctgtgcctggggactccatgggcctctgtgccttaatgccagttctctgcgataatgtcctggttattcctaatacttgttttggggaccaggggtcctgagagcctagtttggggagccaaaaccatcatcagaaaccatgaagggcctctgtcccagtgagggcactcrgggggaggagtgtcctgcagagccagttgcatcaactcaggccctctccttaaggagctcattttccaaaaatgcactcaatctctttggcttatgagaatgccatgatttaagaatcacaatgctgcaaatttccagcagaagcatgggttcgttagagcagcaccatccagtagaatgctccatgaatttcacttttaaatgctggatggcttgcccatcaattgtgaaatgctttgccaagtatactgaggtcttgtgaaaactcagataayatccaccaaagaacacgtcaaaacctcttgttcacttagaccaaaaggttaagtatttaagtttttgatttacagctgtttattgagcatctactgtgtcccaaagcaccactccagacagcggagatggagcattgatcaaacacacatgacagcccttgtggagttcacgtgttagtgcacatgtgtggagagaggggtttgcaaaatttcaaaatgacatggagttaacttacaaaacagagtttacagtatggaaacccagaaacttttcaaatagaatcttttcacctgtatgcccattagaccaagacccattgctgtgtcagtttgctaatgccccaatttccctttatgttcaaagaagctggcaaaccctgagaaattctatggcttgcaaatattaccctcagacaataaaacaccctttctaaagttgttgtagaataacagctaagagttagataattcttcgtaagtggtaggaatgtaaagtacctgtcctatgaaatttacatctattaatgcatttaaatgtyacagtgkccctatgagatatgtcctacaattattcccattttcagatggggaaagtgaggcgtagagagagtgagtaacttgcgcaaggtcaagctagtgactggtgtcaggagtcatgctccagcagtctgtgctttwattactctaccacactaaatttccaacacaactgctcttgagtacaagcaaaatatctccatgaacattctgagcagttctaaaggtgatgggagatgctttgactcagggacccaattcaaagattcccaggcacagacagagcctctgttttctgccctcagtcatgamagcagggcccagtctggacataggtgggcaccagagcttgtcaacatgacrgaaggaagagatgaaccatagcatctttccggatctctatgtattagcctgaaacccctttggatcacatctccctactaaaaaggacatttgagcaaagacccagtgcacaaagcttagtgcctgtttgacatccagcggaggtagcttgtggcagttgtcacagatagaaatgccatggaaggcggccagtagcttatggaggcagcattccctggtgggtcaaactgagcctgtgaggtctgtgggattgcagggctggtgatttgattttgtcagaacacacatattgttcaggcacagagagaccacctcctgttaaccaactctccattgtgggtaaagctcaatgtcaaggcattcatttacaaatgggagctgttgtttcttgtgaccaggatctggtgtctgataatcggtaacagggtgtatgagagcccatattaaaaatcagccgttgttggtgaccacacaatcagaacaaaggaacacattttccaggttaataaaaytgtggaaacaatattcccagggcctgagwgtcccggccccagccccaggagtggatcaacgtaaggcgttttcacccgccctgatgcagaatgagcgcctctgttcaggtggtgagtgagtgccactgttcagatgacagttgtgcatctccatcctctttgctggaaagcaacagcaaaattgaccccggctcaattaagtgaaaggagttactgcattgatgggaaagctgaggaccctggctaggaacgggcaggactagaggaccaggaagcaggaagcacggcagtggtctcgcaacatggccggtctggcctggacaccamccccagtgctgcgcctctcactcaggtttcaaatcctagggaggcgtatctcattttcaagctaaggtacatgcctgaccttggcctacaagaggcccagatatgagtcttcctagactggcatccaattcaaagcaagtcagggcacttttcagaagtagaaatcagcgctgggctgctccaaagcaacagacacccacagcaagttaaaggtcatgagtcaaagaccatcactcgtgcacctgtaataacccgaagttagawttagsaggcactgcagaggaaccatggggtgttgcataaggagggagttgagatgggcttataggacttggggttttgcttggtrattctaaagaggatttgaggaagagagggtcagtctggattggatattgtctggaagtgggtgcaattaatgactagttaccttaatcatttttatctaggaggcagagagattgaagtcactgatatagaagcagttgtcactcatgttaggcaggaaaggattgtttagttgtttttgttattgagtctccttggcactgacttgtttctgacagggacagtgtcacctctygtagcaacacctctgctatgtggagtcattctgtggccttgcctctttatattccgggaatacctctgatgttccttgggaaccttctggcctagctgccaactgtgagctgtcattttggagtttttcactctcaaaatcttggacattcatcaaaatggatctggtttccaggctctggttttcctcctagtgactkagacagacatgagcatttaaggtggtatctgccacaagctgatcccatttttagtgactgmtatcaccagaactagacataggggtatttgagagatgccctgcaggtactgaccacagtggctacaygggttgtggagagggactgggcacacttttattaatatgtctgaggattcctttagattttaccaactttttccttacgctgggtgaacacagtgtctgatgaaagcggcttcctcttttctccaggtaagagtgggataccagaaactgaatagtttctatgattgaatcactaacataaacaaaataactgtaccacacatttttttttttttttttgagatggagtcttgctctgtcatccaggctggagtgcagtggcgcgatctcggctcactgcaagctctgcctcccgggttcacaccattctcctgcctcagccccccgagtagctgggactacaggtgcccaccaccacgcctggccaattttttgtatatttagyaaagacggggtttcaccatgttagccaggatggtctcaatctcctgacctcgtgatccacccgcctcggcctcccaaagtgctgggattacatgcrtaagccactgcgcccagcctgtaccacaaattaatggttaaaatgcatccctcatasgacaatgtaacttcttcctctcactgttgatggcctatcttcctgaaaacattaatctgsgggtgagaacttgggagatacacacagttgggttcaccataaatgaggagcctcactgacagtggaagatgcacaggaaaagaaagaagactatgggctgcttccttagaattgtcttcctgcttgctgtgttactgctagagcttcctgtgtgggctccatatggtccctattcttcccaccactcatgaaaacaccaaagagcaggytcagagtgaccacagccaagccccagctctgccagcaggcccccatcttctcctgctctgatgtggggattgtgcggttggcttgtttcctggcttctctcttcttcctggcatctctcttcatgttgctaggctcttggtgaatttgtcctggtggaaaaagatgtcaagattaagaagaaaggaaagatttacagcctgaatgagggctatgccaagtattttgatgcggccaccactgaatatgtgcagaaaaagaaattccctgaggtgagtgaagaaagccaggtgggtggcagacagaatgctgtccccatggggtcctgtttgggtggtggcttcaggggctttgctgaaagaggttggtgccactgtttatggctgtggtcagtatgaagatgatggactctgcctttcttcataagcattcagtatcttatatagctaaaatttaccttctaaaggtagtacttatctttacatttgagtttttccaggataaattctttataaagaaggcagagatcacatttacaaaattcagagctcasgccagatcctctctgaagtcatttgtttaagctccaacctatagactcactcagttgcatttgcttttagaataaataattatatgagaggccttcaaaaagttcatggaaaaatgaaattaaaagagattagaaacataaaatataaactttatttctcaacataagctccatcaagttcagatgcttttgtaaggcttcataccaaccctttaatccatctgtaaygaactgagatactgggaatttaatcttaaggcagtctttttaatgttatttgctgaagaaaaatgggtgccctgccaagaccagcttggtgggggagaccctaacccagcagagctagaggaattaaagacacacacacagaaatatagaggtgtgaagtgggaaatcacagccttcagagttgagagccccaaacagatttacccacctatttattaacagcaagccagtcattagcattgtttctatagatattcgattaactaaaagtatcccttatgggaaaggaagggatgggccaaattaaaggaataggttgggctggttaactgcagcaggagcatgtccttaaggcacagatcactcgtgctattgtttgtggcttaagaatgcctttaagcggttttccgccctgggcgggccaggtgttccttgccctcattccggtaaacccaaaaccttccagcgtgggcattaagaccatcatgaacatgtcacagtgctgcagagactttgtttatggccagttttggggccagtttatggccaggttttggggggcctgttcccaacagtgccctttaaaggttttttaagattaggaaacawaaagaagtcaaaaggagctaaatcaggattatagtgattttccatcaaaactcttgcaaaattgccattgtttgatgagaagattaagcaggagcattcatgtggtggagaagaactctayggtgaactttcctgggctttttctgctaaaactgtggctttctcagaacactctcaaaataagcasatgtgggccaaggatgtttctccccaatgttgtaaaaatgaatgggtgtaattagtcaagggcaaattgtaycctacaccttcagaggcccttgctctcctcccccaagttacgagcatctatagttatccctccctcctgccctcgctccctccctcactctcacctatctatcatctatctatctatcatctatgtatctattttctatctatctathatctatctacctatatctttaactgagagatttctcgtagcttttcttttagagcaaaggtaagttagagtagaaacacctgtctctgttatgtcaagtccttctgggctaaaaaactaggagcttaggaatatgggttccatctctagttcctgatagttcactgtgtgtctgctgaaagattctttctgtatttaaatgttttgattttatgacttaatgttttccccaaatataaaaattgtgttcctgtgtaacacatcacataaagacaacaaaaaatataagaaaatgtaaacaaaattcatgtgtaagatactccaccctcaaaaaccccactgggaacatctctttttttttttttttttttttgaggtggagtcttgctctgtctccaggctgaagtggcacgatcttagctcactgcaacctccgcctccctggttcaagcgattctcctgcctcagcctcccgagtagctgggattacagcctcccgccaccatgcccagctaatattttgtatttttagtagagatgggatttcaccatgttggtcaggctggtcttgaacgcctgaccacaggtgatccacctgccttggcctcccaaaatgctgggattacaggcgtgaaccaccatgccagacccattgttttatttttaattgacatataataattgtacatatttatgggatacatactgatgtttcattatatataatatacagtgatcagatcagtataattaggaaatccatcatctcagacatttattatttctttgtgttgggaacattcaatatcctccttctagctttttgaaaatatgtcatatattattgttaaatatattcatcctacagtggttcagaacactataacatattcctatgatgcaggtgtaattttattttctacacttttattttagattcaggggtagttgtgcaggttkgttatataagtaaactcctgtcatgggggtttgctgtatagattgtytgtctcccaggtactaaacctggtatccaatacttatcttttctgctsctccccctcctccctccctccaccctcamgtaggccccagtgtctgttgtttccctctttgtgtccatgtgttctcatcatttagctcctacttataagtgagaacatgtggcatttggtttcctatttccgtgttagtttacttaagataattaggccttcagctccacccatgttcctgcaaaaacatgatctcattcttctttatggctgcatagtattccattgtgtatatgtagcacatttctttatccagtctaccactgatgggcatttaggttgattccatatctttgctattgtgaatagtgttgcagtgaacatacatgtgcatgtgtctttacaatagaatgatttctattcctttgggtatatacccagtaatgagatggccgtggttggagagtggttggtatgagttcagttcttttgcatttgctgaggattgttttacgtctgattgtgtgttccaattttactgtatgtgctgtgtgtgatgagaagaatgtatatttttctggttttgggtggagagttctatagatgtctaacagatccatttggtctagtgttgattcgaggtcttgagtatcttcgttaattttctgcttcagtgattactgtcagtgaggtgttgaagtctgccactattattgtgggggggtgtctaagtctctttgaaggtctctaaggacttgctttatgaatctgggtgcccctgtgttaggtgcatattatttaggatagttaagtcttcttgttgaattgagccctttaccattatgtaatgtccttttygtcttttttgaactttattggtttaaagtctattttgtctgaaattaggattgcagcccctgcttttttctgctttctatatgtttggcttccatccctttattttgagcctataggtggcactgcatgtgggatgggtgacttcctttttctttgtttgtttagcggctctyttaagattgctgcaggatattgtctcatactttaagcagtcctgcatttgttaagtccagtcacaaggtaaggtttgaggagctcataataaatgaaatgcacaattatataatcttttcaattcctacactagtgggtggaggatagggattcaagaaggcagaggtcacaccaactggacttgtgaccacgagcaggtgctggctaatcctgaaagccactggatcttgtctcttcgctttctgtcttctaggatggcagtgctccctatggggccaggtatgtgggctccatggtggctgacgtgcaccgcaccctggtctatggaggaatcttcctgtacccagccaaccagaagagccctaagggcaaggtaattctcccttgtccactggctgtgcatccggtcagggaggtgggggagctccctcccgtcacacctgctgtttggctactgcactgcttcatggcatgtctgtgtggggatgggcaggggaggaaaaatgaactctgtttcccttgagtgagtctccaggctgtgggaggtttgaagaagaaggcgacaggctgacgttatgtgactggtgattctcactggtcttaccccctccagcctcacacccaccgttcaccatgaaccagctgtgtgtctcactttccacaggctgcatctgacttttagcttcagcaccagctgatctgggatgatggtccctatagggagcctaataaaacttatcaacacacttcccagaacaaatgcatgtaaacgtacacattacatacaaattacacgttgagggagttcactgatgccctgaagtccgcccaagtatcccctagagaatttccaaacctcagaataagaacttctactcagaactcagccaatatatctggaaaggtagttcctggaaggtctaattgcaacttaatgatgcaaaacttaaaatacttgtattatcaagtgagaaccttatgatccagctatcttgcagagaacctcccataaaaatgcatctgaattttagccaatcacagaaatcgtaggtaagtagtcaaatcaaataaaggcctctgttttctctgacacaccaacaaccagcgacacatttttctgtctctcagagtcaccttgagatttgaattattcgaatgctaagaatcaaagccacgctgagagatctcacacagcacatgaagccagagagattttaataggttggtgtatcaggtgtttctcttcatgtgagtgcttagcccaggtgtattcacccactgaactaagaacactgataagcctgcagaagtggtgctgaaggaaagctaagcaccatggaggactaagtgaggcaagtagaagacatggacaatggacattctttttttttttttttttttttttgagatggagtcttgctctgtcgcccaggctggagtgcagtggcaccatctaggctcactgcaagctccgcctcccaggttcacaccattctcctgcctcagcctcagagtagctgggactacaggcgcccgccaccacgcctggctaattttttgtatttttagtagagacggggtttcaccatgttagccaggatggtctcgatctcctgacctcgtgatccgcccgccttggcctcccaaagtgctgggattacaggtatgagtcacmgcgcccggcgaagacatggaaattcttagaaccactctggtcacttactcagttacattggggagaacataaagatcagttattactaattattcaaatgatcgtaaatgagtcagaaaatacycacatgggatcacatactcatgtcccttaagcacatgtcactccatagatagatctgcgtttgctgcgcataaccaccacccatactgaaagttctgttggatcctaatctccgcatttctgctgtcatggtccctgtgccgacgtctctstgtgtgtgtgtgtctgtgtgtgcatgtgcacactcctatcctgtgtgtgtctgcatctgtatagctgtgtagatttaattgcagagaaagtacaggtcatggctggctgcggtggctcacgcctgtaatcctagtactttgggaggccaaggcgggtggatcacgaggtcagaagatcgagaccatcctggctaacacagtgaaaccccgtctctactaaaaatacaaaaaataattagccaggcgtggtggcatgtgcctgtggttccagctactcgggaggctgaggcaggagaatggcgtgaacctgggaggcggagcttgcagtgagcygagatcgcgccactgcactccagcctgggtgacagagtgagattccatctcaaaaaaaaaaaaaaaaaaaaaaaaaaaatacaggtcacatgtcacatggcctgcaggccaaggtgccatgaagccctgggcattttgatattaaatttcctacaacaggggcatctgaggtcagaacaaaagtaacttggctccaagacaagcgcattaggtactaatgctgagctttttttgattaaagtagttgactcaacaggataattgattacaatctgagactttattatctgataccccaaatcccccacataaaaggggagaaaaatgctgagcgctataagctgtcaaggtgagagtctccttggctagactgtcctggacagcatggcctccagtgtccctcctgtgggtaatgagggacagaactatctgcccccagacagcccgcatgcaccacaacttttttacacccttctggacacccactactttaagagccagaggtctagggtgagggcaccttacactgaccaaaatggcagtaaatacccccatggagtcttcacctactttctctcgaatgcctggatctccagcctagaccaaaggcatcatgttcctctccttaatatatataatatatacaatagaaaaaatatataataacattatataaatatataacatattatatgtaaatatatattatataatatataataacatataaatatataatagaaaaatagaaaaaaattaccataatatatgactctttctcaaagtagtttaaacatatcaccaaaacggactggaagaaaagaatggtaaggaaaggctgcacatagctgggtcaaccatttcgtaaggtgataatggagaatgaacttttgggaagttacacaggttgcactgatggggagaaaggagaagatgatactgagtcatgcacagcagcagggcctcggccagaacgacaccctgaatctaaggtgatggggttgtgtgttgtgagtcaggctgggggcgtcatgacatcatcacagaaatagacctaaaaagtccattcaatccaaccccattcatttcaattcactgcgtactcacaggacacaggcagcctcctgccagttctcatgtgcctgcaggagggttagagaaggccttccttcctctgaacagcagccctggatcttgtgcagagactggcaagcagggcacaggctgatttcaacccagtttctgccctcggctgggacccctcgtgcaggaaacagtggccttgcttggacactttcttcgtttttgagacaggctcttgctctgtcacctagactggagggcagtagcatgatcacagctcacygcagccttgaactccggggctcagttgatcctcccacttcagcttcctgaatagctaggatcacaggtgtgcgctaccacacctggttaatttttaaattttttgtagagatggggtctcactatctcaaatggggtctcaaatgcctggactcaagcgatccttttgcctcggcctcccaaaatcctgggattacaggccggagccaacactttctctgtgtcggcactactgagaatamagatagtacagtgaccagctaggatggacagcagcctagagaggaagccaggcattaaagaggcctcagtgtgatgagtggtaccagaggggaagtacaggatgctatgggagtgcaaacgatgggatttcacttagtctaagggtcaaaagacaagaccattgaaacaccggcaaactagttagacaagtcaaagcttaagatgtggagttcctccacacaatcccagccactgtggctgtccccagagagacaagccggcatggtcaaggtgaccttactgtcccatccaagcttgactctttaccagccttgaggtctcacatataaaggcttccaccmaggcctgcagcatcagtttgcttcttgttgaaccaagaaatagatgcctagatctcatatttccaagtcaagaggcaggtytctcataagcacaaggatcacaagatgggtagatacatggctcagtcacctggccagaggggcccccaaggcttctggatgagtgccatctgatgcatctggcctgctgtaggctctaaagctcgggcccactcttgcaaggtgcatggtgcgctcatgctagccagatggaagcrccgcagtacaaactcctcccccagctttaggggcatggctcgggacatttggccacttgcagagtttactcacctgcctctgttcctccacagctccggctcctgtatgaatgcaatcccgtggcctacatcattgagcaggcaggaggcttggcgaccacggggacccagcctgtactggacgtgaagcccgaggcaattcaccagcgagtccccctcattctggggtcaccagaggatgtgcaggaatatctcacctgtgtgcagaaaaatcaggcaggcagctagcgagtttgaccccacatgccctcttctgtttgtcttgcaccttgtctraggaccctaaatgaacgataaacagagatggtagctatgagtatrcaaaaggtaaatccacttaatcacatacagaagagcaacaacaaactgcttacgacaggtttggaagccacaggcgattctatggtcaatgtgaaggactagaaataaaaacccacatgtggaaagtgcgactttggcttgtcttctgtcagaaacagtggcaaatatggttataattccgtctgtcaacccacataattggcggctgcatgcttgtgggcaaagagtacatagattagttaagaatttgtcagctgggtgtggtggctcatgcctgtaatcccagcactttgggaggccgaggccagcggatcacggggtcaggagatcgagaccatcctggctaacacggtgaaaccccatctctactaaaaatacaaaaattagccgggcgtggtggcgggcgcctgtagtcccagctactcgggaggctgaggcaggagaatggcgtgaacccgggaggcagagcttgcagtgagccgagatcgcgccattgcactccagcttgggtgacagagtgagattccatctaaaaaaataaaaaataaaaattgtcttgattggcttgaaatttgaacctagtgtcttatcctgtagtgattacctccctcaaacacatgtaaatttccaacttaatatcttagaagagtatttgtgtcttattttggataaacttgagttagaaatctcatggcaattaaattctgaaatttctgattgagcctatcttaagagtctataatttggatgaccaatcacagtttgaatggaaaatggggtcacttattgttaaagccagaaacagagtcaatatttagaaattaactacttttctaaacctcttaaccttgcattttcagtttttggggaaatgttttaatctattctagggactaactggtgtacactggttaaatgactcgtcacttgtccaaattatgttaagactggggaggggttggcttatgcatctgaaatctcatcttgttttaggaagaattgctctgaatatctatggacctggaggctaagaaagacattcatgaaagattgacaaatcaaatcaaatccagaagtatttaaagcaaaggtgcatcaggagaaagtcaggcttaacctagaaattcaagaatgattcaacacggaaaaatctattacagtaattcattaggttaggggaaggcagtgtcgggtgggaccaggcaaggccctggaggaagcaaggctctcctttcccactttagcttgggcagggtggggcatacagcccacagacacatttcaacttgagtgtcattctgtacgcaacatcgttcctcagtctagcatggcttggcaactttagcagacacagcaaaatcttattacacaaccaaaaaattttcaccttctcaaaaaggaacaaagattttcttcttttcccaaaatgaaaacttcataaaacatagatgaaagatattaaagcagacacaagtaaatggaaagatatcccatgtccatgcactagaagaatgttaaaatatctatatcacccaatgcgatctacagaatcaatgcaatctgtgttcaactacaagacattcttcatttaaatagaaaaagaatcttaaaattaacatggaagttcaaaatacctcagatagacaaaagaatctggaataaaaagaaaagctggagscatcacactacctgatttcaaaatatactacaaatctatggtaagcatggtactatcaaaacagtatggtactatcaataaaaggggcaggggagagacagagagatgaacgaatgagacagacagacatagacaagtgaaacagaatagagaaatcagaaataaattcacgcgtttacggtcaactcatttttaacaaaggccccaagaacacacattcgggaaggacaatctcttcaataaactgtaccaggaaaacccaacacccacatgtacaagaatacatctaggccattaccttaccatatacaaaaatctactcaaaataaagatttaaatgcaggacctgaaactatgaaactaccagagaagaaaacataggataaaatgcttcatgaaattggttaggacaaggaattttcaaatagacatcaacagcacaagcaacaaaagcaaagatgtaattacgttaaacttaaagccttttccaaagcagaggaagcaatcagtataatgaagacagaacccagagaatggaagaaagtatttgcaaactatgcatcaggcaagaggttaatacacaaaacatctaaagaattcaaactactcaaaagtgaaaatacaaataatcttatttttaaaaatctacccaaaacctttgtcccccaccatttccccaccttcttttcctgaccgcatttggccctctccctctcaccaccctttctcttcctccatctaccccaaactttttcaccgttttctccctaccgtcatttcgcaaagccttctctactctcccgctcaccacgcttttccccatccatctacccaaacactttctcccaccgtattttttttcccaccgtattttcccccttctccctggccaccctctttttccccctcccgctgtcatcacgcccttttgctccttcatataagcaaaaacattttcccccgtcttttcccaaagccttttccctactgctgctcaccaccctcttttccccctttatctacccaaaaactgttttcctcatcgtctttcccccggctcctccttgccactctccttcccttctccatctacccaaaaacatttccccaccatcttttctcaaagccttttccccactcctgctcacctccctcttttccccatctaccccccaaaatttccccatcttttcacaaagtctgcccctgcttcccactcgttctcttctctcccctatactgcttgccaccctcctttttgccttccatctaccccaaactattttcccgtcttttccccaaacttctttccctgctccctctcgccaccctcttttctcctcctccttgtcaccctctttccctcctccatctacccaaacactttttacctaccatcttttctccaccatctttcttttctgccactgttttttcgcaaaaccttgtcttcctcccgctggttaccctctttttccttctcccacttgctatcttcttttgctcctctacccaaaaacttctctccccaccatcttttcacaaaaccttctctccctactgctcgcccatttyccccccctcaccactctttcctcttcccaattgccaccttcttttcccccttcatccacccataaactttctacccaccgtctttctgcaaaaccttccttccctccctctctgcaccctgtttttccacctccatctacccaaaaacttttttccccaccatcttttccccatcgtctttttgcaacgccttctcctcctcgctatccttttttccctttggcactaaccacactctttacccacctctatctatcccaaaactatcttcttcttcctacccctccagccgcgctgcaatgtccaccgccaccaccaaccgcagcgaggcgagccgcgccacggtgccgcggctcaagcctccagcatacgacctgtgactccttttcctggtcttctaagccgggcactgagcagctcaatagaaacacacggaaacctaaaaaaacaaaaacaaaaaaaacaacaacaaaaaaaacgtaactctgcttcagcattatttatatcctgaggttatgcgcatgccggttcctagactgcatgttctgattggatgagagcaagtcttaagacaaccaatcacagcatgaaaataaagtccaatcagagtaggcctagaggtttttctctcatccaatcagaayatgtagtccagggtctcctaacctcagtatataaagcatgctgaggcagcggcgcgtcatttctggcacttatgtgtgggtgtggggagctactacgtacccggcttaaagaactggaaggctccgtcacttttcgccccctggagcctggagcttggagcctggagcctggggcactccctccctgttggtggtggtggtgacggagcggtaggagggaggctagcagcgagagcttctcctgccgggctggaagacagaaagaagaggcaccgccgcgtgctggaggctggagccggagcttgcgcctccgcggctcgcctcgctgcggttggtggtgaaatcagagaccgcagctcggccacagtggtagaaatgtggtagggtaggtgagttatccagggctgcactgccctcttctgggggtaagggttgggtgtactataggggctcactgccaaaggctacactgcctgtggcattggactgtttgggggcactctctggggttgcattgctggtggtggaatggggggctacactgcccgaggtggcaggggtggtcgggagaggcaggttgtgtacactaacgtgtactgccagtggcggtggatggcttaggggcgttgtcttctgctgcactgtccgtggcaggggcgggttgggtggagttatctggggctacaatgctggcagtggggggtggtttaagggcgtggtccggtgctgcactgcctgtgactgggggtgcgctatcaggagctgcactgcccatggcggggtgagggtggggcgggtttggggcgctgtctagtgcagcaatacccgtggctgcgtcaggtgggcactatcgggtgctaacactgcctgcggccgaggagttgggatggtttgggggggtattggttacattgcctgcagctgttgggtgtgctatcccagggttacagggggcaggttaggggtgctatcgggggctatactgccagtggggttggtgggctgcagaggcagcagcggcagcgacagctgtggcctccttcctctttctggtggcctccatggaaggatggagttcttctcttcccggactccagactctagagggtgatctcttcgtgctcatgcaatcttgagcaccgcagggctctcacacccactgtggttccctggcccgcgccctcacgcacgctctgtgttgtggagaccatctgggactaccgggcagggaatagagggcaccacgggggagggagggggacagggcactgtgggtggaggcgtgaggaatgggaaccagcacttgggtggagagggctggctgggtctgagtttctcctacgcgggctccccgaagagcgcagtgccgatgggcccagcaattcctggccagctggacttggccaggagccggtttcagtgaaggcaccccaggccccagttcctggccagcttttgccagaaagagaggctggactttggaaggtgggtgtgagtgcctttaatgaaatggtccctgccgcccagtggccagcgtgacaaggtgaagctctaacacttccactccctgcatcctgttctaggtttctctggctttgcctgcgcaactgctcccagccaggctggaggaggaggaggagtcacctgtggtatgctggagcctgtagatggcgtggctctgcagcttgcctcatgaggttggtggcagcaacagagactgcagcttgaccagagtggtaggagggcacccgtgggggccaagtgataggagccttgtagggtgggctggtgcattgagggcaacagcggttgtactggcatcggcgctagcgttggtagcagcggcaagtctgggggctgggaaggggagtaggagcgctcacttgcccatcctgtcctggggtggggacgaaccttaaggtgctataatgcgggcctcagtggcagtggtggaggtgcatgtagggtaaggaggagtcttcctccttgtcctgcaatctctggagggtgccctcctcctgctggcgcctgagccaggcatgagtggcagcattgtctaattcttaacaaaattcagggggtgactttttgtgtatcttttcgcttgttttttgttgtgatactcttggacttaactcaaatttcatgaatcgaggaaaggataaaaggtataataggccttctaattcacgcacctgttctttttcctttcttccagtctgtattttc

SEQ ID NO: 93743 - DNA, 28137 bp, Homo sapiens
tctgaattcaattacaattttttttttaccaatttaatctcaaatgttgtttaactgctttaaattcatatacgtagagtattataaactgcagagatgaaaaatgtgttttcacgggatttatattgtgaactaaactaagcctactttttgtgacttatttgtgatgccttgttgataaatatgtgtaataagtatgtttaaatatgtgtgtccttttttttttttttttaaatagtgactttagttagtgctttatggtaaacagcatggagacaacttccaggctccattcttggcaccagctagtcatatcttatttctctgatccaggcatttcaataaataggccatctcttatgaaccaggcaaaactgctggttgactatgagggacaaattaagtaattagaaaagcagtactaagtaagcactacatcgtggcaagttcctaggaagcactatggggaaagagggagtgtcatggaagagcaggattagattcaaagtgtcagggtgggtaggtaaatgaatagataaactgtagtacattcagacaatagaatattattcagtgcttaaaagaaatgagcaatcaagccattaaatgacagaaggaacataaatgcatattaactaagtgaaaggcaccactctgaaaataccactctgaaaatattgaaggtatccaaagaaaaagtctcccatgttaaggataaactggtcacagacaagaaagattactagtagggcacctgccagtgttaagaaaatttctgtgcaactaggtaaaccttggtcgctggactggatctttaattcttctaggttcctccaatccaactttcttccatagaattactaaaaacgagacttgctatgttcttaaagcccaagctcaaacttaactgaattttaagggagaaatctcatgcccaaaggttcacaaaactgcccaatgctataaccagagacattaaaactgtaaaccagaatgaaaagctaacatctccatactgtgggcagcttttcccaagatgatggaacataactccccatcctaatgacactcttgcccctcttaattcttccttgtttatgcctacctctttgatttggcaggataatttcacaatcggtagatattgtgggtgacttgacagaatctgacttcataaatcctttagtccacccagggggtaatactggcaacatcctcagtaaactttttgttcaaattgtactaatggtcttttttaaaacagagttagctctctctgctttaattcaagccagtcatggaatgctaagtaataggattgctgtgtaccagctaaacaaagagatgtctgtgcttttgctcatactacatgctgtacctggatacattcctttggggaatttatatacacaaaataagaaaatagcccacatggtataataggtctcacctaattcttcatgatcatttgatttattcaactggttgtctttaagcctaggttcacggctgaaaactattatgctgagattgttactttgtattttcttttttttttttttaagaactttatacctgtttcttgtcaaatttgcatagaaatgcaactcctaagagaataatgctctcccagcactttgagatgatagacagtgcctgtggaacagacagaattgaacttaacagtggactccaggtagacttagcctgagatccactccctccaaacctcttttgttgttcaaatgtggctaaagggttttgatgctaattcctagttaccagtgactcccttcaacatgagggcagactggcaccaagagatatcaaaacctaaatacaggatgattgatcagtgatgcttttgagaaagaccttgatcaaaaggggaaatgtgaaagttgtcagattcaaaatggagtcactcgtattaaaaccctggcaaacggagccaggaaacgccatgaaggggaagggttctcatgtacatatggttgataacaagaactatcaaaagactacaaaaatttacaacctgcacaaaggccaccacaaccttaaacacaacacacacacacacacacatacttctgcaacgacatctgcctagcaactgcctatctaacgtatggactgacaccacccttaccacgcttgttattgttaaaacaaacagtgaggtttatttttatttatttatttattttttgagatggagtctcacttcgtcaccaggctggagtgcagtggcgcaatctcggttcactgcaacctccacctcctgggttcaagtgattctcctgcctcagcctccagagtagctgggactacaggcatgtgtcaccatgccaaattaatttttatatttttcaaagagacggtttcactgtattggccaggatggtcttgatttcttgacctcgtgatccacctgcctcggcctcccaaagtgctgggattacaggtgtgagccaccaccactcctggccttccagtgtacttccacagttacatattctttcctcgtgccctgtgaagaggtgccttccaccatgattttaagtttcctgagggctccccagccatgtggaaccgagtcaattaaacctcttttctttataaattacccagtctcagatatttacttaaagcaatgtgagaacagactaatacacctgtcaaaacaccaagcctgaaaaactcaaccactaatttgctctctgccttctcctgagcagctgaacacttagagtaactcacacaatgccttattatcccaactgtgatatgtggtacaacagcacataacaggaggacctaaccttgtttcaggtagggtcaaggattttccaaattatttttgaactttttaaggaaacaatgacattgacaactgagagataagccttaaaataagtagagtgtgccagtcaaggtacaaaatatcagcagggtacagggtgggcatttgatatttccctgcaactggaacagtgtaagtggatggagctgagttaaaaaaaaaatagtttgggaaacaagcgcctaagacatgaatccctgctataagggtgctatttagtataggaggtcagatttggaaataatgcagcaacagtaacaactgatgctgtaagaaatatatgtcgctgtctgggaagggtctggtattgaaacctattttaaagttagtaagatagcctgttaactgttttatggcagtaaacttggattcctgggtgacaaagaactttgtaatttatggcaaaagcagaagccagaacttcatgtttatgcattttccatgtcccccaagtcccaccaggatggtgaagatgggcctccatggatgtctgcacatgcagtcagtgggttacattataggagaggaatactgagtttgggggattccatacttttgtagttaagtggaagcaagcctactctttgggaagaatacttcagctatgaaactgatcatcccaaacaaccctgaaaaatgatctaggtaaagagcagttaggaccttacgttcttggcaaacccagaatttgcaggtcccatgacaaatgacccctcccaagagtatgatgggttcgtgggatggagtttggaggagtctggataaattattctttagggcttgaagaaaggcatcactgaggaagtcatgtttaagctgtattttcatcaagcaggcatggagaaagaagggtatttcagcctgagcccagccaaaacaggtgtggaaacatgataaggactttgtattctcagaactcttactagcctttcattatgactagagtttacagtatcaggtgtggggaatgtggaagatgggtgggggagcagtggcctgctgtgagatatcaggttggaaagaaaatgaactctcttgtttaccttgctgaagagtctgaatgttatgcaggcaacgagggatcattgaagcttcttattctcatagaagaatgctatgactgatctggtatatgttttagaatgatcaccttggattatcaggtaaaaatgctgtcttaaacatagtgttctacatttgctccctaagactccctgaaaatgacagtaacaggatttttaaagtcatacacccttaaggattaaagaaaaggaataatggaaatgaaattctggaatcaatagcaaagggctcagttgacttgaaaaacctgaattctaaacccccagtgagcaaaaccaacaagcaattctatttgtatcacagaaccccctaaaaaactaagaaactggcttcaggaagtagaagtgaagagggtacctaaaaggactggaagttcatttaggagagtgttatatcctttatgccacccccggcccccgccttattctgaagcctttttttattgctcaggagtaaaacggggtctctgtaatggaggacatcaggcacctaaaacaaagagaattaagtgaaaattgtactaaattctgagacataccgcagcctccatacccctcctctcccacttgattttcaacaaacgtcccatgggctcaacagcttccaatcaacttttaaatatacccccacttacatatgagcagataaggaccaccagacatcctaggaaagcctctaatgtgaaagatagagcacaaaatcaacagaagaaagaaaaaggaaacttgagggaaatagatactgcaagggaagaaaaactttaaaaaaggtatcattaatatcagagagttggatgatgatactggaataataaaacatcattttggcagcaattcagagtcaatcagaggcaaacaaaactgaaaacgttttaggaaaaagctgaccaagaagacctgaactaaagtagcagtaatggcgatgaacatgacacttaaaaaacgcaggttctaggcccctcactagaaaactaggggatgaacctccggggatggagtccaggaatttggaatcttctaaaacatcaccaccggcaattctgatgtagccagctgggtgctggtctcaagactgagaactagaggacatagggtctaatcggatgtaagaggttaagaaagtgggaaggttgataactgtctggctgggtggatgatggtgtcatcccaacgtagaaacatagaaacatagacaagatacacttttgcccacttccaatctaaatacataaataaggctgtgttagtttgagtagtccatggtacatcttggaaaagtatagttggcatgtggagatattttttgcttagattagaagcacagtttcttgtcaccaacaactacggctgcgagagcgtcctatgcttttttctcacgtactgttttgatgcagagctgtcttcgcagtccctcccccggctaaaaccccccaaacaaaaaaatcccgattactctgccaccagacagtagctttaaaacacctctgttattgcccttgacgcttattgtaataattgacatgtctccaactgtaacaattcccttggaaacagaaagttctattcaggcatatagtttacaaaactccacctcggacctgctttaatttctttacaggtcctactaaatgctcctgtcaaattccttagttatcgtttcaatctgcttcccaattaaaatgtcagcatcatgatgacaggaacgtcgtttgcaggcgtcactgctgcagccatatctccagcacgtttccagaaaatgtcattggttgaaagcaataactctcctatttcacaatgatttcatctctcttcacatcaaccctaggtgatgtttttattctcaccttatgaacgagaatactgcggctcaaaattcaagagtcttgcccagagttttttggcaagtacgaaagggttatggctccaaactggttagctccgaagtccttgcaaaccctgtccgagaccatgcgcgaccccaaggagcgcctgagcagataaccaaaagtgaaaaagcctatagacctcttcactcaagttagcgcctcggcttcaggagaggcagcgccagctccacgcagccggcccggggtcgctcgcactgacgtcacgtagcgacgcggaagatttacgtatggtgcctcgctctgggatagctttacggcttctgggagctgctgcttcgctgtgagaagtatccgcgacgagctatccgggaaagggccgaatgcgatcaaacctaatccgcgagacttgctaagtgagtcgcggcagggcgcggtgtccggcgggggtctgtgtgaaggaggcgaagtgccgctaggcctgagcctgcttccacatacatttgctcagcttcaggaccactgcctgacctcggatttgatacatcggggtctggcgtgctggtgtggtgcagactaaccctgacctgtgtgtacactcctgcgtcactagcctccgcccctccattcaaatggaaataagtgtgctccgcgctcagctaccccctagagtggtttcgaagagcaatgaagaaatgtttaggaagctgtaaattgcattgttactcgttgcataccgtaaatttagaagccggggaattgggaaaataaagtttctagattatttatccatttttaaaacagccagtggcctagagagaggccccatagcaattgaatttgctgacactcttaagatctttgttgactaaatagcagcttctacagttgtagcaagtaaatttattccttttacatgtaaaatctgcttaccagagtttgcttttttttttcctttttttttttttttttttttttgagacggagtctcgctctgtcgcccaggccggactgcggactgcagtggcgcaatctcggctcactgcaagctccgcttcccgggttsacgccattctcctgcctcagcctcccgagtagctgggactacaggcgcccgccaccgcgcccggctaattttttgtatttttagtagagacggggtttcaccttgttagccaggatggtctcgatctcctgacctcatgatccacccgcctcggcctcccaaagtgctgggattacaggcgtgagccaccgcgcccggcctttttttcctttttaaggtctcaaacatttgggcattaataagtttagtattctctactgcagagaatgttatttgtgattcaatgaatgaaaatgaaaacytgagacaagaagaatggattttaccttaaatgtctgtagcaaccattgggaaaatggaaagaaacatcttaattatcgtatagatgtgtaggtacccttctgcgctacctgtatgttgcgaaatgaactcattcctcataatttaagcgcctgctgcagaaagcctcccttatatttacataatgatcattgtatgtctgaggaaagcttaaaattgtatcttgtgcattaaaaagagctaatatttatagaaatgcctactaaaaataaataatgtaagtactaaagttgccttatatgtttaaactgtatatttagaaatcacagcattttcaaacttatgggtcttggcagttattggttcattttactctctttaggatttctttttcctaattgatgttaattagttgatataaatgaaaattttgagtcaggaaatcaattcaaataggtgtgaataaattaaaaaaaaaagaaagaaagaaaagaaaacttgactcggccgggcgcggtggctccgcctgtaatcctaacattttgggaggccaaggtaggtggatcacttaggtcaggagttcaaaaccaacctggccaacatggagaaaccctgtgtctacttaaaaaaaaataacaaaaacaaaaattagttggacatggtagcgcgcacttgtaatcccagctactcgggagcttgaggtgggagaatcgcttgaatctgggaggcagaggttgcagtgagccgagatcacgccattgcattccagcctggggaacagagcgagactgtcacaaaaacaaacaaaaactttactgaagcaggctacttggtaagtcttaattgctttaaaatatggaaaacagagttcagagagggaaaaaaataactttcacctttaaggaaacactgtgaattttttttaccgttgatcccgagtgtttctttcttgaaatactgtttcgaatcttttaatataatctgcattaagaaacccagagaacattgcattgatatactgctttattgagttgtaatattatattttcagtctaagtgaacttattggcaatttaaaaataaactatacagtatgaagagtttacttcttgacaattatacaagtatgacttctgtaaaatattaatagtatagtaataaacactgtttttatatatagttgtctagaactgaatgaataggaatagggttttttgctttcttctgtcaaagattgattttgctttcatctgagtttagctcctactggaatttaaaagcaaagtttatttacattagtcattttattttatctttatttcatttacttatttattttgagatggggtcttgccctgtcacccaggctggagtgcagtggtgccgtcttggctcactgcaacctctgcctcctgggttcaagtgattcgcctgcctcaccctccagagtagctgggattacaggtgtatgccaccttgcccggctaatttttgtatttttagtagagacagggtttcaccatgttggccaggctgatcttgaactcctgacctcaagtgatccacccacctcggcctcccgaagtgctgggattacaggtgtgagccaccgcacccggccacattagtaattttaaagtcaccatacaagattttgactactctatcttaacaaatctgtaacagttactgaaggaaagtaaaaaaaaattaagtgtggggtcctttaaatttgattttattgattaattttttatatatttcatatttacattgtggtccgttgagagagaagtctccatttttacctgcttcattttcatctgtgtataccactgccctcccaaatttttttgatgctctgacccagcataggttgatgtatcaagttaattttcaacctcattgtcctcagtaaagttaccataatttcataagttcagagattcttcatttatatatctttgatataattatttttgtgagatattattgtagagaagtttttccctgtccctccaccgagctctctaaaactccctctccccctaacacttctgtatatacacagggttctgtgctacaaattgatgtttagataaacttcagtgaaatgactcttcaggaattggtgcataaggctgcctcctgttatatggacagagtagctgtatgttttgatgaatgcaacaaccagcttccagtttactacacctacaagactgtggttaatgctgcttctgaattatcaaattttctgctgttacactgtgactttcaaggaattcgggaarttggtctctactgccaacctgggatagacttaccctcttggattttagggtaatattttttagaactgtaaatttgatgttactccaagctaatgtaaatttttaatagagtatattgcaagttattgttctgtttactattggacttttctatattgtttggtcaattgtagagagactaaagaagtttgcatttcccctagtattatttttatattatttaaattaattattctgagcttatttaggaaagactagaagctttcactaatagaacgtataagtatctccaaaatgtaagggcttcattaatctgttaaaggaaaacaattataacaatttataacactttgttgttagataaaagaaaacaggatttcacagataacatgactatgttttttgtccgcaactgaaatttgaggcactaaggtattcaataaatcagtaaattagagttttggataatagttgatatagattgaaatatgaacccattagaagacactattccaacaaatatttgcaaaatgttcaatcatttaaattgttctagaatgttatcctcatatagtgatttctattctagaactctgcagtaagtataaactgccaaagaaatagtttattcattctataatatgtgtcttagtaaattaattatataaatataaagcaaaagatgttcaaaaatttacttttggccaggcacagtggctcacacctgtaaatcccagcactttgagaggctgaggctggagtattatttaaggccaggagttcgagaccaccctggtgacttcacaagaccccatctctataaaacaaataaaaacaacaacaaaaatttactttcactcaattattgacgaaatttattgagaatttactatgtgcaaagatctagtgtccttaaagtatacctgaaactacttaaaatgcttaactttaaaaaaaatcttgtatttctctatattaagtgataagaattkaacatagtaaatactcaggwttttcattaagaaaagataaaatgacagtgtttatgtatttatttatttttgagatgaagtttcactcttattgcccaggctggagtgcaacggcgtgatctcggctcaccgcaacctccgcctcccgggttcaagcaattctcctgcttcaacctcccaagtagctgggattgcagacgccyggctgattttgtatttttagtagagacagggtttctccatgttggtcaggctggtctccaactcccgacctcaggtgattcgctcgcctgaacctcccaaagtgctgggattacaggcgtgagccaccgtgcccggctaaaatgacagcrtttattaccaactatgtgtcagtgaaaacattggaaatttctgatcagcaataaagtgctccggaaaccatttttatgctgctacaaaaaataaataaagtgcatagagaaatagaaatgcttaaacaaatactaaatcaacagacattctrtgctgactgtgtacttttttctttagaattctccaagtcccggctgcttatgtacctatcgagccagattcacsaccgtcattatcaactcattttatgaaaaaatgtaatctaaagtatatccttgttgaaaaaaaacaaattaatgtaagtctggatgtttcaattgttttttgcctgtattacatttatttcaatygaaacattccttccttctcccatctggattcctaagtctgctaaatgtggcaaggtttctcagtctttgcactatgacatttttagggttgagtaattgttgtgaggagtgttccgtatattataggatatttagcaatatatttgacctccactcgctagacctcagtagcacctcccagtcataacaaccaaaaatctccagacattgccaattgtcccccagaggggctctccacccctcacactccattgtgagccactattctgtagtatgaacagatctgttagccttataataatatattatgcattgttttgaatttctctttccaaagtatttcctatactgcaaaattttataatacttggaactttcatatttatggcaattacattggtcagcaacactgaagaattataactaagcttgcattttgaaaaagagactggtacttagaggagatctttccagaaaagtaaatttattgtttttttatttttaaatgattgccaaccaaagatataaccaagaaactctgtttttggggcaagaattggtgttatatcttcagcaagatgcagcccatgcttcattgtttatttattatttataaaatattgttttactaaaggggaagaacattataaaaatatattcaatttagcctgtttttgcccattttctatatgagccagtttgtattggggtaacttaaatgcattccccgctttcaccccccccaactgtgtgtgtgtgtgtgtgtgtgtgtgtgtgtgtgtgtgtgtgagagaagtgtcaagaacttgaggtatatgggggactttctagagactcaaagggtttttttttttttgagccagagtctcactctgttacccaggctgaagtgcaatgggcagtggtgcgatctcagctcactgcaacctccgcctcccaggttcaagcggttcttgtgcctcagctgcccaagtagctggaattacaggtgcatgccaccacacccggctaatttttgtatatatatttttaagtagagacaaggtttcaccatgttggccaggctggtcttgaacttctgacctcaagtgttctgcctgccccgacctcccaaagtgctgggattacaggcatgagccaccacacctggtctggttaataaatatttttaaaataattacttattagtgtgtagccgaaatttcctctactcctcaaattggttattgcattgttcataagtaagcaaaactgaaatggggatgtgatgtttatttttcttagcaatcttagtgaaaattttataaaaggtagctgagtatcagtattaattgtcaatgtcaaggtattctttatgaccagtaggagttggacatagcaaaacccaaaaaggagttgggcgcagcaaaaccttgcttcctatcccatgattttgatgatggtgtaagtgttcttccttcatttaacacaggaacgatcagtaagtatttttaagcatctactgtatgtatgcccagcatccactaaagcagtagttctcaactggggacaattggcaatgtctagacatattttttattgtaatgatggaagtggggtgctactggcatctggtgggtagaggccagcgatactgctaaaaatcctacagtgtataagacagcactccactaagaattttctggtccaaaatatcagtagtgttgaagttgagaaaccttgcactacggacaggatgattgggagggcattagcatataagccttccagctttttataatgtagttggagagaaaagttaatacttctgaacctataacatctacatagtgtgataattgtcctaagtgaagtaaacataacctagtagatatagtagaattttaatggggagggatggttttgagctagatctgaagcgtatgtagttctttaatttttcaaatattacaggccacaccacatcccctacccaatacatacacacattaaacacacaaagaaaacactgtaggcttctgggttgtgacctttttctcattatttatgttgatttatttaatgtgaaaacttaggttatatttcattaagctgttgttgtcaacctaaaaagatatattcaaagaaaccttactttcaacatgtacaaattcagtttagcatctcttcatccaaactcacttctggattaattcttctccatccaccaaatcacctgggccagaaacccaacaattttcttagactcactctatatccagaaagtcaccatgtcttatttattctttgctcatagaccctttctaaccactcctcttgtaacagaatagtagttcaggaccatatagtatatccgaattactgcaaaagactcattaaatggttctcacttagcagaatctcatttattattctgtccttgatagagtctaatctatgctattgccaccttcaattggatcctgtcacttacaggttaagatctaaactccttagtgctgagtgtacacggttattaaggatttgcatctcatctcctatcaacaacgcacctcaccttttccctctcccccaccccgttctttactttaattggaaggcttaatgttcacataccagctttcccaggtcagatcctcaatgttggctgtttgcctgaagtgcccatttttattatttggagaatagctacttataacaaatattacccatgaagcaatctctgaccttctaggcagagttcggcattctctgttcccattaacatttcaagcctgctttattatcatacgcattgcattataattgcttgtatatgtctggtgtttttgaaaataagttagtaaggacagcactttgctcttggagatttatttatctttttacccccgggtatacagcaagtacttccccccactccccaaaaacgtcatgttgaatgagtaaatgaatacagttggccctctgtatccagaggtttcctatccgaggattcatccaactgcagactgaaaatatttggggcccacgcctataatcccagcactttaggagactgaggcaggagatcatttgaggccaggagtttgagaccagattgggtaacatagtgagacatcgtctctgctaaaaataaaaagctagctgggtgttttggtgcacacctgtagttccagctactcaagaggctgaggtgggaagatcgcttgagcccagctgttcgaggttgcagtcagttaagattacactgctgtggtcaggcgtggtggctcatgcctgtaatcccagcactttgggaggctgaagctggcggatcatgaggtcaagagatcaagaccatcctggctaacacggtgaaaccccgtctctactaaaaaaaatacaaaaacattagccgggcgtggtggcaggtgcctgtagtcccagctactcgggaggctgaggcaggagaatggtgtgaacctgggaggcggaatttgcagtgagctgagattgcgccactgcactccagcctggatgacagagtgagactccgtctcaaaaaaaataaataaataaaaaaataaagattataccactgcactccagcctgggcaacagagtgagaccctgtctcaagaaaaaaaaaaagaaaatattcagaaaaaaaaaaaaacccagtgcaacagtaaaaactaatacagatttaaaaatatagcaactatttacatagcattaattagcatagttttgtattagttataagtaatctagagatcatttaaagtatatgggaggatgtgcatggcttatatgcaaatacagcaccattttatataagggacttgagcatcttcagattttggtatctgagatgatcctagaaccaattcccccaaggatactgagggatgactgtatttcatattacttctatataaagaagaatatcttttaacatactaatactgtaaactttgtcccccatttcacacagaaatttaaatcttttcatgaaacattattgaactatgatacatttacagtggaacataatgacctagtgctcttcagacttcactggaaaaatactgaggtgaacttgatgctaaatgatggaaaagagaaatatgaaaaagaaaaaataaaaagcataagttctgagcatgtcaatgaagaaaaagcagaagaacacatggatctgaggctaaagcattgcttagcctatgttctacatacatcagggactacagggataccgaagattgtcagagtgcctcataagtgtatagtaccaaatatccagcattttcggtaagttctagtctttgactctttctcagaatctatattttaggccaggtgtggtggcttatgcctgtaatcccagcactttgggaggctgaggcgggtggatcacttgaggtcaggagttcaagatcagcctggccaacatggtgaaagctgtctctactgaaaaaatacaaaaatcagccaggcgtgttggtgggtgcctgtaataccaggtactggagaggctgaggcaggagaattgcttgaacccaggaggtggaggttgcagtgagctgagactatgccactgcactccagcctgagtgacagagtgagactgtctcaaaaacaaaacaaaacaaaaaaccttgtattttaaagggaaaaaaataattttaaaacgtttggttttataactcttgttcctaaattaatagtcctaagaagtaaattgagtcttttttgtttcagctgtatctgaactttagttctctgcagactaggcccttcacctgtttcatccaagcctagggccagacacggaacaaacaaatgatatgattagaagctttgcatcttaattattaataaaaagggagaaaggattttcctagcagaggtactagcagagttatatgagaatgaaggagtttgtcctactagaatgtcagagcagggctgaggaaacagtgaaagatcaggagcctggtatgccctgttgaaggctgaacttaatccagtagatgatggggaaccattaaaagattctcattttgttaagttcactcttgtagtagtattgtggagtttgacttgctgatgtggtcaagagattagaaatctccaaagttgacattcttaatttgccaagaaagagaggaagaagtgaaccttaggggtgtagtcctagaaaatcaaaggaggaaacagaaatagaaacctcatgaaacatgtacgtaattttatgtcattttaagttttatgtaattttaaatgcttaagtaatattcaaaagtaaaatggaatgaatgaaaagggaagaaaaaagaatcaagtgaagttaattttattttattttattttatttatttttttttttttttgagacggagtctcgctctgtcgcccaggctggagtgcagtggcgggatctcggctcactgcaagctccgcctcccgggttcacgccattctcctgcctcagcctcccaagtagctgggactacaggcgcccgccactacgcccggctaattttttgtatttttagtagagacggggtttcactgttttagccgggatggtctcgatctcctgacctcgtgatccgcccgcctcggcctcccaaagtgctgggattacaggcgtgagccaccgtgcccggcaaagttaattttaayaatatattttatttaatttagtatactccaaaacattacttcaatatgtaatcaatataaaaattactagtaagatattttgcattttttatgctaatcatcttcaaaatctggcatatattttatacttacacatctcaacgtggactagccatattcttagtgctcagtggacctatggtattggatggcacatgcaggcctggaaagaagaaatggttaaatgctggtagagaaagatgtctgttgtaatcgacaatatagtctttagtgacttcttaatccccaagattggagatagattacattaggctggagataagagaataggagataacgaaatagaggtaacaaaagtcaaatgttattttctagaaactggttttaatggaaaagaaggaattctgggatggacacaggtgttttgtctttaagatgggagaggttggctgggtgcagtggctcatgcctgtaatcccacactttaggaggctaaggcaggaggatcgcttgagcccaggagttcaaaaccagcctgggtaacatagtgggactctgtctttaagaaacattaaaaataattagctgggcctggtggtctgtgcctataatcctagcaactcgggaggttgaagcggaaggattgatttagcccaggaggtcaagactgcagtgatccgttattgcaccactgcattccagcctgggtgacagagcgagactcaatcttaaaaaaaaaaaaaaaaaaaaaaagatgagcggtttagaggctgagggtggggaattggtagaaggggttggtttaaataatgaattagtagtaggagtattaacaaaggagtaagatacatttagatgggaggaagatacatttagatgggagggaatggcattatttaaaatactgagtggaatacctctttttttgatagcctcaaaacgattaggatagtaaagtaaatacatttcttggtgttagaggaagccagtaggttttaacttttgtatgaagcagaaggccaagtcatacctaagagtgtgggaggtgaggtggggatggggatgtagggaacttgaagaaaatgaagcagataaggaatctgggggaggtggagagacagccgactaagaggcactggcccagcagtggtaagaatggtccgtgaaatgggagcaaacatttgcttaatgaggggtgaagggttgatttatgactaaattatacaaatttcttgatacctattttgtgcttcaacttcattcaattgatttgcctgttagaaatctttttttggtttgcttttaggttcttaagtgaggtggtaaataattagattctaaagagatgaaatgttaaagtagtcaatttaaaaattaaaacagtaatgttaaattttctattttagacttagatcactaagctagggagtattaaatttcagacacatattagaacaatcttatctctgttgctggctccccaaatattaccagaataacctattaataagatagtgctagctgggcatggtggcacaagtctgtagtcttagctactccagtggccaaagcaggargatwgctgagcctaggagtttgaggctgcagtgaactgtgattgaacttgggcagctgcaagaccctgcactccagcttgggtgacagagcgagactctgtcttaaaaaaaaaaaagacaaagctgagttttcttgcatatgttggtaaaaggcagcactacctccagagagaatgatagctccagaaagggaaggactaggtttcctttattgaaattttgaaatctaatttagatagatctttcaaatcaggggattaatttaaaggcttggataaggataacaattttttaaacagttaaaaattagttgatttgtttgactttgcataaggtacttaacctccatgaacttcagttttctccattttaaaatgggggtggagagcttttcctctaccatctgtgacgcagtatctaggggactgagaattaaactgacaaaagacagattaagaaaaaaagtttattcctgtgcatatagcagtttacaaaagaaacggaattgcattttattaagttcatttaaatgtatttgtaaatttatttgttcataggaagaacaaataaattgttttggaaagagaaatgggttttcaggaaaataaacaggagataagaaagtttgtgataacacttgggtatgcaggtgcagtggtctttctgtcttcttcatggccttcctgggagtaaaaccactctgaagaagaagtttatggcagcctcatttccctgaagtttctgctttcagtcagataagggaagctccaagaaggtttctgcatttgttgaatctcaaatgtccttttttttttttttttttttttttgagacagagtctcactctgtcacccaggctggaatgcagcagtgcagtctctgctcactgcaacttctgcctcccaggttcaagctattcttctgcctcagcctcccactataggtgcacgccactatgcctggctaatttttgtagttttagtagagacagggtttsaccatcttggccaggctggtctcaaactcctgacctcaagtatctgcccaccttggcctcccaaagtgctgggattacaagcgtgagccaccgcgcccagcctcaaatgtctttaccttaaaataatcttcataccaacttggtttctgagttaggttctcacataatcatacctgcctcatatggtggttgggaaaatgaggaacagtatattagatacccagcctaagcttcacaagtaatatgtttaaatgtttgttgcattccactttttttcttcctttaaaatctgtctcttcttttttttcaacttttcttatattgaatgcatcttaagctgctttcgtgaaatgaactacatggaactacatgaactgtatgcatgcataaccttgcccatttttgttcatagaattgaaaactaaaaatattctcagaatttaagctttgttggaagcctgttagaaagtttgctctcccctgaatacctaagtaggaagctagacaatatatgtgaagaatacttcctctaaaacttgaagtttgagggtagcctttgttgggctcagaaaatgataccccaacgtatggcactttggcatgctgagtactttgaactgaaggacattggaaggacttcagaagtaaagtctctttctgaccttttcctgcccttctttctcttgcttctctttctccccaaggcaggccatagtaactgaacccctctccctcaaagacagtcataaaacctagaggccaggcgcggtggctcacacctgtaatcccagcactttgggaggctgaggtgggtggatcatttgaggtcaggagttcgagaccggcctgatcaacatggttgaaacccagtctctactaaaaactcaaaaaaattagccaggtttggtggtgcatgcctgtaatcccagctactcgggaagctgaggcaggagaatcgctcgaacttgggaggcagaggttgcagtgagccgagatcatgccactgcactccaccttgtgtgacagagcaagacttttctcaaaaaacaaaaacaaaaaaactagaaatatagaaatattactctaaccttaatatgtaagagctggctgtaaagaaattgctcttacttaccttgtctgaaagtagaacataagactcattccagaaagggtcctgccctatacatgggaggaagaaatgccacacagagaggccaggaatttaaaaggacaggccttgctggattttcccactcagtttattactcattccctttttgttgaatcacatttctacacagctgtccactctattgaatctaagcattaaaatggacacttttcccttgggtctttgggtcttcattctgaagcctcccatgtttcataaaactttgattaaataaatttgtcatgcttttctgttgttaaactgtcttttgtttataagagtgtgggctgtgagccttatgatggggaggaaaggtatcacagcctttcggcccctacacctttaacacacaatgagtttttattttacctgagacaccatatacatagttataatttttaaaatgtttataccatatttgaagcttttttgaaattaagatgcttttagatgtagtggtgtctgtgtgttcaaattaaaatagtgtcataggctccacaatgactatccatgctgtataagagcctaaccacatatattcttattctgctttttgttcagatactgaaagaaaatgctaaatagaaaggggagtcggaagtctctattaaacatcattgaataagtatgacagaataaggattctgccagaggagcagaaccaggagttagatcagggattgattataagaaattggtttacacaattgtggggcctggctaagcaagtctaaagtccatagggatcagttaggaaggggtgatcacaagcaggctggaatcccgtggccatgagactgtcccaggtgaaatcagattgggaagaagggagattaattgcagacccagctgctgtttgggcctcttcatcagagaaggcctaaaacttcttctaaaggccttccaagtaaatccagccaaccctggataatctcccttttgattaagtaaatcagctgattagggactacagggtttgattgaataactgcttgaagaaggcgtgtgtgctgctaagcagcagcctcccttctgttcttcagctctcaagagaatatcccttgtctccttccctaacaggaaacatactagagaggaaattccggggacagtagttcaatcaaaccaagctgacacatcaaaagtcatcacagatgataaaatatgtctggtaaaacgtggatattgctttaaatagctgttaattcttttataaataagatttcctgaattttgatagcaccattttggctaatttaagagagaagaataaaatctggccaacattcagaaacttgatcatcataaacacatgaacactcttttaggatatgtgcttactgaatgtttgacgtttctcataactgcattctgttttgccttagggtactttttgacatcacacaagaagatgttttgtttctggcttcacctctgaccttcgatccttctgttgtggaaatatttcttgctctatcaagtggtgcctctctgcttattgtaccaacttcygtcaagttgctcccatcaaaattagccagcgttctcttttcccatcatagagtgactgttttgcaggtacattttagtagcaatgaacgttttgtttatcatttttcaatattttaagtgttttagagaatattttgtattcctgtagttctttacaatggattaatataatctggttagattatcaagggctgtctcctcaggatgtgactttttttgttgtttatttgaaaatgaaaaaagataaatgaattctgcctagaaaattcttttattatgtattttgtgcatactataataattagaggaccttgactttgactcagatttgttggatttgagaaggataggctgcctcttctgtcttaaaatctatgtatgttgtgtttctcatgaaaaactagtataagtcaattaaattataatcgagttaggaatatagattttcttatttttacatcagtgtactttacattaacctacagaaacaagtatttttgaaatttggccttttaaaatgttatttaaatgtgtatctgactggtgattaggtcatgcaggtacacaagtatatgactggtacacaagccttgagttactacattgtaagtagctaacagtactagagaattagcaatattatatgcatatcataatatgtagatatcttagttaaatgtttaactgctgtgagcctcaggttttatctgtaaatggaaataatacccatctcaaatagaattaaatgagacagtgtagcatagttcctgattgtgtgtgtgagtccattcaggctgctgtaacaaaataccataaactgggtagcttataaacaacagacatttatttcttatagttccggaggtgggaagtccaagattaagtcatcaggagatttgatctctcacgaggggcccactcgctgattcattagactgcggtcttttcattgggtcctcacttgatggaaagggttttataagggcactaatctcattcatgaggtctctgcctgcatgacctaatcacttcacaaaggccctacctcctaataccattgccttgagagttagaatttcttttcttttcttttgttttttcttttcttttctttctttctttctctctctctctctgtccctctctctctctctctttcttttgacagagtcttgctgtgttgcccaggctgcagtgaagtggcgtgatcttggctcactctgcctcctgggttccggcgattcttgtgcctcagtctcctgagtagctgggattacaggcacccgccaccacaccaggctaatttttgtatttttggtagagacagggtttcaccatgttggctaggccaatctcactcctggcctcaagggatccttctgcctcagcctccaaagttctgggattacaggcgtgaaccactgtacctggcctgagagttaggatttcaacatacaaatttgagggggagacacaaacattcagaccatagtgtgttatattcgtatacctgtgtgcatatgtgcatcttaattattagtttccattgtctgttttttgttttttttttttaattgagacagagtctcactcttctcgcccagcctggagtacagtggtatgacctcggctcactgcaatgtctgtctcccgggctcaagagattcttgtgccttggcctcctgagtagctgggattacaggcgtgtaccaccacgcccagctaatttttgtatttttaatagagacagcattttgtgatgatggccaggctggtcttgaactcctggcctcctggtctcaaactcctcaatctgcccgccttggactcccaaagtcctgggatttcaggtgtgagccaccacgcccaccttccactttctattttgataaactaaaattatcagatttttatccagggtaacgagaattgagaggatattaaacttctgctataaaaacaaaatttgatactttgaacttctttaaggcaatgtgtttttcatcctaattcatgtatatatatgaaccgagtgtagcagtgtggcttgttgggtgtgaggggatataaattctcatctgttagagagtcattccatgaattctgtggatctagataagattttactataactgttttatttacctgtaaaattcaaagagcatatttctcacggaatgtttgcaaagttccttgatagatttgattgatagttactaaaagggaaggagactttccttctatgtcaggtcaatgaattctacctctttaaatctcatccccttgtttgatgttttagcacaatctcagataaatttactttagcagttgtttttaacctttttgggatcaaatttttctgagaaactgatagaaacttactcttttccaagaacgtgacaaatattgcatatagtttcatggtgattttatttatctcacaatagttattgggaatgtcatcagcagatcacatttgacttggtttgagtaaggaggagaggtatagaagctgacaggctgtcctttcctttgtgtgaggcacgtgccttttcttattctgaattttagctgtgttgtcagggttcatcttttctttttcttttttttttgggagggagtttatatttacattttttttttttttaatttaagttttagggtacatgtgtacaacgtgcaggtttgttacatatgtatacatgtgccatccatgttggtgtgctgcacccatcaactcatcatttagcattaggtatctctcctaatgctatccctcccccctccccccaccccacaaaagtccccagtgtgtggtgttccccttcctgtgtccatgtgttctcactgttcaattcccacccatgagtgagaacatgcggtgtttggttttttgtccttgcaatagtttgctgagaatgatggtttccagcttcatccatgtccctacaaaggacatgaactcatcattttttatggctgcatagtattccatggtgtatatgtgccacattttcttaatccagtctatcattgttggacatttgggttgcttccaagtctttgctattgtgaatagtgccgcaataaacatatgtgcgcatgtgtctttatagcagcatgatttataatcctttgggtatatacccagtaatgggatggctgggtcaaatggaatttctagttctagatccctgaggaatcgccacactgacttccacaatggttaaactagtttacagtcccaccaacagtgtaaaagtgttcctatttctccacatcctctccagcacctgttgtttcctgactttttaatgatcgccattctaactagtgagagatggtatctcattgtggttttgattggcatttctctgatggccagtgatgatgagcattttttcatgtgttttttggctgcataaatgtcttcttttgagaagtgtctgttcatatccttcgcccacttgttgatggggttttttgtttttttcttgtaaatttgtttgagttcattgtagattctggatattagccctttgtcggatgagtaggttgcagaaatcttctcccattctgtaggttgcctgttcactctgatggtagtttcttttgctgtgcagaagctctttagtttaattagatcccatttgtcaattttggcttttgttgtcattgcttttggtgttttagacatgaagtccttgcccatgcctatgtgctgaatggtattgcctaggttttcttctagggtttttatggttttaggtctaacatgtaagtctttaatccatcttgaattaatttttgtataaggtgtaaggaagggatccagtttcagctttctacatatggctagccagttttcccagcaccatttattaaatagggaatactttccccattgcttgtttttctgaggtttgtcaaagatcagatagttgtagatatgtggcattatttctgagggctctgttctgttccattgatctatatctctgttttggtaccagtaccatgctgttttggttactgtagccttgtagtatagtttgaagtcaggtagcgtgatgcctccagctttgttcttttggcttaggattgacttggcaatgcaggctcttttttggttccatatgaactttaaagtagttttttccaattctgtgaagaaagtcattggtagcttgatggggatggcattgaatctataaattaccttgggcagtatggccattgtcacgatattgattcttcctacccatgagcatggaatgttcttccatttgtttgtatcctcttttatttcattgagcagtggtttgtagttctccttgaagagttccttcacgtcccttgtaagttggattcttaggtattttattctctttgaagcaattgtgaatgggagttcactcatgatttggctgtttgtctgttattggtgtataagaatgcttgtgatttttgtacattgattttgtatcctgagactttgctgaagttgcttatcagcttaaggagattttgggctgagacgatggggttttctggatatacaatcatgtcatctgcaaacagggacaatttgacttcctcttttcctaattgaataccctttatttccttctcctgcctaattgccctggccagaacttccaacactatgttgaataggcgtggtgagagagggcatccctgtcttgtgccagttttcaaagggaatgcttccagtttttgtccattcagtatgatattggctgtgggtttgtcatagatagctcttattattttgagatacgtcccatcaatacctaatttattgagagtttttagcatgaagggttgttgaattttgtcaaaggccttttctgcatctattgagataatcatgtggtttttgtctttggttctgtttatatgctggattatgtttattgatttgcatatattgaaccaggcttgcatcctaggcatgaagcccacttgatcatggtggataagctttttgatgtgctgctggattcggtttgccagtattttattgaggatttttgcatcaatgttcatcaaggatattggtctaaaattctcttttttggttgtgtctctgccaggctttgctatcaggatgatgctggcctcataaaatgaattagggaggattccctctttttctgttgattggaatagtttgagaaggaatggtaccagctcctccttgtacctctggtagaattcggctgtgaatcaacctggtcctggactttttttggttcgtaggctattaattattgcctcaatttcagagcctgttattggtctatacagagattcaacttcttcctggtttagtcttgggagggtgtatgtgttgaggaacttatccatttcttccagattttctagtttatttgcatagaggtgtttatagtattctgtgatggtagtttgtatttctgtgggatcggtggtgatatcccctttgtcattttttattgcatctatttgattcttctctcttttcttctttattagtcttgctagcagtctatcaattttgttgatcttttcaaaaaaccagctcctggattcattgattttttgaagggatttttgtgtctctatttccttcagttctgctctgatcttagttatttcttgccttctgctagcttttgaatgtgtttgctcttgcttctctagttcttttaattaagatgttaggttgtcaattttagatctttcctgctttctcttgtgggcatttagtgctataaatttccctctacacactgctttgaatgcgtcccagagattctggtatgttgtgtctttgttctcgttggtttcaaagaacatcttgatttctgccttcatttcattatgtacccagtagtcattcaggagcaggttgttcagtttccatgtagttgagcggttttgagtgagtttcttaatcctgagttctagtttgattgcactgtggtctgagagacagtttgttataatttctgttcttttacatttgctgaggagtgctttacttccaactatgtggtcas

SEQ ID NO: 93744 - DNA, 91737 bp, Homo sapiens
  misc_feature (1)...(91737): n = A,T,C or G
aggcagttaaataacagagcagaacacaagactgaccacacaaaaaaaaaaatcttccttgatgatttctgagggttctttagatatttctgtgcccctgatgacttaggatcagggctaatggatccagtcacctggctttaaatnnnnnnnnnnnnnnnnnnnnnnnnnnnnnnnnnnnnnnnnnnnnnnnnnnnnnnnnnnnnnnnnnnnnnnnnnnnnnnnnnnnnnnnnnnnnnnnnnnnnnnnnnnnnnnnnnnnnnnnnnnnnnnnnnnnnnnnnnnnnnnnnnnnnnnnnnnnnnnnnnnnnnnnnnnnnnnnnnnnnnnnnnnnnnnnnnnnnnnnnnnnnnnntgagatgttatcagtgagggactttacctcaagggctgactctcaggccgaatgccctgcaatgcctctgatacaatgtgatatgatcgctagggagcccccctccttcctctccagaactgtccacaaaaggcagtcttgatttgtaaagaacgagtccaaaatcaagctcatcctcttcccccaacacaaactggctgtggcagagactggcaccgagtcccccaagggagaaatgttggggtttctcttgactttcctccagtcagtttctttacaggacctgcatattctacttctttaagatctcttgtccatctcttcatctctatttcgggtaacaatatgtctctattgtccaggacagtcttgatttatgcccattgtcccagcataatcatgaacagtgctccctttcactcacaagagtccaggtatagacaaatgatactgtctctacttcgactcccattgccacaactgacttcaggcccttgctaattcctacctggatggtagtagtagttggcagtaggagctgccaattgattttccctttggtccatttacttttaaaattttttaatcggccgggcgccatggctcatgcttgtaataccatcagggaggctgaggttggtggatcacctgaggtcaggagttcgagaccagcttggccaatatggtgaaaccccatctctactaaaaatacaaaaactagccaggcatggtggtgggcacctgtaaccccagctactcaggaggctgaggcaggagaatcgcttgaacctgggaggcagaagttgcagtgagacgagattgcaccactgcactccagcttgggtgacaagagcaaaacaccaactcaaaaaaaaaaaaaaaaaaagaaaaaaaattttaattgattgccaattctgtaccagacacactattagcatgaggccacgctccccggtaggggcatgcaatttgcatactgcacaagggcacccagcccagggagcaaggaaaactataattcagttctccacctgctgggccacgcatcttcatgtggactgggtctgcctcatcggagaaagggacgcctttttcttcacacaaagcaaccacctgcttgccaagtcttgaaccctcagtgctgcatctgcccagtagaggtggttttttttaattaccataaaggaacagcataggctgactgtagcccctgcattgtggaaactgcattccttcttcaagtctgtccctgttatgattcatttccctcttacttctgtaatgaccttccaacaccacaacctgaccttgcctctcccctgcacccctcaacagttcacagtcatctataagatgcagtccaaagctctgggtgcagtgtgcaaggcccttcattatctgtcatctgccctctctccagactcatttcttcccacttctccacatactcaccttgcttcagctaagctgaacttcttgtggcagctggaacatgccaaagtggtttccactggcttagccccttttcatgcactgtttatccgagtttgggtgatcagatacaccctaccccatcacctgacaatctctgacttactaatggtgataacgatgaaggagagaaaggagaaaaaaatgaaataataaagatgatagataactattgtaacagactgttgaatagaacaactcttcctttgcctaaaaaatggcactaggatctacaacccaaaactataggttctgcgtgtccccacattctaaagcagagccaccaaaaattggaccagggccaggtgtggtggctcatgcctataatcccagcactttggggggccaaggcaggaggattacttgacatcaggagttggagaccagcctgagcaatataatgagactctgtctctacaaaagcaaagaaaaattattaatagtcaggtatggtggtatgcacctgtaatctcagttatttaggaggctgaatagggggatcgcttgggcccaggaatttgaggctgcagtgagctatgattgtaccactgcactctagcctaggtgacagagcaagaccttgtctcaaaaaaaaaaaaaattgaaccagaatgctcctcaatgctacatgtccctgccacaagcacccacaagccccacacaccatccccccacccccccacacacacaggcacatataaacaggtttggggtgagagcttactggagaaagcaggtttctcctccccttaatcaccgccccacccccaactcctaagaagacaaggataacggagccaagaggtctgtgatgtttgcaagaaaaagagacaagcattccgttgtccaattagatgtctcctgaataggcaggctggcttctggccctgtactggctggacatagagggacttcacaggggcaggctgcacagcaccacgggtttcccacagatatcaagaaacttgccagactgagtagtcttagagatactccaccaagaagggtgctcgccaggtacaaggacccatcggcaaagggtttgggagtgtcctgtgggctgggggaatattgagctgaagtagtgtagaagggagggggacatatatctcttgcatcattacccttcagccaaagatcacaggaatgcacctgtagttgaataagttgagtttatcactcattgtagcaagggaggatagacaccatatggaactatgggggtctcagtaagggggtgttagaaagagcctattataggatttggactttggttgagtaatttaggggaaggtctaaggaagcaggaggttgctatggatggggtgctctcagaaagcaggaatgattctttttaaacattaaaaaaattttaattcacaaaaaattgtgtatatttacagtgtacatgatgtttttatatatgtatgtattgtggaatgactagattaagctaagtaacatattctttacctcacatacttatcatttttgaggcaagaacatttaaaatgtactctctgtcaggcgtgatggctcacacctgtaactccagcactctgggaaggctgaggcaggcggatcacgaggtcaagagttcgagaccagcctgaccaacatgatgaaacccagtctttcctaaaaatacaaaaattagctgagcggggtagtatgtgcctgtaatcccagctactcaggaggctgaggcaggagaatggcttgaacccgggaggtggaggttgcagtgagccaagattgcgccactgcactccagcctgggcaacagagcgagacaccgtctcaaaaaaaaagaaagaaaagaaaagaaaagaaaattcaacaccacttcatgatgaaaaacaatcaacagaatagaaaggaatttcctcaacctggtaagactgtctatgaaatgcccacagctaacttcatacttagtggtgaaaaactaacaactttccctctaaggtgaggactgggacaagggtgtccactcacctcttctattcaacattatactggaggttctaaccagggcaattaagcaagaaaaagaaacaaaaggcaccaattaaacaggaagaagtaaaaatatctccatctccacatccagcctctccacctcactaaaactgaagctgaacaggtgacaatatatctgttattggaagggtggagttgtcaacttgctctttaaaggctccattcacctgccttttttctaacatctcttcttgttttcaggtcctccagctcgactggcactatcacagagctcgggttcccctttcagtgaccagaaacttgcttgttttctttgcttgctgggcagtgaggaggttcctcaaagggactccgctgtagcacatgcttgcattctcactgttggctctgatgcaggacctccacacgctgtgggtgacagctcttagtgtacagctgctgccactgcccacccacatgccctacacacgcaaacacacacacacacacacacacacacacacagtttgtagagcctgagggcttcttctggctgcggagataagcacctttattggctgtcttcccttcctgcttgctcacctgcctgccccaaccctcaatctctgtgtcctgatgtggcttctcaggtgacctacttgcactggaatccttgtctcagagaaagcttctggagaatctaaaactatgacagatcgtcatactagatcatggaaccaatttagtggctcttgaccagtgaattaataaaaaggaaatcagggccgggcatagtggctcacacctgtaatcccaacactttcggaggccgaggcaggtggatcacttgaggtcaggagtttgagaccagcctgggcaacatggtgaaaccctgtctctagtaaaaatacaaaaattagccgggcatgttggtgcatgcctgtaataccagctactcgggaggctgaggcagaaggattgtttgaagctgggaggcagaggttgcagtgagccaaaatctcaccactgcactccagactaggcgacacagggagacttcatctcaaaaaaataaaaaaaagaaaaagaaagaaaagaaaagaaagaaagaaagaaattaaatacaataggaaatagagtgcactctgcatttgtttccttttcaagaaaacaaatgggtcatgtaaactgcatctcttaggatggaacaaagacaaaaatatttagggaaactctgctgtaaagatttttcattgttttttaaacaactgtcaggtcaacatatgacctttgaggggaaaaaaaatgctccacttgtctataatacactaaggagaggccaaaaagcagtgctaggtttttctggattggaggatgtttccccactctccaccccccgattttgtggtcatttaattttcaaaaaatttgcaataattatccttgtaagagtctgttgagaatgagttctttacactgctaatgggattatgaactgaactgctggctttcagtcagcaaccctgtaaatccctggatttatgctaagaaaaaagaacacaaaagaaccacaatgtgacatgcagaataatgcacgctgcaatgttacacattcagttaaaaagtgaaagcaacttccatgtctgcattggagaggccagtgctcctgggaagagaggctttcaagttgagtttgcagagcacttcgcagaaagactgaggaagagtccaccgtttatatcaaaaacctcctggaatgctggtgaagactgggggcgctttaggtgcctccgtggcagctccaacgaggaaggagctgggacccctgctcctctcagctgcgctctgttctcccgagaggcttgctggagggcgagcagttcagcaagaactcaaaacaagggcacagctctcacacggattccagtactcactgaaaacggctcagcacaaaaaaagcacagagtcttgttgaatgccactgggagacaaagcggggagggaggtgcaggcagttaagaggttccagaaagggaagtggttggcaacggtttgtccttttagtgcttgacacccaagaccacagcaggcctgtggccagcggggacacagtccacaagtgggggtttttaacagcttgttcttaagagagcttcccaaaccacagagtaatgagcactcaggtrtctcaggcccacggaggatttaatagatgaaaccctggatcgtctcgaagccgtggttgttaagaagtttaaatatattgaccggaaacggggagaaaccagagggtggaagagccgctcgcactgcggtgcgatccctgagggctcggggcaggggactggggaccgagcaggagctggcggggtgagctctgcgaagcgggcgtgagaccgagcgcccatgggccggtcacgccgggtgcccgctcaccccccgacgccagcaggagcgcgcgcgcatgccccgcgnnnnnnnnnnnnnnnnnnnnnnnnnnnnnnnnnnnnnnnnnnnnnnnnnnnnnnnnnnnnnnnnnnnnnnnnnnnnnnnnnnnnnnnnnnnnnnnnnnnnnnnnnnnnnnnnnnnnnnnnnnnnnnnnnnnnnnnnnnnnnnnnnnnnnnnnnnnnnnnnnnnnnnnnnnnnnnnnnnnnnnnnnnnnnnnnnnnnnnnnnnnnnnnnnnnnnnnnnnnnnnnnnnnnnnnnnnnccgtgcgggggtggcggcgccggcagggggtactgcgcgccgggcatggaagtgcgtgaagagccgcaagtaggcggaagggtaaagccggggcagcagccggcggtccgggtgtaagcggcgtgtgcgtgtgcaagagccgctacccggtgtgcggcagcgacggcaccacctacccgagcggctgccagctgcgcgccgccagccagagggccgagagccgcggggagaaggccatcacccaggtcagcaagggcacctgcgagcaaggtgggcacgagcgcttccctctccaaccctrcgccgctcggcccagcgaagggcacatccgacggggcgtccgcggcggcctcgccccgcgctgctcactgcgattcccccgcgggcatcccaggagccagatgggagggaaagagttggcagccgcggaatgccaggagcggtgggcgacgcccccccttctcctttttggtggttttattttgagagtttgctgcgtgcgtccagaaagtgagggccgggtgtatatgtagaaaagattttccgagacctcagacttccccatgcccaaagcgcacccaactcgtgctaacatctgtccatttctcatcattcttggcttggggatgtagagagaggtgaagtcaagagatgggggaaaggagtttgacaattaaatataaagtaaggacttccagacagacttttttttttaaaagataggatcttgctctgtcgcctagggtggagggcagtggcacgatcttggcccactgcaacctctgcctcaagcgatcctcctgcctcagcctcccaagtagctgggactataagcctgtgccaccacgcctggccaatttttgtttttttgttttgttttgttttgttttatagcgacggagtttcactatgttgcctaggctggtctcgaactcctgagctcaagtaatcccggcctgctgggattacaggcataaaccaccgygcacagccctgatttcttagtattgaagaaaatagtccactttctaaaaattataggttctcaaacagtaatctaactagctaattatttgtgggcaaaaataaaatacaaactctttgaagactgtttttgtgatgcactttgttgtcaaccttctgaccattttgtttttccttcctrtttctttgatttgtattgttttgcataatttgtccccaggatacactgttcagcagaaatgtctttgagattatgtttgattgtttattttattccaaacaagtccaagcttgctgtaaatgaaataaggaaataggccgggtgggttggctcatgtctgtaatcccagcactttgggaggccaagatgggcagatcacgaggtcaggagttcgagatcagcctgaccaacacggtgaaaccccatctctaataaaaaatatatatatatacattagctgggcatggtggtgcatgcctgtaatcacagctactcaggaggctgaggcaggagaatcgcttgaatctgggaggcggaggttgcagtgagccgagatcacatgacagcactccagcctgggtgacagacagagaccccatctcaaaaaaaaaagaaagaaagaaagaagaaaataaagtctggacttgcaaatacacgcacatacacacacacatagaaattttaactctaatgcctgaaataacattttccattggcagtattttcaagggaaagtcagacattcaatgttggcagctcctgatcttagccaaggtagaaaagggagaggaggcagttctgaggttacagaagctgttgcttctttaacacagttcagactttctccagaatttccaaatwctttctttagagcttttcccagaagtccacaaactaataggttgtatgtcatcaatttcagagttcactattgaaagccttaaattgtgtaactcactagtaactatttatagtatcatcaccttaaacttagaaaattgcaacccaaaataatctgcatatgtttacaatagaaacagttatttgwtactttggatcttatttgtcggtcacatcatgaaaagataaatgtgcgttatttaagaatttattccaaatattgagattttcttataaacattacaatggggaactttatagttttttcaaaatggcagatacttgccttatcagagcagaaggttagcttggtgattgttcaagtgttgtcaatttctagtttatacttaatattcctttttctcacctgctacttacatcaccaaacactcacacagtctgattataaaatattgagactgacagtcatatagaaccagtttcataacctcattaccatgtacacccagctcagtacctctccagactgcaaaccctttgagggttccggccyggcttttctttatatttggggaaatgttagagaaaacarcatctaaaactggaaaccttgacttaaattagccatttcttctcatcctaaattgagagasatgagttctaaatggcagagaccatttataggagaatgccaaagagagcagaagagaatgggaagcctttcccacagcagaaastttccacagcagagacaatagactgatccctatcacatcccctaaatatttcttctgacacctggatgggttttgacaatcatagaagcaaactggacagagtgccatttacttctgtgccatttcatactggggctttgcacagaataggaaatgcattgtctaggttcctctagacctctaggttcccttctattctcagaagaaacttaagttatgcttgagtataacttgagtaggggccaggtaggggcagcattgtgggattcagccacaatggtgtgattcaatctgccctctggtctttggttccatttaacrtgcatttattgagcagctaacttgagtcagcactgtactaggtgctatataccagggatgtacaaaacagatttgatgttgctgattaagaaagtatctgtacaagttacaaactcacctcccagagcacttgccctggagccctggagcttgccccagtcttcctcctttctaagatcaccacttacccaactgggaagagatcttggtctgcttgttttccatacctctctggtaggaggcaaagygatctgcttgaaaatatgtctgaaagataatcagcaaataatttcaaatcttggaactgtcattatgaatttactgccattagattgtattgaggtccctgaagtcatggataaccagaagggggaatttgaagattccatttaataaaaagaagttgatacaaagaagctaagatatataataaaatttcatagttggaagagaacatgatgcttctgtattccaattactgattataccttttgttcatagtcttttaaatctgagctctttggcaatcccatttcagccgctttggtctcattaggtaccatcctttctccctcagaattaattttcacttctggaatcagaatgtcattcttaagggtctcccttattagtacctttaggaccaagttcaaactacctagcaggacataacaggcccttcacaatataactccattctattattttgacctcttctctccaacctcctttatgcactagccacagtaagtgtctgctattcacacttcagcacatatgtctctatgctttcatgcctctgtagaagttgtgccttctgcctgcaacgcctctcacctccacactcaccacaattgcaccctccttcacttcctttccatcctttgaactcttgcctatgatccttttgtagttcataagcatgatgattgagtgttcatacacatgtgtgaggtatgtcgcccccaaaccttttatgacattggcacattacctgtctgacatgaaagaaaaataataataaaaattttaaaaatgggcagccaggcgccatggctcacgcctgtaatcccagcactttgggaggccgaggcgggcggatcacgagatcaggagatcgagaccatcctggctaacacaatgaaacaccgtctctactaaaaatacagaaaattagccaggcgtggtggcgggcacctgtagtcccagctactcgggaggctgaggcaggagaatggygtgaacctgggaggcagagcttgcagtgatccaagatagcaccactgcactcctgcctgggcaaaagagcaagactccatctcaaaaaaaaaaaaaaaaaaatttaaaaaatgggctgttacctagccttcaaggatcagctctgtcagtttctctgagaagcattctgactttcccccaccccaaaatgatgtatttgttcttctagagctatgcatccagccattgtttcaactaatatttattccacgtgtacygtgtatctgtatataagaggcagtatagcagagaagttaagatgaggagctctcaagccagactcccttggtgtgaatcttgaccacttactaactatagccttgagcaagttatttgacctgtctgcccagggttttcctcacttataagacagggattataaccattatctatctcatagggttgtcatgaagattaaatgtcatgaatattatccatagaaagcgtggatgaacattaattsttgtcattattcaacatcaaagtaagctccaggtgggaagggagattttgctccctcatatagacagacccaaggacctagataagtgcatggtatgtagtatgttctttaaacacatgtctaatgcatgaatcaatgaatgaatcaacctatgaattggctaggcactctcctaatctcagggtaagtagccttgaataagatacacagaaacaaggaaacatattttcacacaatgtgtacatgctgtgaagggtgtacatcggagaaataggttagagactccagatgaatgagcagtattaagtgaggtgagtagagccatgctaagaacgcttgggaggatttcagcaaagggaacagcaaggccttgggccctgagtggagaacaagttggctactatagaccttccccaactgccacaaaagggctctttgaatgtctgtcttccccactagactgtaaccattgtaaaagagggatttcatcttataactccttataaacacagtgtctggctaataattgggcatatcataaatatttgttgattaacaaaggaatcctcttaagaaagcaccttcctgtttggaaatgcaggaaagcccctctcctgcctgtctgctctctttcctcctggcatcttctgccttcctaaagtctaggccagggaattcatctgacactgatttgccttcctttctgtcatcagcaatcctgaactctaatattggatggtaacttttccccccaaatcccaacatttccatatccccttgccgagtaaaattaggtccagagctatagaaactgttctgtaagtggaaaatgcttcagtatagattttgattttcaggtactcattttatttgatgagttttaaacctccattctttgagaagctcattttagattcattagactcattttttatgttgataatatatcatttaaatgtccatgttctactatccttcagtaaatgtatgaacttcattgaaagctgaaacaaaggggtttcaaattaaatgaagttgttaattgtctggtttatcttgggggagtgcaagtcagtgtaatacttcactaaactaacacagtagtaccatgaggactgtcagagagccagaggaggggacccaggtttgtggaggaaaagccaagaatcacttagtggaagaatgatgtcctgactgagacagggataagaaggaattgggtggagaagagctagcatagaggttgtggtagagttagaagggagatgagaagaaaacactgtatatatacaatagaatactattcagcctttaaaaagaaggaaactttgtcattgccacaacatgaggggacctggaaggcattatattaagtgaaaaaaaagccaagcacagaatgacaaatgctatgtgatctcacttatatgtggaatctaaaaaaagtcaaactcatagaagcagaaaatagaacagcagttaccagagatggggttgggaggaggggacaggattggcaagatgttggtcaaaggacacacaagtttggttagagaggagacataagctcaagagatctattgtccctcatgatgactataattaataacaatatattatatacctgaaaattgccagcctgggcaacatagtgagacctcgtctctataaaaaaaataaaaaaattagctgggtgtggtggcacacacctgtagtcccagctacttggtaggctgaggcgggaggattacttgagcccaggaggtcaaatctgcagtgagccatgatcataccactgcactccagcctgggtaacagggcaagaccctgcctcaaaaaaaaaaaaaaaaaaaagaaaagaaaaaaaaaaaagaaaagttctaagatcatagactttaaatgttgttaccacacacacaaagaagygtatgaggtaatgcatatgttaaatagcctgatttagccattccaaaatgtctacatgcatcagaacatcatgttgtataccatatatatacaattttcagttatcagttaaaacaattttttaagagaaaggagataaccagagcatagccagcagaaggactcgcatgaggtttggtgggactgcctagggagaaggaggcagctggctgcgtgacagagcccagtgataggggagggcctgtgaccccttaaggagctgagacgctgtcacagagcaatgggagcgctgagtgatggagctggatttgtgcttttagaaaagctttgttggctgctgttgggagaatggattggaagggggtgagactgcagtcagagactcccataaggaagctgttactgtaatcacaacaacagatgcctacactccttcccaagacttccctctctgatcttagaagcattgtcaaatctgggttcccagcctgccatggcaagctgcttgctacttgggagtgaaaagcccttgtggagctttttcttattcggtgactgctcataaagtgccttcacctcgcttgccttattagccagtcctgcctccaaattaccaccacttgctcctttcaggagtctcttccccctaaagtccctattactccttctctctgctttcagatcagaaacagaaaaagtcaccttccctaagagtctgctccagtccagtagaaatgctttaaaatttttctggcctcagctgcccttcttgagcacagaaatttctagaatattgaatgaatcactggttctttataatcattttgtccagtttcaatcactgcattttaggaaagatttgaaaaactgaaggacaaagtggggccttagaggacttaggattctttcagaggaaagtaatctaaagaacaagttaatgtttcttcatcgtttgggaattagttattaaatggaagatgcctgaaaaattattctcttaatacagttcttcaggaggacagcattaaaaggcctggaattaaatagccacaaggcacatttagatgacacagcaggaagaactttccagtaaaaactattgaataggataccgtgttcaggcagaagtcaggagactctctttaggagagctgagaaataacttgagggggaggggccacatctgggggaggattttataatttttaaatctcttaaactatacagctttgagatggaatgattaagctgagcaggcatttgttaacatcctgaaatacgatttccatcctgtccctagagcctgccctyggggtccactgtagactggccttctagaagaaaccgccttataaggctctcttggatagttcagtgacagaacacccttggatggagtccaaggccagctagccttcactgattcaaaattcctccctacagtggatgagattatgatgcttcctttacctcaagccacccctaccccacaaacaatctgacctcatctgtgtttttcattgttagacaaataacatcttgtttttagcagctggggaaccctgaattatcgtcaaaaraatttttaagccagggaatatgagtgtaacctttatttgaaatttaggagtggcacaattagaaagctttgaaatggaaggagacttaggtatatgtgaattaataagcccacttatttaaggtaatttcaaagatttcccagtgagtcttttactcttatgtggggatagcagtggaggactagaaatgttcaagggaagcttcccccagcctgtcatatatggcttttccaggtcaatcaagaccgtctcctccaccaggcctctgagagaaaatgagatcagaagaaaaaagccaggatgataatggggggagggggggaaacgtttacttatttattttttttacttaaaattgattgtgttaaatagttgacctctgttttatcccaagttggattaatggcaaaatgatatggcccttttgaaaaagctaatgtgttgaattgcctttactgttttacagaggagagcagtcaaagttaattagaaacagctggagctaacagtaagcctcacccccatcaatgtccctaccaggagagggttaccagggagaggagcagtcccgggaatccagggaggggcctctggtcccaaaagcaggccagagttgcagagaagttttgtgtctgaaaaataagaaaggttcatttcaggtgaaacagacctaggaaccctgtgttgacaaagccccattcatatggtatgaagttcccacagtaaagagcactgacaaggccaaggccaacccgacaggttcaaagcaggcttggccactgtgaaaaaacaaccccctcaaaacttcaggagaatgtatataataaatgaaggtacaatttcataccttcacaggattattgagaaggtcaaattacataacagatatgaaagcactgtgtaaactatgcggactatgctgcaccaaataactgtaaagaattattaactagactgtaaatgccttgagggcaaggaatgcatctgcaacgggtatttgtgaagtacttgacagtttgctaaggacttctgtggattttcctcatatgctactcataacaaccctggaaggtaaggggaattgttatcccaaattccaaataaagacactgcaggtcagacatcacacaggtggtaaatagcaattctggtacttactttagatattctgctacaggcttgctattcaaagtgtggtatgtagaccagcaacattgactctctgtgctatctttcttttttataaactcggaattatttcaaaataagaagtttctaacaaaagagattcagaagagtcaaacccttgggtgtgaaaaagttttaggaagactttcctgaatttattttgcctatattttgtttctgwtgaatgagcaagggggttatatgatatatttgtgtctaaatacatctaaaagagctctttcattcgcataaaataaacatgctgtatgataacaaagtttatgtcagagttgagatggctctttatggtacatatatgctgtgccttctaaaaaatgtcatattatattcagtgaaagatgatgtttcttaaaatgaatgaatgtctctgaggtggctaacattagtccttctatagccagattagcaatcttagagcctggtcaggcacagtggctcttgtttgtaatcccagtactttgggaggccaaggtgggaggatctcttgagctcaggagttcaggaccagcctgggcaacatagtgagatctcatctctactaaaaataaaaatgaaattgttaattggccaggcacagtgggaagcacctgtagtcccagctactcaggaggctaaagtgagagggtggctctagcacagtcatcaaggctgcaggaggctatgatggagccactgcactccagcctagatgacaaggtgagacgctgtctcaaaaaaaaaaaaaaaaaaagaaagaaaagaaaaagaaataagaaacgtagagcctggcagggcacagtggctcatgcctataatctcagtgctttgggaggctgatgcagaggatcccttgagaccgggagttcaagaccaaccctggcaacatagtgtgagaccctatctctaccaaaaaaagaattacaaaattagcttggcttggttgtgtgcctgtagtcctagctacttgggaggctgaggtgtgaggatcactttcagcccaggaggtcaaggctgcagtcagctatgattgtgccactgcactccagcctggatgacagaaggagaccctgtctcaaaaaatagaaaaaccttagagcccaacctttcagttgcaatccagaggttcttgaaggatcagcgagtgtgctagggctgctggcatgaatattagtccaagaaagacctcttggagcataatgtttgcgtgtgctgtttgatcattttccaggtctttctagtaactctgagtaggctagaggaaaagaatcactaaggtaactgtcaacatgctcaagtatttgctttcacctgaggtttaaccctgaatgttgaccttaacccctgactccagcactgtcccatcatcaattttcccagtttgagtaataatatttagtccatatctaagctatggtctaaggaatttgcatttttttaaattgaagcatgtttttgtcagctaggtgacaacttgcagaaggaaaattcatgcaggggtttgagaactcaattaagcataatccatttagactttttgagggagaagaaaaaagagggctttcatattcttacaggcagaaaggcagctgactccaatcatcctgttctttcatgttgtttttcttgaagggaagtctccagcttctacagaggtttgtctttttctctgagtgagaaatgctcaaaggcattttcatttacatcaccacagattagtgtgcaagtgttcaagtggttgaattgggaaagctttagatctgacatctgttctgctctcttctggcctgaccccaagcaagaaagaaaaatttatcaagaaatagatctcctggaacattcagaaggttttgaaagagaccacacagaaatgaggcttcaagaattttttagggtagcccaagcctgcaggattcagagcctgttccttctccatgggagctttcagaactttctgctccaggaacagaactccaaaagtgaatttcaatagcagatgcagcaattacactgcacccctggcttccaaaggacccccctcaggaagccatagagcgtttgatggagaatgaaatgcttgtgcagcagtgctctctgagtgagagaaggggagatgagagtcccatgcagtgtggctgcttagtagaaatgctcagctcagtgggaaagggcaggctggggcagagatcaagacgctgccagatatttgacaggccagggcttcggagccagaggcccctctctgctctgttgtgtctcagatcagagcctcagagcaggacggaaaagttgatctgacttgactctttctgcactgctgggcctttggttcactagaaaataactggcagggcagggcaggcctgttctggacccagttgcagtgtggcaaagtgagcagctcgtgcccctttcccacctctccatgtcctctcatctgaggcctctttcttctcacccattcagcctggcctgttactgcatgctgcccctttttcttgtctgactgaactcaaagaagtgagattttcttttcttcacccaccaaccctttcttagttacagagcttggccagtaactttataaatggtgagtcctgctcggtccactcctcctaactccgtccccagatttatgagccacctgacgttctcccaagagagagcgaataagcaaaaacttggtatgccacctctgaaaggcagccagctcagtccatgtcatccaggagagatggtcagcccttttgttcttgacactccattgggatgaagtttttcacatgtcttaggatcataatccacaccatatatcagccccaagcctacctccctttttaggacaagcccaaggggtaggagagagagctgtaaccccatggttgtgactgtgggtttgacaggtctccagtgctcacccagggctgtccctaccagttactttcaactcttagtgccgggtcacccagaagccaagattggctggtgtacgaggggaaataaagcagagtggttaaggagatgaactttggagtcagaccacctgggtcaaatccccactctgccacttaactatttgtgtgaccctaacctccttcattcatgatttttttttacctgcaagacaggtataataacgatgttattatacttagagttttgtgaagttaagtgaggcaatacatgaaaaacattggtacctggtatgtagtaggatttcactaaatgctgtttcgtttccatgtttattgttattagcattatagaactgagtatgaattaatatattagtgccttgctgatgtcctactttgaccagtccaaacacaatactgcctcatgtgttcccaggttagatctgaaacctatgttcagacctgygtaaacaaaataacagggtagttttcttaaaaagaaaattcgtggaaacttccatcttgctctgcagagattctagaacagggagttctgcccatctcttggaagatcccagagtccaaatgcagacagtctaatgggaacyacccaggatgctggccagaggacatgctttgctttgcagcataaaatatttccatcttcaagctcattgtcactcacattatttttaatagcaccttttagatatagaatcattttgaattcagaggtcactcacatttagtaatcactggactctctcctccctggatattctaccagtattttatacataggaaatattcaataatttttgttggatggttcatgggggaaaaaattgaagtactggccccaaagagaatatgaaccaaaatcacagagtttggcagaaaaagarcacaattaatgcccattatgtacatattgagtattatctttggcttttagrgtcttattggcggaaataataaagttattgctgtaattcatgtgtctcttctttggcttatacatgtagcctyagcttagcaggaactcattttttaaaaatcatttaaaaatcaaaacattcaactataaacagatgtatttcgactcagaaagtgcccacttaggttgattcattgcatctgtctgagaggtgataatgtccaccttccagggtgtgttgacragtaaagaaatgaaggtatgaagaagaggtttaagaagctggataacttttcagatccaccatcgccagcaatcttgagtgaaattggcagaacattgggactactgactcaccatatactatgcactctatcaccttctaaagcagtggttcttcaccttggctgtacatcagaatcacctggggagctttacagaatgctgatgcctgagttccactccaagattctcatttaattggtttggatgtgacctgggcagcaggactttttaaaactttccagatgacttaatgtccagccccagttcagaactattgttctaaaaagacttcaagtcactttttgggatgcttcattcctttgggataatcataataataataggccagtttttgctcagtttatccagcatctagtgttttgcaacrggggactttgagaagatctagtgtgccatgggaagtgtaagccctagaaaacatgatcacccaatgtagtgcaggcagcataaatggtttggctacttcttatctttttggctatttcagagctcttatttgaatcagacagaacggaaatatgtcagttttgttggtattttaaaaatgtatcccaaaacactcagaaaagtattcacctaaagccacatgatccaatctttctattatttcactagaacatacgctccattagcccagtgctttttatctatttgttcactactgaatctccaatgtctaaaccgtccttgggatacggtaggcacttaatagattcttgttgcaaaatgaatgcataattaagagtggatttattatgtgccctgttggaaaggggaaccttcacactgatggaagcccacctctgtcatctatctggaatctctgatagggagaggcggctctgctcagcttattggtcccccagcttaggggagtatctcttgtcacttggctgaggcctttccgatgggcatcttctcaaattatcccttatagttactctctattgtcacaaaatctctgagactgacagcagtgttccgttccattttatcatctctcctctaatcatttcccaggcaacgggtatggggattgtgcagccttgagaaatctacttaacctctctgagcatcagttttctcatctgtaaagtgaagatactaccgacctcacaaggcggttgtgagagttacatgacttaatgtattttaagttcttagcacagtgtttggcccacaattggcctttaataaaggttaatcttagtctaccttgcccttcagttaaacagtagcagaggaaggcataagtacaatacattctcattattcactgaagttttgttctagtaagtcaccacaagcactgaattagcaaatactgaaccactgcttctgggagcaattcagttaggttcctgcaagcctccaatcacatttttatcaactgatcaatatgtcattttgttttatgtgtgattctgtttaaaggcacgttatttaatataaattacgattcattaacattgaactcatggccaacagcaagcactgcagctcaagccagaatgaagcttgtctaacacccgtattttccataaggcatatcacagcctgcttgctcataaggaatgactagacagcacttcagcacaaagtttggggccattttagacagctgagtcaccatcagaaagcacaaaaatacaaaaagaagtggcaccacacagactgtaggaggggtgcttgtttgatagtgtgacagctgaaactagaagccagagtggtgccttgttccacctcagtggggaccccgtgactcaaatgtttgctgctctgtgcatgtctgcaaatgatttgatttgggggaggcaattacactttagcaagtaggtgaatttgcaaatatggcatccacaaatagtgaggattgacagtgtttggaaatggtcaagggttcagcaacaagcattagagaactaccaaggattccgagggcagaacccaagtgtgggtgacgcttcctttatatgcctcaaagcataaaacgtcattcagggcacagagcagtatttaggaaataattcttggatgactcttgatgcagtttaacaaacacgtaaactagccttgttttgactatcccatgatgagcctgtttttgccctgcaccctcctacaagatgttagtgagaagtgtagagttcattaagttttcataggagtggcaggaaggttttgtgggaggcttctcctcccatttctctgcacagccttcccaccagctacagagcatcccacgtggcccttacttcacatggagccaccctcaaaggcactgtcctgtccacaccctccccacaaccacgcctgtcatctctctcccagtttccacttggcaagtaggctctgtccctggctctgtggagtgcacccatcttttagctcaggacacaaggttacttggatcctcactatcactgaaagtggaaaattataataattccatcactcacatccagtgcctgctttttgtaaatgatgtgctgggtgccagatggaaatttgccccaggagaaagactgcccctgctctaaggagcttagaaacctgcagtccatcctggtggaagaaagaagagggagttagactcaatataagagagtccctgtgtaagccaagccaataaaatgcacaggaacaaagaatgcacacacacacccctcaacccttcatttttaattattggaagcatattttctgggcaatttctactggaaggggaaaaaatgaacaaaggtacatttacatctgtggcctgtgaatacattataatttgcagactctatgagcttatacataatgtaactatggctagaggtgtggtagtacataaatgaattagttattactttgcccaaagtgacattccagagtgcagatgagtgaatcttatgtttgcttagacttgagctaaggagagaatattgatccaaaagaatcttaaagattgtatttaaataccttagtaaatgctaaggaaaaaatatgcagtaaattcacttcactctacctagctccctggcaaatgtgtaaaaaaaaaatttaataggtgcaatgacctattgatgagaatactgtttggcagttagtctctaacaattgtcagaagtttcactttttggacaaaccacagtggattttaaattctttttttttttttttgagacagagtcttgctctgttgcccaggctggagtgcagaggtgtgatctccgctcactgcaacctctacctcccaggttcaagcgattctcccgcctcagcctcctgagtaactgggactacaggtgcctaccaccacacccagctaattttgtatttttactagagatagggtttcaccatgttggccaggctgatttcaaactcctgacctcaagtgatccgcccgcctcggtctcccaaagtgctgggattataggcgtgagccactgcgcccagcctggattttaaattctaaacttacatatccttgttaattaaactttagctgctgtgcagcttcagtgtgtcctgggaatgtaagctaatttcattttattttcactaaagatcttttttgttattaaacactaacagtggaaatttgtagaattcattgaaatcaaagacagtcattgttaatattttgtattccattctagtttttttctaggctcatatgacattattttgatcatactaaccatatgtatttatatcttgtttttcatttagcaagtaggtgaatttgcaaatgtggagtccatatatttgcaaattttaaatttataactaatattttccatgtacttaaatattttataaattttatttataaatctatatttgtaataatttgaatgaaccataatttactcgtttttctgtcataaataaccttttaattcacatctttagacacaaagatctttcttctgagttatttctttataatagatcccaaattggaattaccaataaaatgatatgaagatttatatatatatatataaatttttatgtattgacattagtgattccagcttaacagcctcttctaaacaattcagacacattatctcctaaaaacaaaagcccaaaagcaaaacatttcaataatacaatagaaattacttgttaattatcattagatttgtattgtgactgctcatcttcaatggcatagagaccattgagagttgtacctgcatcctagtttctatttataaaatttgcagttactagccataaaaccagggaccctgcctgttacctagtttgcatctaatattaccaggaatcatggtttctatctcagatcatgaagagttattccagcaagaacagaaaggatatgtgtactataatagttttctttttttaagttcaatttgatcaatcaaatatttcaaaataacagggagaaggaaagaatattcctttgtacataattgaattgaggttcataaaaagcatccgcattcttactagagcagcttgaaaatgtttgttgtaagggcagccacccatctgagatgtaaacgggaaaaactttgtgaaatttggaggttttgtctttaagattttttttcacagaagaaaaraaaaggtctctactattctatttgactacagtcaatggcatacctccaggttgaatctcagcagctctttaaatgcaacttccctgcataatactgagaccatgatttgaccgcttgtttcacttcagtttctgatatgtgctgttattctcctcctgtgagggacagcctgtttcctgctccacttattaaaactagaaaagaatttacttacaacatttttaccacacgtgcccttggagctctccttgggtccttaagagggctggcaaagccttgtttctctttttctcaagccctttaatctccagcacattcagcaacaattgtcctttgtaaggcaggtattcctgttaatacagtaaacagtgctgagaatacatgtataaaatggaaaagctgcatgtgattttcaggcagaattattcccgtattcgactgggagataggaacagtaacagcacagtgcattttctaagaattttcacatatgttcatatgcatatcaccttttttaatcctcacaataaccctgtggtaaagtattatcctcacattgtattaataaattaggcaaccaagattcagtgtgtttgagtgtccaagcagagccactgctaatgggaattgaatgaagctggaatgaggaatccaggtgagttggtgtgtacacggacacacacacatgtacccacatttcaatccaaaggaagctaaaattgagtgtcagaagcagttaaacataaatatgcttcactcactcattcattcattcatggttcttccattcctaatcttgtatctcctacattaaattccctgcatagttaatactctgcatttccacagtctccagttactctggtcattaccagtatgtggaagtgcatatgcttttgcctgttttgttcaacygtgtgtgtgtttttgaagaaacacatccagagactctaaggctttgttttggtaaattaaagcaacttaaattccaggtgttggcagtggcagttgtctaacatagcatgataaaattatcccccaggttcctatatgcgtggttaattacaggtgatccaactcccaaagaatacacatggcctggatctctgagctctgctgaataaaataaccaatgtataatttcattttctgtgaaaaatgttaactaaactagaaaaggtgatcaaataaactgttgctctcacatgttttgttttgtttttttgagatggagtcttgctgtgtcacctaggctggagtgtgcaatggtgcaatctcagctcactgccaacctctgcctcccgggttcaagcaattgtcccacctcagcctcccaagtagctaggattacaggcgtgcaccaccacacctggctatttttgtgtgtgtatgggtatttttagtagagacggggtttcaccacataggccaggctggtctctaactcctgacttcaagtgatctgcccgcctcagcctcccaaagtgctaggattacaagtgtgagccaccatgccctgccttctcacatgttttctaaaaataaaacctctatcactgaagagcattaagaactttgtgaggaacaaattaactgttcagtcagtttgaataaaattgagtgctctggggagactttattgttgtttgtgtgtgtgtttcaacactacagaataagatgtgactgtgacccactaagtccttaaaaacaatagggtatatcataagaactagaaagcctaacttcagacactgacaagaaagcaggaaatactacgtttctcatggtagcaagactcaggaaattcttacgcaaacaaagagtgaaggaacagttgacggcagttttctgaatcaatccctcaacatataaggagatggtgggatttggggaagaggaagagaagaatgatgaccaagaaggacaatagctggtctattggtaaagaatgtgttcagctgcaagtaatagaaaacttggctctagtggcttggccaaaatggggtttatttgcttgtagaacagggagtttaggtgtagatggtttctggtgtggctttaaccactcagcagtgctgtcaaggaccagggtcctttcactctttctgctctatcatcctttgcatgttggcttttgtatacatgcttaataattgcaagaaggcttctgcacctcagatcatcgtcatcattaaagacatttagaaggaatagagaaaaggacaatgccagccacatgtcccattatatcaggtgagcaaatgtttcccagaagcccatactcagcaaatttctgcctaatctcattggccagaaatgatcactgggacaccctattgtcaaaagagacagagaagggggtggtggacactggggctgagtcagccggctacattgtctgccatagctgggcagcagttctttttagcttttcatttcagacacagttgctgaaggtgaattcaaagggtgactagaagcttagtgttttagagascacagaccccatcagacttcactgaagtgtgaaatcagatgataaaataggtcatagctggggggaaaaatggaaagctttgtagcaaatatgtctttcccaaagttcagtggaaagaagtcctatctgaaagatgtcaaaccacatagagtccattttgaaatgacatttcactctttccttyacagaaataatggctaccagaattgagggttcctgcctgatttaatttaatatgtggaaagggataattttaaaatgaactcaaaaamagaaaaagttataattgtatatggatagatgcagtaaaactgctttaaaaaagtctactttcatttttataaattgtataaacttcaattcatcctcagatctaagtaaggtgaatttctaattattgtagtgtttttaagcttatttaagtcatacatgttatggagattaatgttttggagagggtggggttcaaatccccactcccccacttactaaatgtgtgattattaaatgacaagttgcctctctttttttttttttttatttttttgagacagagtctcactctgttgctcaggctggaatgcagtggtgtgatctccactcgctgccacctctgcctcccaggtttgagcgattctcctgcttcagcctcccaagtagctaggattacaggtgcccaacaccacacccagctaatttttgtatttttttggtagagatggggtttcagcacgttggccaggctggtctcgaactcctgacctccagatgatccgcctgccttgacctcccaaaatgctgggattacagacgtgagccaccgtgcccagccagcaagttgctcctcttaacctcagttttgtcatctttaaagtggggacaatattgcttacccaaagggttggtgagagtattaacttcatatgaggttctaagcatagtgcttgccacacaatagggtctcaatctggccgttgcttttatcattagtagtagtggctaatgcttcagaaacagccctcaaatgtcatactatggtacttttaccttcattcttccctctttttctggagggatawctagagatgggatgaagggtagaagcagaaactgagagtggtaggaatgattggatggtattatatggagaaaatgagggctgttcttgcccaaactggtcggaacstcaatatttttatatacttacaatttatagcctaccttattttaacattatatttgtggcagtttacatcaccatgcttttcagatacagcaatagtgctgcaaaaagcactaaactgcctgggcatggtggctcacacctctaatcccaatactttgggaggctgaggcaggaagatcacttgagactaggagttcaagaccagtctgggcaacatagtgagaccctgtctccacaaaacaaaacaaaaaaaaaattagccaggtgtggtagtgcatatctgtagtcccagctactcaggaggctgaggtaggaggatcacttgaacctaggaatttgaggctgcagtgagccgtgattgtgccactgcactccagcctgggtgacaaagcaaagccctgtatcaaaataaacataaagtactaaacttagaagaaaagagtctgaatcctcctgcctcagcctggcataagccaccacagctggccaagcatctgaatcctgactatacattgactaacagtgatcattggcacattgcttaatctctttgtccctctgttgtctcacctgtgaaatggagcaagcaggacctgtattaaaggattagggttagggttatggaaataaacgaagtcacagatttgaaagcctttgtaactgttaggcctttatgaatccaagattgtattccctctgactttaccaactattgtagtaacaactctcaaatatgcccagtcagttaactgatataaccttgygtatagctgtgtcagttatttacttttttcctatatacctctggtccactcctccccttcaaatcactatcagcaagtagtgcccasggactcctgtgttataacattagccagaaccaaacagttagtaaggaatctgctacaacaaatttatacagagcaaaatataaagtattttaaaattggcatccttttgagatagtctgttcctctcctgcccttcrttagttgggtactcaagrgttggcagtgttttcccatctagaagctcatgctgcatattgacctgcaaaggtattagtccaggtaccratggcaacttttatgttatccatcaatcactttaatgagtacaagaaagcatcctatcaccctgccaaaagacagaggaattaagaatgactcatttatcacttaaatgtgtgagtgttttctatgtgtcaggtgccatcctggtgctgtggggcacagaacacagactccagtttccaggggkttaccgttaaatggggctgaagcagcaacagtgtgtcsgtctcctgtattcaatctcctcataatarctgagccactagatcaggagcagtggctcacgcctgtggtcccagcactttgggaggccgagacaggtggatcacctgaggtcaggagttcgagaccagcttggccaacatggtgaaacccagtctctcctaaaaatacaaaaattagctgagcgtggtggtatgtgcctgtaatcccagctgctcagaaggctgaggcaggagaatcgcttgaacttgggaggcggaggttgcagtgagctgagatcacgccactacactccagcctgggcaacaagagcgaaactcggaatcaaaaataaaaataaaaaataagatggtaaaatttgtatgtgtattttactacaattttttaaaattagaaaacaaaaacgtaaatcctctagataccaaaacccaagccccatggaaaacatttaccacaaaaaggtgacaagctatccccacaaatgccaaaatataagtgggttggaacaagccacctatgccaccaagcctgcaggctgtcagcagctaggtggaaagacacagagggcagtaatgaggtgatgacagatccaataataggtaaatctcaacatagccaacaggttttcactggaaagtccattagtgggtgagtgcaagggacccaaagggtggaaggggcttgagtagcctgggtcccgtgaactctcaaaacccccagcyggggctcctgatatggtttggctgtgttcccacccaaatctcacattgaattgtaactccataatctccaagtgtcatgggagagacctggtggaaggtcattgaatcatggaggcaggtttttcccatgctgttctcatgacagtgagtaagtctcacgagatctgatggttttataaagggcagttcccctctgcatgctctcttgcctgacaccatgtaagatgtacctttgctcctcctttgccttccaccatgattgtgaggcctcccaagccatgtgaaactgtgagtccattaaacctctttactttataaattacccagtctcaggtatgtcttcacagcagtgtgaaaatggactaatacagctcccttccaggacagggcccttcaccaaagaaaaactactaggaatagaatcaaaattgagcaggacagaaacaatagagatgaatgaaacaaaagaccaaataaaagtgaaggagggaaacaaacccagaaaatcacagaaagcatgttactgtttttaacactaaatgaaaacaacacaaaatggagttctgaggagttgcaaaaaggtattttggacaatgtctccttgtaaggctgtggaaaaccaattttacattttaaaaaagcacagagaaagattaaggccaaaccccatactagaaagaaattttatataagagaagagtgagagagagaaagggaataacatccctacctgcaatgaaagcacgtctgcaaacaggtgaaaacthcaactgactatctgaataacatgagctaaaagacattttttaaataatacaaataaagagtaacaagccaaaattagaataactcgaaaatgtggtgaagatctcagttgttatttcagaaatgaaaccaaaagaaacacaatagcgaataagaacaatagagaatcccttaaaagactagraggttaaaaggaggaaaattattaaattaaaaagaaaggargaatgatcaaaagcagcaaccactgaagatatgcagagcagatctagcatacggataayaggagtcactgaagaaggaaaccaaagcaagaaagcaagccaacactaaaaattataactccaaaaaacttcactgaaatacaagaaaaatgtagaactacattttggaagaccagacagtatacctgagaatatggatctagaatgacaaatacctattgatattctagtgaaaacaatactgcactttaaagaaaaagaaaaaaggatctagcccaggtgcagtggctcacatctgtaatcccagcactttgggaatccaaggtgggtggatcgcttgatcccaggagttcgagaccagcccaggcaacatagtgagaccctgtatccatttttaaaaaaaattatccaggcatgatgtcacacacctgtagttccagctacttgggaggctgaggtggtaggacaaactgagcccaggagtctgaggttgcagtgagctgtgatcacatgactataatccagcctgggcaacacagtgagaccttgtcccaaaaaaaaaaaaaaaaaaaaactttttttaaacatctgagtaaaaagattaaatgacttataagggaaaagattacattatcatcagatcatttgacagcccctgattttaccacagaaactagaagccattgaataatagaggcaattcaggtttccttgcaagccatttttgggcagtgccttataagtggtggaagcaagaattgctgcacgtgttcagaggaagtagccatgacttccacctaggagggcttcatggaggaggtggaatgattgcatcttaaagaaatcttggaaaatgtttaaactgccgacatcagaatagtataatgcataaacatgtgacttaccctcaaaatgttcaagtctgtataatgttgaattcattgcacaccatttcatgtccatgttttttcttcatgatttttagaaaaggcacttcatttttggctaaaggaattttttttaatactgaaatttgagtaattgattctgttaatccagcatatgctcctattaaataaattgtatacaattcagtgacttcattagagatgataagccacatacttaaattttgtgatactccctgataatctgcattcattgataattgagacaaaattaatcatatataatcaagcaaaaatgcgaacaaaattagctgtcagaaaagcattatcyagtctttattttttagttaactttagatattttaacaacacataaaatgagtggtagggtatatttgtattttactgtataggacaccttcagataaattctaaaaataatttgcatttcatgtaatgcttttcacacaaagtaatggccaaactttagggtcagtttgccctgcttcataccacatgcagaacaaatttaagatggattaggactccaaatagaaaagaaaaattcttaataaaaaactattcaagatggataaaaggattaatttcaagaaaaataaaactaataaaatagaactattctggtaacccagaaaccataagagaaaggattaacagattagctgcattaaaatttcaaatttattacttattcattcacccattcatgagataattgtttttattgagaacatactatgtgccacgcaccattcctgctgctgagggcacagcaatgtactaaacagccagcatcactgcccttgtggcatgctgtatggcaaccaaaaccataaacaaaacaggaagacagtaatagcctggagaagttatttgcaaaatatttgataagcaaactaartatctgtagtaaacaagagctcatgtaagttgatcgataaagcaacaggaaaaagagaaaagtaataaatagtgaattaaaaggaacaactgcaagtggccattaaacatgtgaagagttgctcaacttcacaacaagtcctgaaatgcaattagaacaacaataacctacaatgtttcccygttcagcttagccaaattttttgaaaatttctcactcccactgctgggaaatgtgcrgggaaatggggaccttcctgcactattgccaagaccagaattcctaacaagcttttcaaaagtaatctaggagtatttattaaaattaaacattctcataccctttgacccagcaatcttatttctggaaacctctcctacagaaacaaaagtgctaaygcatagggacataagtattaagaatatttattgtatcatagtttgtatatagaagaatttggaacatctggaatattcttaaagaattatgcccatgtttggggacattttgcagctattggaaagaatgaatttgatttatgtgtattgaactaataaagctaatacataatacatggattgttcactgaaaaaaaggcagtttaagccaggtgtggtggtgtacacctgtagacccagctactcaggaagcttgaggccaggagttcaagataagcctaggcaacatagacaaaccctgtgtcttaaaataaaactttaaaaaaaatttaaagcagcttgcatgttaataggtatgaaattttcattaaaaaaataaaaactatatgtataaacagtttatataagttgttggggggttaggattatcaggaggtaaaagtagacaacttgctgcttctttatatatttgtatatytgaattgttacagtgagcatgcacttttgcattttttaaatagcaacaaaatattttaaaagaatactgaaccactacatcattgatattcctcataactaaatttcgaaggttcttttctttccttcttctaattaccaaaaacttgattcaaatttaaaactatacactcatagatctagaatgattctggggtgatatttcagttcatcattaacctttccctaaccacttccctgtatcatcttagtctaagagatttcaaacatggcaactccaaagacgcaggtcccagaagagctctctgagaccgcratttgggacccacactggtcaaaagaggaaaatcacagagcatcctttgtaaactcagccttctctcaggaaagtctttcttattataactgatattccttgggctgaaactcacacctgttcctccacttctgatgtagagacaaagaggattcttgaccccaaaggacctcctagatcattgcttcaacctttccattttacagatgaaaaaactgaggactaagtaaaatgtggggagaaatggtaccaaaacccacttcccctacttgctaatcagtgcrttttctgttgctctagtagtacctttctttctcacayaccagcatccccgagtcggttctacaacagkgcctttcaccyggtaagccaaagtctgttggatgcaaactgyttacacagaatcccaagtagaagctaagttatcaacgtcaaaggaccaggaaggcagggtgattcaattgcaaacccaaagcagcagcactttggagccagaatagaactctgaatagtcctttattttgtgctgaggacctagaacttccacttttctttctctggagccagacttcatgctggggctttgttttaaaatcaaggccccagcggactcagaactaaggaatttttttcacacatattcaaaacggaagccctgccaccatggggaagctcaaggtccttgctcagcttctgcttgtgtttgggctacatgaaaatctctgggtggtggttgatgtttcccgcaccaaatgatttctgcacaaggcccgacattccccctgccctgatagaagggtcacaccacacaccaagaaggatgtgactaataaagagtgtgacttcagagaatttacaagtccagacaacttctgataaacatttaaacagaggtcaggaatgttttcctttctgaggggaaaatatgtggtctatggtgtgagtgggaggggctggtggggggtaaatctaagcattagcttcctcccttcataattcttaagcattttaacagcagtcatttttaatgccctaacaggctttcagacttagaacccatagctgagtatgggccagaaagctctgtgaaaaaaaaatgggcaattccaaagtgattaccaagcaagtttaaaactaacattaggatcattagaggcactttccctgggccctgccctgaagctaagaatgttccagaaagtatcactcaaggcccattttaagtacccaggttgggatcttcacttcccctgctgacaaaagggggaagctccatagaggaaatgggtgttgacttccaggaaaggaaaggtgagaaggaccagatggcatctgtcagcatcctcagcccaccggagacattctgagaacattggccagggccaaggaggagagattgatgagcggaagccaacagagatatccccttggcagtggaaaggaaagctgcaggtcgtttttgtgacccaacacactttcattggtrgtgctgatccagctaatgtcttttagcattttccttttcattggctgtttggtttgtctcctgacatttcctggatcggtgtgcacggtaggcatagggtgagtgagtaagactagtattctctctggtcagttctaaataaaaagtaagaaaagaaaatgtcagccaggtgtggtggtgcacatctgtagtcccagccacttaggaggctggagtgggaggatcacttgagcctatgagttagaggctgcagtgagccatgatcatgctactgcactccaccctgggtgaaaagtgagatcctgtctcaaaaaataaaataaatttcactcaaaatcttcctctaaatgggaagatggggactcagtattggaagaaaggttctgataccaactttaggaaaacccttcgtgtgtctgcaatcaatattcttttgaatatatcagcttccgttgtttcagctataacccctgtaggctggagcactcgggcaatgtgagtagaatgcagcagtgtcaatttccctcctttgaatcttagacaggtagagaaattatctcattttaaagtcctaagtattcccatactcagttttagacatttcttgcttttcttactgagataaagtatgttwttttgaaaatccagtcttcagaaatctcattcactttgtcattggttcattcattcttgtagtcattcattcattcaggtacccaccaagccctgtgggagaccctgtgttgggctaaagggccatgtcaataggccatcactcagaaaaccgtgggaatcgtggtcaggatggaagttctagagtcaaacctaccctgaatcctggctctgcttcccatgtgctctgtgattctgggcaagttatttaacctctcaaagcctccaattcctcatctctacaatggggtaataagcatagccacttaactagatttctgtgaggattacctgagataatatatggatgagcctgcactgtgcctggcatacagtaaactcagtaaatgataatagaggcaatggtaaggacagtagtaacttttattattaacaattattaatgagacaaatagcatgagagtgataggaaaagcgctgttagatgttggacagaagataactgggaagayttcatatagaatttgacttactagatttttttcacttgaggtttaaaaaaaatcttagtggagaaattgggaaattccctttcctttgcatttcattttctattactttcctgaagactgaaacttcagtgtagaatttagctgaaggctacatcccagcatttgcattggccttggagtgccagggtaattattctgtcaattatttgactttttaaagtctgtctaccttgaagaacctctgcaaaggaggacygtgttaatgtgtaacacagagataagcaaggctctgctcttttttttttcccatggctgttcaactggaaaactgaaatggttctatttgcgtctcagccagcagtgttgaaaggtgggggataaatggcttttactaatgaagtacagtgggatgtgaattttagcaatgcaaaatgccacgtatcacctgcaatttgtttttttaaaacacacacacacacaccaaaaaagggaaatcacaagacaayataaacctcgcttgaagaaacgatcgtgtttaacaagrcagcaaagagaaatactctgagttgagccaagtagatgtgtgctgcttttgtagatggaataaatgatcctcacttgcatagacagcaaggtcatttttctcaccctaaatggaaggcattaatcatcagctctgaagaacaacattcaggacaagaagaaacaagccaccgcagcaggaggtattgaattgagccagagaactgggggccctgtggacgggagccagctcagcccaggtagcagctcccagatcagcaggggtgggtggtggagctggtcctcttgagccctaacagctttgttgggaactttctttgttcaagaaatctcctagttaccatccawgtgcatttctgaaatgcctgactgtgctccgggctctgtaggctctggattagctggttctctgtggaccccgtctgcataaaaagcaaagatcaaaggaacatggtagagctctttaaaaaaaaaaaaatcctaaactcacaagtgaatgrgaaatgcatatttatatcactggcccatcaagggtaagggtgttctgtgagaggggaggaagagaaatcattaagcaggagcgaagctcttcagattaagagctggaagaactgcattgaagactaagaggagactgaaggcaaacagtggatcttttaccatttttcttttttttttttagacaagtttgaaatcgagttttaccgctttcccatcagctacaccaagtagtttacttgtgcagtggctaattaatttgttgaggcagaattttaggttacctatgaggtaatatggaatagtggttaggaggtgtctagctttttratcccagctctatcatttatgagccttgtagcactgggcaagttactcgacctttctgtgtctcagtttcstcctctgtaaaataggagacagtacgaacctcacagggctgtcgtgagggttaaattatttacacatatgaatgcccatagtgagcagtcagtgaacaggtattgctgttgattttgttaccgtggccacagttgggtggggtgggtggtgcgtggcaggaatgagttgaggggggaaaagagtaacatgaaacaggataatagaatgtggttgttgacaggaaccatgaaagtcatccggtccagctcccccttaaccaaggaaacaaatcctattgcattttaaaataattgttttgaaattgtaagtaatagtgccgatttattgattgagtgctctgtgtgccagacagcatgggaagccctgcgcctgcatcacaacactccacgaggcctgagtgctgttattaccccattctgtagatgagaaaactgaggctcaaaccgttaagtcatttagccagcatcacctggatcggaatgcagacctgtgtgaatgcagagattctgtgagtgacgcggcagttctgttccctttgcatttcatttcctgttacattcctgaagactgatgatgcttcagtacaagattcaactgaaggctgcattccagcatttgcattggccttggagtgccagagtaatatgttctgtcaattatttgaccttttaaaatatgcctkcttttggtcagctgtggtggctcacgactgtaaccctagcactttgggatgctgaggcakgcagatcacttgaagtcaggagtttgagaccagcctggccaacatggtcaaaccccgtttctactaaaaatacaaaaattagccrggtatggtggcatgtgcttgtaatctcagctactcaggaggctgaggcaggagaatcgcttgaaccygggagatggaggttgcagtgagccgagatcacatcactacatcccagcctgggcgacagacagagtgagactctgtctcaataaataaataaatatgcctttcttgaagaactgctataaaaggaggactgtttggatgcgttctgtggtctcacagaagtgaatgtataacatccatgaatgcatgccttattctgctttgtctctttcatataaacccagagcaccatattttgtttttttgtttttctgtttccacactatactgacatacagagtacatattttgaaaaatactttaatactattaattttgagtaaatcatgtttcagtactagtgaggttagcgtttaaaataaataatatttattcataaaaaatttycctttggaatcaagccatcatttgattggatatgattgaaattatgagtaagatgaaggatacatccctgacaactttcaactattgctcagatacacatgactgcgttttcaggaagtctctttattgttggatatcctttactgctgacagaccttcgttaccttgaccttaaataggtaatgattctttgatcttagtgcttccctctgaagtaactaaaatcaagactgctcattctctgacatggcttcccttcaaatgtagaggatatttcacaggtgtgtccccaccccaggcttctcttccttaagctaaacacccacrtcaccttctaagctggttttcagaccccacaagatcctttaatctgtcggttctactcttcacctcttggaagggagccagtgctgcaagactgtcggatctgtacagagcaggctggagccataygcttacaygaaggtgaccaaaatggctggcttcttagctttctggcttcaytgatgtcagggaggttgcrtggttaaataatgaaggaggagtgacaagcaagagccaagagagggacrtccaaggactgtttccaagtgatccatggtagaggcttcatggcattcctgttgtttgtgctttgagcaagaattccttggtacgttggttctagtaaagagatcagctatggtctgaatattggtgtcccccagaaaatttctctgtggaagctttaacccccagtgtgatggtattcacaggtgaggccttcgagaggtgaatgggattagtgtgctataagaagagrcaaagaaagatgatctctctttccaccrtgtgaggctacagcaagaaggcagccatctacaagccaagaagtgggcctccccagaaccctaccatgctcgcaccctgatcttggacttcccattcaatacacttcagatgcttaagccaccargtccatggtatttgttatagcagcccaggcygactgagacaagagccttggtattcgagatttttatatcgtattcctgaattctcgaaagttctgaaaataaagagatgttcatagggcccatatatagttatatataacagatccatgttccaagtggacaaggatgagtggaaaggcaggtacttcagtcatacacagatattcaggtagctccttgatgacctgtctacccaccacattcctctgccttgtgtctaccttttttttcaaatgygaaaattatctggactttatttttctacttgtcaaattctctttagctttttttagctgttgtgttgacctcttctatctctaaaaggcatttggttattttttttaatgtttttgcttcactgaagcttagtgtgctttttatggttttatggttaccttgcagaaatctcattagaaaagcactttaatatattacttggcaatgagacatctgacaatrttctagttcattagttaggaaacctccccaagcttggaggaatagacattcctctgtgaatggtagagctttgatcactcctgcaggggccaggatttattttaatgcattttaggggaggagaagatatcctaagcctggcaaaataaaaataacacagattaaggaaacaatgaaacattattttaaaagaaatgcacttcagttaatattattctatgggatctcctgagtcctttgaaggcagagcttatcttagaaaatatgtctcctttagtgggcaggaggttagttaagcaacctcacaccagatcacagattatactgaaatgatcctaataaggaaagactttccaaagctatactcattttagcatgaataaatggattcaagtcttatttgtgggattttaatttccaactttgaatttgcaaactatcaaattccttcaaagacacggtgtgcagagaaggctctgagtaataggattgcttatttttaaaggaagatgccctttagcaaagcacgaggctttgacrtgtgatcagtcaagggtccaatcagcacggatttccccacatggcactgtttcttgttgagttccaaccagatttaataactcatacaaaatgcaactccaccctgagggtgcctagtgcattcaaagcagatratgctatattgttttaacacagattatgccaaatgaagtacaatttaaattcctgaagcatgacagtccttgggtgcttgtggctgtgttttagttgggtgctgtatcttttctttctttcttttaattgaaagacttaaaagaagcaagctgtctgaaaaagtgtttaaaagagcttggttttcaaatggtataaataggacagaggcagaggatgctatggaaaaagggccttcctccaactttaagaggtagaggaaagaaatgggagagtctgggcaaaagtgacgtaagcccctgaagtcaggctggagactcttttgtgtctcatgtgaggagagaaatgggtgaagcctatagtactttcacactcccctgaatgggaagtagaggccagatgccagttgcagcttctttttaactttttaacaccttcagaggcaggagaaaatggtgggtggggggaatgtttttatttgggattagaggtaaattttcaggccggacgaggtggctcaygcctgtaatcccagcactttgggaggcagaggcaagcagatcacttgaggccaggagttcaagacaagactgrccaacatggcaagaccccgtctccactaaaaataccaaaattagccaggcgtggtggcacgmacctgtaatcccagctactcgggaggctgagacaggagaatcgcttgaacttgggaggtggaggttgtagtgagctgggattgctccactgcactccagcctgggtgacacagcgagactgtgtctcaaaagaaaaaaaaagagagagagagagagagrtgcattttccaaagaggaaagtacgatgggcagagtttggaagctcgcttgctggtgccaggacagtggctgggtgagctgctgcccttgggaaagtcgctaggtcctcccatctttcctcttccstttttcctcacctttgtgcgatagagattatgatcactcccgatcaactccacaggactgtcctgaggatcagataaagagaacacgctttagaaggctcaccacaaatgggctgtggccrtggakgtggtggtggtgacagtggaattggcatctgggttggcttgtagcctggcctgtaactgtagttgtggaagcttagmgggctgtttgaagaggcccctcctagtctgacctcatgagccagagacactagtaatcttgggcagttctggggcattttgttgttatttatttatttatttaatttttttttttgagtcagggtcactctgtcacccatgctggagtgcactggcaggaatctcagcttatttcaacctcaacttctctggcttgagcaatcctcccacctcagtcccctgagtagctggaactacaggcacacaccaccatgcccagctaatttttacattttttatggagacagggttttgctrtgttgtccgggctggtcttgaactcctgaactcaagcaatcctcccctctcagcctcccaaagtgctgggatcacagaactgcaccaccatgcccaacccaaaatgcatttatttaatatacatcacaagcactcaactggaggcttaaaagactaataataataataataccacagctcaagatacagagtgctatacaaaaatcacagaaaggacagaccrtctaaggaaaacttaaaaagacgacacaaggacaggctgggcagcctgggtcagggctcctggctggtgacctgctttaagtaggtttcttgcaggtgcttcttaaaagctgtggggggtttccagagcttggcagcatgcctgttcaacgagctatcaatgytgggttyrcctcgaaggctgtggatggagagcaggatggtcctgacatcatacagggcagaccacttgtccttcaggatgtccaggcagatattaccctgggtgtccatgttggggtggtagcagggcgtgaggaacttcaccatgggtacattgtaagggtagcccctggggagctctagggagagcttatacctcaggtcttcatatgctgtgccagctgctcaatggatggtccccacccatttgaaaaggttgcctgattcaggcaaggcagaaatccctgtgtcactaggcattgtgaaggtcaccaactcctgctgtagccttttgcccacaaggtaccgggcagcacccctgctggkggtggctaggcagcagcaacgctggtggtggctgggtcaaggttttgacaggccatctaggtggcactgacagaaagataggaacttaaagaacacaactgcaactgmctatttaatttttttgagacagggtctccctctgtaacccaggctggagtgcagtggcgtgaacacagctcgttgtatcatcaacctcctgggctcaagcaatccttctgccacagcctcctaagtagctgggaccacaggggcaccccacacaaacacactcagctaattttatatatttttgtagagatagggtatctgcagccataaaaaagaatgagatcgtgtcttttgtgggaacatgaatggagctggaggccattatccttagcaaactaacgtagaaacagaaaaccaaataccatgtgttctcacttataagtgggagctaaatgatgagaactcatgaacccaaaaaaggatataacagacactggggtctacctgacagtggagggtgggaggagggagaggagcaggaaagrtaactatcgagtactgagcttaatacctgggtgatgaaacaatctgtacaacagacccccgtgacacaaatttacctatgtaacaaaccttcacatgtacccccaaacctaaaataaaagkttttttttattaaaatttaaatttaaaaaaagagataggggtctcaccatgtttcccaggctggtctcgaacttctgkcctcaagcaatctttccatctcagcctcccaatgtgctgggattacaggcatgagccactgcaccaagcctaggacatttttaataatcacctcccttaccccagccaaggttcccaatcctcagagaaaaagctgttcaagacaaaccttcctaagcagacccaaagctttgacagcccatatgaaacctgcctaggagtaccctgctagcctccatgaccaaatacgccacagcaaggctgatgtggctcccttagacctattctgatatcaactgagatcagtcccttattctgggcggagagcctgatggccacatgtgtgctgttagaggacactgcccacacagtgaccacccagggaaaaagaaagagagacccaatttccttgtgtgtgttgcaacatggccagtgttagagatccagggttgcttaatctaaccccaagtgattaagaaccagctatgataccagactgagtgcaaactkagttgtcagcacagataaagaaaggaaatagacacatcagatgtaaaagccccaaataggcctcctactgacagatcctgctctcctaamgcatgcagacctctctgacttgctgagatgtatgtatattcaatgacagcatggaattgaatggttgactagaagtggctttccagaggctgcagcaggaggaacattctttgtaaacaccaagtatttcattcccccccaatatatcaaaaacagtgttttcagtaggatctggagtactgcattgatgggcatcacttttgaccaacatatgctcatgcggtaccttatatagattcacacacttcttctagacaggctttgccaccaccttatgcacatggaccctcgggacttcagtaacttgcagggccaggtgtgttcagagcagaagaaataygaagtagtgtgcaatgaataggtgcagggagaacccrtcttcaaatgaattggmctttttaattagcaattttatgtgaacagattatttaatacattgagatgtgtgtgttacagcattcaacactgatccacaagcttgaacacatttgtgttttagaattaatcgattttaatcaagtagaaaaatgcactgaacatcccttgtatccaatgctcattacycctgcggccagtttgtgagctggcttgtgttgtcttagactttcagaagagaaaacaaaggtcttcttattgaaccttttggttgtacattgcatgtttgatttgagaacwgttatgrttcaggcctgcagtaagagattgagagccttacatcattataaatgtggcctggggcatccaactcatttaactagaggataatgcagaggagtgatttgcaactgacttcttcctcccacaaactaatatttttaaatggtttgcacttttttctgtccccaaagggatttgttaagtgtgattttcagcaggacatgtactttttttatttgttagccataatggaaatgcatagataaactgaatctgtgttaacataataagacaatcaaattttttgtttagttgtggggaagggacgggatagaggaagtagaaaaagctccctcaaacataagctgaatatttatgtggtttttgtttttatttaaaccaacctctttagaaaattactttcttaataagrcattatacaatgaatttttccagtcattttgagggaaaaatatggtactctgggagaacttctagaagaaagaggaaagactcacttaagattcccaggacctacagagggctggtgctgaatagttcccactgaggaccttccatttcggtgttttttgtcttttgtttttttgagacaggatctcactttgccacccaggctggagtgcaatggcacgattccggctcactgcaacctctgcctctggggttcaagcaattctcctgcctcagcctcccgagtagctgggattacaggtgtacaccaccatgcccagctgttttatatttttagtagagacagggttttgtcatgttggccagtctgttctgaaactgctgacctcaagtgattcacctgcctcggcctcccaaagtgctgggattgcaggagggagccaccrcacctgaccccattttgttttgttgtgagagaccataaacagcctagaaagatagaaatctcaataatgagaagtttctgtaatgtgtggctcctgcccaccttctctctgcttatttgctgtcttttttktttgtttgtttttttagagatagggccttctctgtcacccaggctggagtgcagtggtgacatcatggctcactgaagcctcaaactcctggagtcaagcaatgcttctacctccacctcccgagtagctgtgactacaggcaggtgccaccacagaaggacagaccatctaaggaaaacttaaaaagacagcacaaggacaggctggacagccaccagacctggctaattttttattttttgttttattttttgtagagaccagacctcactatgttgcccaggctggtctcgaacatctggccccaacaatcctctcacctcggcctcccaaagcactgggattataggcatgagccatcaccccaggcctatttgctgtcttgattctcttttctgctccctccagccccacagatggcccaagaccccaaatgggcagtcaagcttccccactaagttgagtttctttactggrcaactcaagatgtcttggtgagatcctgtcttgaaacaatgccaggaaagtacatgaggtctccttcctcctaaaaacacccctagaaggaggcctgggaggggcaagcctggcggttcaaactggtgattcaaccacccacataagaccctctaggcctaatggctgggtgaggggctcagagaatttctccaatcttggccagaaaggcttccttaccactttcacatttctctcgtgtccttcagaaggggcctgcatccaaaagtggccatggaaagcttcacagaattagcttttattgtaaaaaaaaaagtagcaaatggaggaatgactgaagagaaagcatgctccagctatcagtcaactttgagggcatgagcccatgttcyaaatttaaacacaatctgtccctttctccttgtatatccggtttcctttcacttccctcggtgccttcaactaatcccattcttggtttactgcttggcagtgataattatatacatgcactgtgacagttcaacctttcatgtgccarttcccatcytttgatattttcttttattttttctgtggaaaataatatgacaaaatcctgccatttgtatgttcttcatttttgactccaaccatgcactactgaatagaaagtatctcagcctcctttatttttctctgccgttactgatgtgtttctaggcccatcttatctgtgcattagctcattacttattgtcatcgcttgtcactggctgccrtttcccccgcctcccttgggtgttgtgtctacacatctttgctataggggaaattagatagtaaactgatgatgtcagtcctttgactggaggttagcatttcaaatgctcacatattttttgttaaactcactttttttttttttttttgagacagggtctctgtcacccaggctagagtacagtggcacgatcttggctcactgcaacctccacctcccaggctcaagcgattctcccacctcggcctcccaagtatctaggactatargcatgcacatccacacagggctgttgcccaggctggtcttgaactcctggactcaagagatctgcccacctcagcctcccaaagtgctgtgactacggcatgagccaccactcccagcctaaagcccacttcttttgaaacctcaacctatttccagatcagtgattcccaaatttcttgtaaccacaacctcttctccttatgtttggtttagatattttatgatatccacatttttcgctaccctatcaattattctccagggggaagagagcaacattttttgttttttatgaaaaacaagtagaactttttattttttattttttttagttttgaggaatttttgagaccatacaatactcggtggtctattggagaagtcctgaagtgttgcaaaaaagcaatcactgctttgaatcttggaataaggtcattttaatctcactcactatgttttttcttgatgtgttttgtgatagaaaacacataatatgaaatctgccctcttcacaaagttttaagtgtgcagtacagtgctgttaactataagcacattgctgtacagcaggtctstagaattttatacccattgaacagcaactcctcatttctcccttaccctagcccccggcacccaccattctgtgtctgcttctataagtttaaatactttagatacctcatacaaatggaatcatgtcatatttgcccttctgggactggcttctttcttttagcataatgtcctacaggtacatctgtgttatggcatatgacaagttaatctcacttattatttcttaaagtgtaaatacaagactaacaaaaaaaaatcccttgtgtcttccatgcactgtttaaggttatagaggctcacagttaaggcttacgttttggggtccctgggaggatataagttccagctctttttcgtataatgatgaaagtaacataaaagattctaggatggcaggtacaaagaacatgttaagaacagcccttgaaaatatatatcatcattgcagacatcttcttggggtcaactcataatgttcccaaataaataactgtccatccatgaggactttgtttgaatatgttattgatactttgttttgtttttggttttttaccctaattcttggagagaggactttatgactaaaaacacaccaaaaaaaaaaaaaccttccaaaaagagattatgattattaattaagaaagaactctagctgatgatggagaaagttcaaagatgttgtattattcagtttttttttcttcttttaaaacaattaaagccaagcatggtggctcatgtctgtaatcccagcactttaggaggccgaggcaggtgaatcacctgaggtcaggagttcgaaaccagccctaccaacatggtgaaaccccatctctactaaaaatacaaaattcactgggcatggtggcgcatacctgtaatctcagctacttgggaggctaaggcaggagaatcacttgaacccaagaggcggaggttgcagtaagccragatcacaccaatgcactccagcctgggcgacagagcaagactccatctccaaaaaaaaaaacttaaaactaaaggaaaatattatttgtttgctactgcayaataaattagtccaaaacttagcagcctaaaataataataaatatttaccatctcacacagtttctgtggatcaaaaacttgggagtagcttagttttgtggttctggcctggagtgtcccctgaggctgcagtcagtatgtcagcagggactttgttctggctttggattgactcactcacatggccgttgtcaggaggacccagttcctcatcacatggacctctcctttgtgccctttgagcatcctaacagcacagcactggcttctcccagagcaagtgatcccacaaaaagcaagaaagaagctgcaggcatgcactgtccctcccactgtattttattcaagtgcgtcaccagagtaagtcactaagtacagaccacactcaaggggagcagaattagctccacctaaaaagtggggggtggatttgataaagggatggaagacccatgccaccagaagggtggatgggaccttaaccagatactctagwgatactcagggacaaagagtgtatrgagtctgagcacaaactcacagctatggtccatgctggggctggagatgggggtagggagcaaaggaacacctggccagacaaccctgagagtcctctgggagtgaggaccgtggagcagagagagataacgggaatggagtaaatgactcaaagatgtgttagagatttcctgaggatgaggccaggaggccaccagagaagtgaatgcaggtaaagacagtggttttgaccaaagagcaagggtggatgccccaggccagcccaggagcttggcgccactggaggaagtgcattataccaatcagagcttcttttgctgctgctgaaatggaacggtgccatcgggccgtcttctccactggagatgctccttcagctcagcaggacgctagctcggaactcagactgcacrtttttgcggattgggaggagggccgacgccgtggccggatagtctctggagctgccttttgggggtgtttgcctgttggcattttcagtactccacgcgtcaagagtgagtcactttctcttcttgtcatgaagttaaattcctggkatgtcatcttcattttcttcagagcccctttccaaaactcaacttttgtttgcttcacaaattgccctgctaacctccatagactgagtttatttgtcttgatggatgaatcagagtctcaaactcatctcttttgctccagctctcttggcagagaacacaggaagatgggttttgcttatgtgtgtgtttggggaggactttttttcctttgtttttctgtcttagccatagcttgtgggcgagccggcacctgggaccttgaccgcctyctggcgtrggccgaggccacatggggagttctccccagtacgttttgtgatgttccctaattccaggatgggctgcagttttccagatccaaggctcaggggaactgggggaattacttccctggagccagccttatcttatttgtccatgtttcattcatgcaaattggaaatactcccacaactaaactgcctgctgaccatctgcctaggcagtggagctgtggatgcttaatggctttcctcagcaccttcctaatctcttagcttcgcactgtttccatggtagccagccaattgagaacagatcatgtttttgctatgttattaataaagtgcaagaagttgaattcctgtaattctagttccttttctgccgttatctaggaatgagctgaggcaaatatttaacccctggggcctcttatataagagatttggtcaagatggatctcagggcccttctaagtctcaagttcattggctataccatcatttaggaatatgaaaatattagtagggaaggatttatttatcacaagaggagaatctctatactttctcttgtcacccagctcactagaaaggatctgcaccttagcaagagatttccctctgcattgtggaatcggcagtttcttcatgttgggaaatagaatctaaattcatgtttttctcttaaaaccatacaaatgttcttaacatctttgtataactgaggcttatgctttgctggttgtttcttttaaatccattttcccaatataaaaatattgcttgtcaacacagacttgcacttctgcagttttatttgtttgtttgtttttagtcacccaggctggagtgcagtggtgcaatctcagctcactgcaacctcccgaggtgggaagatcactaggctgaagggatccaaccaccttagcctcccaagtagctgggatcacaggcacatgccttcacacccagctaaattttattttttgtgtgttttttggaggggtagagatggggtttcaccgtgttgcccaggctgctgtgaaactcctaggctcaagggatctgcccaccttggcctcccaaagtgctgggattacaggtgatagccatcatgccggcctgcagttttcaatcgttactctaaatgtcactcgggcttctcccactaaaaaatctgaccacttaacctccaatttttaaattttataaattgactaataaaggaatatgttgctacagcgttaatctttatcttttatctcctgggttttatctaagtttttaaatgaaattgctactgttttatagatatttaacttacgatctatgttagtataagggtaaaaattgagaatcagcaactctggtcattttattgctctagttgagtggctgagtcagaaacataaaaagggcatacccaaacattgacctgtttgtacctacaaacagctgaggaccaatttgtaaataggtcacagttaatcaaaatctctgcacttgaatcttttccaaatgctaaaccatgcccttctacaaactgtggaataaaagtagtcatagctagctatgtctagcatagtccagagtcccctgaaaatcttttcaatgatctgcaacaacaaaagccagtttcttggaatggttcctaaactcttgttatttaaaccttcataggaaaatactaaactgtgtattttggtagtgacattggttcactcaactactcagcagtttgctgattacctgctcaacgccaggcgttgsaacacaggaaagaactagagagaatcaattgactggtccttagcagcacagagcccacgatctaatggggtatgcagcaatttcaatgcattgtgaaaatgctatgataagggagagtcatgtaagaaccaggcccacattctaagttggaggggttggattcaggagtgaagagaggtgaggaaaggtcaaaggaggtttgtcaaacaaaaaggaaactaatctgagacatacaggatatctaggagttaaccaagcaaagctacggaggggtgggaaatggggggaatattctagaaaaaaatggcatgtgcaaaggctaggggctagggaggrcaagacatgcttgaggagccacagcaagttcattatggctggagctcagggttcaggagggatgtggcaagaaatgaggctgggaaaagctacccagagccagatcttatctattctggattttacagtttagtaaatgtattcattcaggaccattatcttctttctggtagttagaaagtttttctcaagaggaagatgtaaatctaaaacatttcaaatcccagagagaaaacattttctctaatagaaggattgctggactctacccaggagtgtttacyaagtgttaacattgacttttaaagttttcctaggattcctgccatacaaggtaattctatgcatatggcatctttttaatgatttgcaagacgaaacacaaagcatattttcaaatactgattttcacattaaacactgattgaaaacattaaaatccaataaaaagggctcgggttcccagatcactttattctaagatatgggtaggacttcagccatttggccacgatggggttatcatccacccagaattcagtaaaaggaggatgattcccacctatttggggttgcaagtctaagctacttatccagaaccactcagataacacctcagaaacatttcagaccgggtgcaaatagtaaagccatgacaccggtttatgattccagcaatatgtgaccttttctccaaaatatattaatgcttttactttcttgtttttctttctatcttggtagcttgtagacataactaatctccttggcttgacattgaaaacctctgtaatctagtttggcctacagttcttaagattctgttttcttctccgcaaacacctcactctccaacaaagcaaaatgagacacaacactccagccatacggattatgtagacaggtatcayggtagcatcggggaggccctgggtttggactcagaaaacctaaattcatgtcctgcccaccccatttccagtctgtgtgacctcgcacaagacacttagtcccactgaacctcaatttctttatctgtaaaatgactggcttctctcacaagattgctaggaaaaacaaaatgaagtaatggctataaaaacttgctgtgaggctaggtgctgtggttcacagctgtaatcccagcactttgggaggccgaggcaggaggatcacttgagcccagaagtttgagaccagcctggcaacgtagcaagaccctatctcattatttttaaaaaagtaaaaataaaaataaaatttatctgggaggtgtaaagcccattattaatgtaaagtataggagtccgccctcatccatggttttgctttccagtttcagttatatgcagtcagttttggtcygaaaatattacatgggaaattccaaaaacaaacactttctggttttacattccacacagtcctgagtagcgtgatgaaatctcaccccatccagctctgtccaggctgggatgtgaattttttcctttgtgtgggtatccacgctgtcaacaccacccactcattagtcagtcagtagctgtctcagctgtcagattgactgtcatggtatcacagtgcttgtgttccaagaaacccttattttacttaataatggccccaaagcgcaagaataataaatttggtttattgttatagttgttctattttactattagttgctgttgttaatctcttaccgtgcctaatttacaaaacagattttatcagaggtatgtatatataggaaaatattggaaaaaacatagtattaatatatactattaatatatactgtataaagttcggtactatccacagtttcaggcatccactgggggttttagaaagtatcccctgaagggataagggtggactattgtatttttatttttcctgcaaacgacacacagttttcccacatcttgaacatactgatccccttgcctgaaagcccatttcctctttcatgaatttagttctgacctactcagtaagaattttttttktttttcagagacgaaatctcgctgttgccccaggctgcaatccagtggctattcacaggcacaatcacaggcactacagcctcaaactcctgggtttaagcaatcctcctgcctcagcctctcgagtagctgggactacaggaaaaaaaamttttttgccccgtcactcaggctggagagcagtggcgcaatcatagctcactgtagccttgacctcccagggtcaagcaatcctcctgcctcagcctcttgagtagctgggactacaggtgcacaccaccacgcctggctaatttatattttattttttagagatgaggtctcactatattgcccaggctcccaggctggtgtcaaactcctgggctcaagtgatcctcccacctcagcctcccaaagtgctggtgtaggaggctggatctccataaaccctttgctgtaatgaggaatgtataagttaaacattaaagcagaagtagaaaacaatggataacgaactggggtaactggtgcctgagtaagaaagctcgaatgcaaaaacaaaccyattaaaaccttacctggacttcctcaacctcaaacctgattgagggatcaaagcgtgcaccaagacccacttaagaaactttcctacccacagacccatagttaaaattagattaagaaacactcccacaagtagacatagagcttgaattgtgtatataagctaaaggaaaacttgtaactttgagttgatctggtgagttactctgaccttcttcctgtaactggttgcaaaaataaactccctcctttcccagtctgtctgcatcttgttattggactcgagaacaagcagccagacctcatttgtctgggaactctgggattacagcccaggagattattttttatatttgtatttctatygtaggaccagttgcacttcgcctgttttataattgcatgtatagttgtcttcacttcctgattgtaaatccctatgggacaggagtccaaccctaacatctttctattcctcatgtgacccagcacatcacttagttcatgatggactgggacaaattaatccattccatgttttcacctgcttaatgctatacaatgctgaaatgtgatttagttagttattattgtagtcctttctcaccttttaaaccattttccataggaatttccccttaaggaattaattcaacgaagcagtagtacaagttagtgctctagatatagggatagatattaaagttgatgatgattagatgacatttttcttttttttgttttaaatattcttttttaaaaaaagtttattttaggtttgggggtacatgtgcaggtttgttacataggtaaactcgtgtcatggaggtttgttgtacagcatattttatcacccaggtrttaggcctagtacmcaatagttgccctttctgctcctctcccttctcccaccctccaccctcaagtagacccagtgtctgttgttcccctctttgcgttcatgagttctcatcatttagctcccacttgtaagtgagaacatgtggtatttggttttctgttcctgtgttagtttgctgaggataatggcctccaactccctccgtgttcctgcaaaagacatgatctcattcttttttatggctgcatagtattccatggtgtatatgtaccacattttctttattcratctgtcattgatgggcatttacgttgatcccatgtctttgctatggtgaatagtgctgcaatgaacattcctgttcatgtgtctttatggtagaatgatttatgtccctctgggtatatatccagcaatrgaattgctgcatcaaatggtagttctgtttttagctctttgaggagtcgccatactgctttccacaatggttgagctaatttacaccccyaccaacagagtataagtgttcccttttctccgcaaccttgccagcatctgttgttttttgactatttaataatagcaattctgactggtgtaagatggtatctcattgtggttttgatctgcatttctctaatgatcagtgatgttgagctttttttcatatgcttattggccacatgtgtgtcttctttagaaaagtgtccattcatgtcctttgcccactttttaatggggttggttttttcttgtaaatttgtttaagttscttacagatgctggatattagacctttgtcagatgcatagtttgcaaatattttctcctattctgtaggttgtctgtataccctgttgatagtttcttttgctgtgcagaagctcttaagtttaattaggtcccatttgtcaatttttgcttctgttgcaattgcttttggtgtctttgtcatgaaatatttacctgttcctatgtccagaatggtattgcctaggttgtcttccagggcttttatagtttggggttttacatttacatctttaatccatcttgagttaawtttttcatatggtgtaaggaaggggttcagcctcaatcttctgcatattgctagccagttatcccagcaccatttattgaatagggagtcttttccccattgcttgtttttgttagctttgttgaagatcagatggttrtaggcgtgcaggcttatttctgggctctctattccattgatctagatgtttgtttttgtaccagtaccatgctgttttggttactgtagccctaatagtatagtctgaagtcaagtaacgtgatgcctctgacatttttttatgttccctaattattaggaattgaacttctgtccagcctgatttaacatatgatgatcagtatgttccagaaagatctgttctttaatcatcttctgagcacattacaagccattgargaaagctagctagtgctaaccttatgaaatatttatggaattattattccttatttttttgtaagttaaaatgctccttgctgattaaaaaaaattacccasgacttttttgtgaatgggattaatcttctctctctctgttccacagaccatgactccctgttctccacagaggccaagctcccatggatatggggtggaaatttggagacaggtcaaagtcatatgtatcccaagagtcttgttcttattttctctatttgagtttactttgagctttcttctcttcaagtgtcagttcagctgatgtactggctcagaccataaccctttcccaaggactaggtaaacctggattactttctacctcttccccyttgttgacaagcagctggtgtttgtgaaaaagcattgtcttagtgcttgaagtctgctgccttagccaagttcagagatccattcattatctttgaagtgcccagcttcctaaaagggtcacacatgttgttaaagagackccctgagaacatacccaaaaagcaaggatgagggaggcataaacagcagctccaaggccaatttcgggagtactgagaacattttcttcctcgtgcctctaaagaatgagtttcctacttttatgtatggttgctctgaagaggcgccaaatctgaaatcccctgttttatgaggaaattattttcatttacataaacaaaagaataaaatctccaaggccagaactgatggttgctctagaagaaatgcctttggaagttctacaataagccccaggttcacgtgaccgttaggatactttgcatgtagtttctcccagtcyttgtaaaggcataatgtcctcacctttaaaacccaatctacggatgggtgcactggctcacacatgtaatcccaacgctttgggaggccaaggcagggggatcacttgagcccaggagttcgagaccagcctgggcaacacagggagaccctgtctctacaaaacaaattttaaaaacttagccagggatggtggtatgtgcctgtagtcccagctacttggaaggctgagttgggaggatctcttgagccctaaaggacgaagctgcagtgagccatgatcgtgctactatactccatcctggataacagagtgagagcctgtctcaaaaaaagaaaaaaaaatctactatagaaatcatgaaaaactcctttctgtgtctccctgcactgttagggaactaataattcaagtraaataaaaaacaaaactcaaaaaaagaaagcaccattaattaaagaaaaataatcactgcctaaaattagccaaagtgccaatgcagagatttctgatgtgaaaaatgccartaagagcagaaaagagtatttccatgccmctgcaatctccttctgtgaggtaacatgtcccacgtgcattggcatagctttgcttcaccttgttcccatttctcacagctcacacccagccagatggactcctctgtcccccagcctgataaaagcaagggtgacttgccttgctaaatggtaaattccttatgcaaagccttccagttctcaccaggcaggtcctcctctcctgtgatcagagagacatccccatttccctgatttcagagcagtgctatttggcacttytgagcctcacttgaacagtctggctgttcctggcccagactgtttactgcacccacatctagcaccttctcaattcctcttagcactcagaaaaattgtcttgtagctgaactcaaacacacagtaatacttatcctaagtacccaagacacacacasgagaagaactagccctacactagcgtaagaggagcattctattccaggttcagccttagggacgacactagagaaaataccaaaaatgggagaagaaacacgaaatcctgctaggaagctgagagaaaatctgagaacactcagcaaagaatgcatgagcaaaggatgggatagataacagacagcttttcagtctctagacatcacaaaacggctcagaaaatgaccagaggggccaagctggagaagaggaaaacactgagaaagagcagraggagctcagttatgcgckgctggctaacgtctggggttgtctgccagggagtcacggtggctgggctgtgacaatgggagtccggggcctggagggtaaaaacatacgcaagtacaaacgccagacgcccgccaagcagccatcacrccctgcgctctgctccayggaagtctgaagggggctattcgcacacagagatccctttwttcaacctcctccttgcccgcttaaagccaaaccgaatgtcttaacagagaggcaatcggaccagaaatgagcaaagggcggctcccaagttcgagggattttagataagacccatgcactccagacacagagccccatctccatacagaacagtcaagggcaggaatgaggagggcagaagagggacagggtgcaggtgggagatgactgccctattttatgaaaatggaaagcagtccagaaggagaaccgcgatgaccctgtccacccccgcgtgattgaagtggtggcggtgctggtgttatcaggtgtctgtacccttcacccagaaccagyccrctggattttctcaattcyccgtgaatactggcacctcccaagtagtacttggyctctcactccccaaaaagacctacgaacataatttcttctaatctgtccccctctcctcctttctaactttccaccttcctgtcttcctaatcatctgagtatctcctactcaaaaacaatgttttaattgagtrcttctacctagggagttttttttaagatacctgtaccagactccacgcccagaccagtgagaaactaggagtgcagcccaggaatgggcatttttttcgacacacccagatgagtccagtgtgcagccaggattggcaaccactggataagatcctgcaggacagaatccttcctagaggccagtacccggtggctgaggctctgcgtgtctgctgcctatttctgcagatgccccgctatgaaatcttttccaacctgcatagccttctggagactgaataaacctctgcttggtagctcctggtctaagagggtcaccctatactgcactgtcggaccccacaggcactttccagtgccgtcagcctsgcctgaaggatttgctgggatttctaaagtgtraatcttttccttgggcagagtggtgctwaacacktgtctggttctcagggagctgaagaactttagtcttctactaaagacccaaggtgttaagtctcctggtcctccttggttgtccgagtgtacagggaacagcagaactggccccattgtagcatcctcccagggagttcaggcctyggccttcagcttcgcaaaatgttttcaggaggaggtttagcaagtccarctctcctgaagtagaagatcacttgggaatctcttacatcctcttccccaggggcacatctatttcttcttctttttttttttttttttttkagagagagcctcgctctgtcgccaggctggagtgccgtggtgtgatcttggtgcactgcaacctccgcctcccaggttcaaacaattcttctgcctcagccttccaagtagctgggactacaggcacgtgctaccaaaattagcctgactaatttyttgtatttttagtagagaycggttttcaccatgttagccaggatggtctcgatctcctgacctcrtgatctgcccaccttggcytcccaaagtgctgggattacgggcatgagccaccccgtgcccagccaagcacatctatttctaagcagattgcaattcttgttagtcagcgcagggcctayggatagagactaagctttaaagatgggtgagcctccccttacaggtagttcaagaaacccttcctgatgtctgaggataccaggcactgggttagtatgtaggggcctgagagtgggcagggactccaagatgaagtgtcctagccaggcttggtggttgctcacctgtagtctcagccactcaggaggctgaggcaggaggatggcttgagcttggactcctgggagtccaagaccaacctgggcaatgtaacaagatctcatcccaaraaaagaaggagaaatttcctagggaaactcactatctaggcttctaggaatcccagaatcaggtgtgaccatccacrtggttagcaataagtttcctatggraacttcccacccaattcagtgcttgcagaataagaaagggctagcaaaaacatttaatatcttgtatttaaggtgagtcatagtccagacaggacaggcccaatgagatgtggaaaaaatgtgtttccaaggctatgttaacatcactagggagtttcgtctcgggaargcactctctataaagtcagttcttccaggtcctcaaaccaattcaaaacctagcctgctgattcaacttgtgtggacctcagccagtctggtattaggatgatagtgtaggtattccarcttcctaggggagctctgctgaatacgttagctcatccctgggcaatgttgttggcacagccccatgttacctcatctatcacatggttaccagagcgagctcaccatcttgcacacctgaacatggtttcaagtccttcatggatttgcttcatggcagtagcagggtcccttcaagaatgacaccagaccacatgtaccagaaccaccatgggcaagaaccacaccctggagtcagactctttgtcagtaccccacttttttttaatgctagacccatacaaggaaggggacaagaataagaaaacatcatcaagggccaggtgcggtggctcacgcctataatcccagcaccctgggagcccgaagcgggcagatcacctgaggtcaggagttcgagatcagcctgatcaacatggtgaaactccatcactgctaaaattacaaaaattagccaggtgtgatggtgtgtgcctgtagtatcagctactctggaggctgaggcaggagaactgcttgaacctgggaggcaggggctgcagtgagccgagattgtaccactgcactccagcctgggcgacagagtaagacttcatttcaaaaaaaaaaaaaaagatagaaaagaaagcatcatcaaataagagatttgtttgcaagcaaccaacacattgcaagaagcaactttctgtgcatgttctgtggtcaattcaaaattacagtgataattgtgagatatcacaagattgacagtcatcgtagtgagatatttgagtactatgtccacttgagaaaaacagacttcatgctccctacgaagattctcagcatcaaagattggacccaaaacgaggtgtcttattaatccagaggtaactagcaatcagccaggaactcarctcacaagacctgggcacgcggtcaccagggcagcattgtattgaatggtctgctcttagatggactggccctgcaaatacgtgcctggaagctaagcaaggccgtgctattcacttatctgctttacctggggtggggtggggacaggccaggtggtcagcagtgagctgatggaacyccctctggagaaactagtgagagggagtgccaaatctgtcttccttccacccaaaggaccccacatagccttcccagggctaaaatgtcagctagacagtgcttgccttggcacttctggtctccccactggggttcagtgcctcctcatggcccaggtgatacctgaaattcagcaaatttaaacccaagtccaccctttccccttcttcaatccagcaccttcctcagacygacacccctgcttctgttcatggtgcggcagcctcctggaacctttgaggctcacagcctttaartcatgcctctctttcctacatccagtcagttactgggtagtgttagttcttcctgaataatcccccaagtcttccccttttctctrtcttctcattgctgcgaccttgagttagagccttaatccccgccrtgtcccatcctgatgcggagacctccaaaatcatcttgggaaatgccactygaatcatgacactcccactttcagagacacattggagggtgaggccccacctcatctgmtttctgctgtgccctrcaccacacacgaatcctcttcccgagctggcccrcatgctcactattcaaggcaggccagcgttttcctgcctctcctcaggcaggtccctgtctttcaccttccttgatgaaagtctaatttctgaaatgaaaagcaacagctcatacttactgaatgtttacccsatgccaggtactgtgctaatggctgtatcttgtttgatccttttgatggtctaatgactgggatactatcmttccatttcacagatgaataaagcaggggaagtgaaataacttgtgcaatgttgcataactcaggagtggtagagcagaattcctgattccaagtccacgctccaaagtcactatagtctattacctcccagcattttgttcttactcttaatgcgctaagcctccccaacaccaccccaacagattatatttagagaagaggaagcagttcttacacacttttgccctaaacagtgtttggcagggtcccattattataaactattggttcttcattcacactaaagtggaaatgactaacagtagcttccataactagatgaatttgccttaaactaaaagcctgagattaaatctggcctatgctgcttaagctgttgtactttcttctcctcccctgctgtcctcagccagtacccctgagaccgtgtgctagattcccataccagggttcagctgctacatcatcccgcctctggaagttccctaaatgacttgccttggcagatggctctgctctttaattagccatacagttactgcttccccttatttaatatcaggaagcttccacttgtttcatcmccttccccatcttggccatagtgccttcctactattcttttcccgttttgtacttttgtgtgctcctgttccctttaatgtgttatcagaatctcatctcaatctagggatttttgccaagttgtctgaactctctatctccatatgtggtatctgaggtccttcttaaaccctgattttccccttatttggtattaatgcacacactattttcaggacscagcatcaagagtcaaggtgagtgttgtttgcaaatctatcataactcggagaagtccccatactcaaatgtcttagccatgttagcatgtactcagyaagaggccatgaacagtggctcatgcctgtaaccccagcactttgagaggccgaggagggaggatcacttgaagccaagggttcgagaccagcctgggcaacaaagcaagaccctgtctctacaaaaaaaaaaaaaaaattcttttttaattagccgggcatggttgcacttgcctgtagtcctagctccttgggaggctgaggcagaaggayccatgagactaggagtttggagtctgcagtgagctatgatcgtagcaccattgcactcctgcctgagtgacagagcaagactctgtctataaaaacttttgaaaagccaggyrcagtggcttatgcctttaatcctagctctttgggaggctgaggcaggtggatcacctgaggtcaggagttcgagaccagcctggccaacatggtgaaaccccatctctactaaaaatacaaaaatcagccgggcatggtgatggctgcctgtaatcccagctactcaggaggatgaggcaggagaatcrcttgaacccacagggcagaggttgcagtgagccgagattgcacaacttcactcctgcctgagcgaaagagcgaaactctgtctcaaaaaaaaaaaaaaaaacttaaataaaaataaaataaatgttcagtgagaaccataatgtgaatagtataacccagcatgattttggtgtgaggataattgataatcattttcttccagcagacctacccatctcggtgggatttgcttcaagtgatgtatattcaaattaatttgcatctcctggtcatatactaattggttggtgagtggttagtagccaagaaacactgcttatggcaagagaaagtcaagtgaaagattaaagaaaatcatgattaataatctgccagctgataaataagatagttataacaccactttggtgaggtgtacgcttttggccatgtgtacactggtgcattttcaagacagtggctatcttttcacttctgtttggctaatcatgttatgttgttctgaagttactgctgccctatacccacttcacacagcctgagctctgtctccttccaatgaacatgaagatcttttgattccgtagttcctggttctgttctgattccgacaggatgctggcatcctcaattaggccagctaaggaargcattagaaaacagtgatgcactacactctgtggaacttaccgaaaccaacaggattttagagaagaaataagggggagcctgaagctgtcaggccgcaaaaaatgtcaaagagaaatgaaacttcagtcttagaatgtcaaataaagtgtgataagaaataagaggagggaagatattccaagtaggtaagggcatcagcataagcaaaggtgctggaaggggtaatgaacatgtaatggtgggtgagcaggactgctgggagcagacagtgagtttgggtagaaatgacatagaagagtgaattggtaaaaatggaagagatgatgggcaaatgagaaagcaacgaagcaaaaaatatatagtacaatatgatattggaggacagaaatgattattgggggtaatttgacttttgaccatttcccaggcttaattcaagtatatttagctttcaaacatgacttctcctaatatcttctacacagctctttcagatgaaaaaaaaattggctaactgggtaaagggtgatacctttataagctctatttttttaatccctgaggaagtgaaccatgttatgagtcacatacatygtgtttaggtaggtgaggaaatgcattgaactgatttgcagagaatgagagctccagacccagacagtgagacttcagaacttcataratgtcaaagcatctttgacatctatgtcccagctctaggacacattcatgataggttcacttacttccaaacccaaagaggatattcttagacacttcctagtttcttcatcttgtaaaagtggttaagtggcttgtccaaggtcttttggctataaattgtagacaaggattcagagccaagtgttctgtccccaagaatgcttttgtctcttttttttaaatagtaacatcatgaggacatctcaggtcatggctggsgagtgctttgtgctctgtaagggactaggaaattgttcacawacttcttcaatattgttcctgctgtgctttttataggataacacattttaactctgtcctcactaccaagactttatataaaatcagctggaatgaattgctggtcaaattcaaaattaatttcatgtcaaagtcttttcctcatgatatttgtgtgttttgtgagaactgcctttcttaaattcttctgaaccaactcataatactccaaatttaaatccatccatctataaaactaccttttctgtatcagtagtactttttcagaacatacctatttctagattataatcaaatattcttaaaataatctggtagtctgtgagtcctttgtctagaacttaattaaaagtggcaaaggaggccgggygctgttgctcactcctgtaatcccagtactttgggaggccgaggcaggtggatcacgaggtcaggagatcgagaccatcctgggtaacacggtcaccccgtctctactaaaaatacaaaaagttagccgggagtggtggtggatgcctgtagtcccagctacttgggaggctgaggcaggagaatggcrtgagcccaggatgtggagcttgcagtgagccgagatggcaccactgcactccacamtgggcracagagcaagactccgtctcaaaaaaaaaaaggggggcrgaggggggcaaaggagaagccagkcatggtgrcttacacctataatcccagcactttgagaggccgaggcaggcaggttgcctgagctcaggagttcaagaccagcctggccaacatggcaagaccccatatctaaaaaaatacaaaatttagccaggcgtggtggcacacacctgcagtcctagctatttgggaagctgaggtgggaggattgtttgggcccaggagattgaggctgcagtgagccatgttcgcaccactgtgctccagcctgagtgacagagaagacccagtctctaaaaagaaaaaatgtagcaaaggaggagtatgcagacttaggtggagattctgcaggagacttctaagtacttttaaggtgatatgattcattaaattgaattttaatttactttatttttaatgtttattttttatttgcataaacttatggagtacaaatrtaattttgttccaaggatgtatttcatagtagtgaatttttgttttcttccaaggttagaactttcttcttccttgctataacttccttcaggatctggctatctttcttcattttttctttcttctccttctccttcacctcctctgtattagactgttcttatgctgctaataaatacatacccgagactgagtaacttataagaaaaagatggttaatggactcacagctccatgaggctggggaggcctcacaatcatggtggaaggcgaaggaggagcaaagtcacatcttacatggcagcaggcaggacagcatgtgcaggggaactgccctttatgaaaccatcagatctcatgagacttagtcgctattacgagaacagcacaggaaaaacctgtccccatgattcaattaccttccaccgcgtaccccccaacccatgacacatgggaattatgggagctacartttgagatttgggtggggacacagtcaaaccatatcatcctctctcccttctttcccttcaaggaatgttcaaaaagaagagaccctctaaggaatgatcaaaaggaagagacactctaaagttactgagcgagagttataaaaaatagggaaggcaagaaaatgaatttrgagggttgagaaggatctaaagagattgaatgagaattaattgagtgtgtaaggtaaaaggaaagtggggtagcctggtttgggtacagtcatctggatagaaaaatgtaggtagtccaccttgggtggacatctctttacatcaggcagcactgcagatgacttggttgctttctggagttgccgagggtgggtacaaggcagagggaggcagcgcacagtcatttattctatgaacaggatgtttgctagacagatgtttgagcagtctggagctcttaatggaacaagggcaaggataaataaataattggacctatcctgatgtttgtccctatacatttaagaattctgtgacctgttttaaacggaatccaaacactgagtatgagttagatgataatgttgttattacccttgacctggccttgaggactgattttgagctttctgtatgagaaaattagctcagagtgacctaaaaatttctttattcttaaaaacagaaataaattctcgatctgccttgcccttcttggaagaaaggtagagtggaaagagttagaagttatttggtacagagtcattgagtasagtgctctcctgaggtagaacagaactgtcagggattgaattgcaggacagacctgcaattcaagatgattgttggcagtgaaattgctgatcaatggaatgtgtgggatgatagttcttgagagtcggggaggagagtgcagcattgttggggctggcattgtatccaccgaaaacattttcagcatctcttctcttctatacaagacttgtcctcttggtgtccctgtgggtcaccattaagtcgcttgcttattctttctcaccatgtatcttcatttacctttctctaaaacttctgtaatttgcttttatcaagagattttggtcgcgtgcagtggctcacacctgtaatcccagcactttgggagactgaggtgggcagatcacctgaggtcaggggttcaagaccagcctggccaacatggtgaaaccccatctctactaaaaatacaaaaattagccaggcatggtggcgagcacctgtaattccagctacttgggaggctgaggcaggaggatcgcttgaacccacgaggcagaggttgcagtgagccgagatcacaccattgcaccctgggcaacaagygcaaaactccatctaaaaaaaaaaaaaaggagtttttccattccctctgcatattctgggggaatttccagaccaggtaagtggtaaagaaccaatcagagcttagtaaataggtatcctactgggtatcagctctgaagaaagtactggaaagaatgttgaatccctacagattcttccaacacaggaagtcacgtggaggccaacccgcctccatgtactctaagaggtctgtttggtcccttgaatattacactaataatttattgatgtgactttcctttgcaagagactgcatctcaaaaccaaaaggccgttctgtagccttatttcttagcactttccagtttacgtattgtttgttaaacttttcattgtgttagtaaacccagcatttgttcaaggatatttgaaatagtcaaaggtttttgtaaatgttgtgcagcaaactggtcctaacagcccctcctctgcccttccactacatcaccccagcaggagtcagtggatattatagatttttgtggtatggaagtcttgtagaattctagaaatagcctggtggcaggattgacaaaatcatttacattcttagaataatccaaatgttgactcagcctgtttacctaaggtattccaagcaytgggagagagaaataggaacccatgatatgatttgtcctaatattgaatcccctgacgatggctgtcattcaaagtattcctgggttcaggtatttttaaagaattcatggctgggcactgttgctaacacccataatcccagtactttgggaggctgaagtaagaggattacktgagcccacgagtttgagaccagcctrgtcaacatagcaagactctgtctctacaaaaataaaaataaaaaaagaattcttacttgtcctagagtgttctgcttcttggaatagtaagatgattggggggraacagatatattagatctgccctctatttagtgcttcaaytttagtacaattaatttctaaattatgccatagttattggtgcaaagatagacacatagaccagtggaaaagaacagagagtccagaaatagacgcacacatatacagtgggtcttacagatttccacaaaggcattattatgattcattaggaaaaagatggtcttttcaacaaatggtgctgaagcaattggatgtccttttaggggaggaaaaatgaaacttgacctctgcctcatagcacacacaaaaattaattcaagatggagcaaaaacttaaatgtgaaaagtaaaaccataaagcttgtagaagaaaacaggagatcttcatagccttgggctaggcaaaaattttcttaaacaggacacgaaaagcactaaccacagaaaagaaaacttgataaattggactatactaaaactaagaacatctgttttaaaatcccatgggaaaaatccatagcatgtcttcaagatctctggcagaaaatcaggctggaacttgcccattagcactccagaatctgccccctgcccaagaccgatgaccctgctacctgtattggcaatagggagatggacacaggttaaagtaagtaggttttggcagggctgaggccctcagatcctcacaataaaattgtcttgcattccttgtgtggtttggatatgagagaagcagctttgttcccgagctccccctcaaatctctgaaaactggtatgctcttctcagaacaatcctttgagatcccctgagctttgaagtcctcctgccaagtctgtgtgtgggaaggagaacagagcagcatgagggccatcagagaggtgggcgaaggcagttcaaagcccagccagatccggctctgtggtgtccaaacccttggggtcccatagccctagaggaagcccgggatagggtgaggcccagccctttgcagggttctgtattgctgcatccagactaggaaatgtctgagacagagccagaaacgtaaatactgcaccactgtgctcaccacattcatgtttgcagcagaagagccaagccccctggccaggatatatgcttcctattcagacctatggtttggagggaaggaagcatgaaatgtatttagagctttccaaacttttgattgttttgcacattcctacaaaaataaaaatatcccatgagattaaaaaaaatcagcttctaatgctttagatgagtgggaaaatcttgcacactggggtcatttcctttctgtttcaagaaattaatattgtgctggaaatagcctgttgcagaaggggagactttatgtcctttgaatgctgattatgccagaaaactttccagtcctaaaggggaggttgtccctttcccaggactctgatgcaagatgaccctgcagtttgtactttgctaggataggagacccaagtcagcagagatttaaaattcagaagggatcattaatttattcattcaagaaaccatgctaagcatggaataagagccaggttaggttctggagtctcacactgccccacatgaggatcccagrctgccagctccatgaccctcctctgcggacggtcccaagtctttctgaaggcccctggtgattgaaccctggcattcagaattagcagaagtgacayactaattaccagtaactaaaaagttggtgttcacatctctattgcagatgccgggaagccaggccgtcaggggacaggcgcagtcagcaagcacccgctctctcggtatctgttggcttccacagttttgtgtttcagagccaaaccagaaatcacccagggggttacttgcatsagctctggaaaatgtgtaaaggattgaagtcctgagactttcccataatgtcttatttaggcatcagtctccctcagttgattagagcaggaatcagcaaatttctttataaaaggccagtgacagtgactattttagccatacagtctcagccacaactgctctagcagccagagaccacaggaaacaaataagtgtggctgtgttccaacagaactttattttatggacatttcctttacaattttcacacgtcatgaaatatccatcttttaattttttttcaaccatttgaaactgcaggccgggcatagtggctcacgcctgtaatcccaacactttgggaggccaagktggggggatcgcttgagctcaggggttcgagaccagcctggccaacgtggcaaaatgctgtttctactgaaaacacaaaaattagctgggcatgcacttgtagtcctagctacttgggagactgagtcatgggaattgcttgagcttgaacccgggaggcggaggttgccgtgagccaagatcatgccactgcactccagcctgagcaacagagtaaggttctgtctcaaaaaaataaaatttttcttaatttaaaaaaacaaaaatccaaacaccattcttagctcataagccatgcaaaaacagatggcaggccagatttggcccacaggccatagttagctaacccaggaccagagagtcataccactttcatagcaaaaaggatacacatggtttgtgttgactctgagtagggaacttctccagagggtgccatgatacagaaggtggggggtgtgttccctaattgggggaatggagaagcatcaytctggcctctctcagtggccccatacctgctgactctatttaggccgtggcttgagggtgccccccacttgccaatgcctcctgccagggacctggacactgagaacgctgggaaagggccctctccttggggaccctggtcacacccaatagatcagtcactcttcttccttcttaccagctgcctctcctgascacactggaagaaggacccctgtaccaccttcctcgacacccgggcctcttctgttcaaaggtskctcctggccaggcatggtggctcacacctgtaatcccagcagttggggaggctgaggcaggagaattacttgaagccaggaattcgggaccagcctgggcaacatagcaagaccccgtctctacaaaaataaaaaataaaaattaactgacatggtggtgcacgcctatagtcccagctactcgggaggctggggtgggaggatcgctggagaccaggagtttgaggctgcagtgagctatgatcaagycactgcgctccagcctgggtggcagaatgagattctgtatcaaaaaaataataataaaattaaattaaaaataaagatgtcccttccaatcccctgacgcacacagcactccacatgtttcttttcttccctgcctcatcacccttttcaaccttagatcctaagcttcttgaagcagagacttccatcttgtctgggtgcttagcacattttcaaatattctcttagattttttttcttcattacccatggagcggttgcttgttgcctttccaacccaaaatagaaatagtggtaaacaaaagaagaaaaacattgaacattttggaactaaaattttattactactggaaaagtcccagataataaaaaaacagctggtaaattagcactcatttaagcatggtctggggaagaagaaaattttaataacacatttttcttcctaattgtttttgtttgtttagatttatgcattcccaaagtggaccttaaaatcatgttggtggcaggaggaagccagtgtggtctttgaaatttgcttcagataatccatcaaggggatggcctcataaacaaaattattattttctccctaagatgctgactcatgtgaaggactgtttaaaagatgactttggctttgtgccctctcctgcaggtccttccatagtgacgccccccaaggacatctggaatgtcactggtgcccaggtgtacttgagctgtgaggtcatcggaatcccracacctgtcctcatctggaacaaggtcwgtggcacagactttaagagacatcctaggctgacaagcttctcttgcactgcacamggatggtaaaangttaaatcctcagcctgctttgttgactgcggctcccgcaaggtgaagccttagggcagtcatacaggcccctcccctggattcatggaacaaaaaccagtccctgccatgcttttgttagcagcatcctagaawctgagaaactggaagaacaataatgctgaacacctgaacccaccttcagggtgtgtgtgcacctgtggtgtgtgtatgtgtgtgcatatgtgggtgcgagtgaaagtgtgtgtgtctgtgtttgcgccctcagtggagacagtatagcataggggttaaaagcgtacgtttctctctttctgtcccaaaataccacctccaagcccccaccaagctgtttgtgatggcatcagtctcctcatttaagactgaacatttagctgataatttagatcctgtctgcttggaggcattattattattttactgggaggctcggctaagaaggtaaaaggacacaaagccctgtagccttctcctgggagcatggattattttttcagattccctaagtgctgggagatggatgagtacattttaagggcacttggaagtaggatagaaggagtgaggtgggatctattctcctaagtaccaaggctgtagaaccataagttagggacagaggagaccactccagaacagagcattaaaaaggaacaagaggaggaatagcaaagaaaaaaatgtctcctttctgaattttgctaaatgctggccccagccccaagtggaaaaagcatgatattcttttaataaatcagctttgaaatgacttcccaaatggaaaaaaagaaaaaaaaagtgtgargctgggtgcagtagcacatgcctgtaatcccagcactttgggaggctgaggcaggaggatcacttgagtcctggagtttgagaccagcctgaccaacacagtgagacttccttcttacaaataatttttttaattagctgggcatggtgaggcatgcctgtggccccagctactcaggagactaaggtggaagaaccccttgagccaggagattgaggctgcagtgagctgtgattgccycactgcactctagcctgtctcaaaaaaaaaaaaaaaaaaagartgtgaattccttagccagggtggctgagttctctgcaagtcagggtttctcagcctcagcactattgacatttggggccagataattatttgttgtgcgggctgcctgtgctttggaagatgtttagcagtatccccagcctctacccactatataacagtagcattcccccatcccccctgtcgtgagaattaaaagcatcttcagacattgccaaatgtcccctaagggtgtggagctggggaattgccctggactgaaaaccactgctgttagcctcaactctgttctctaccttataaaagtagcatgtaattatcataaagatgaaataaagtaatgcaagtaaaaatyacttgatacatagttagcactcagtagacattagctactgttcctggaaatttttcccttcaagtggcattatcttgtataattatcttcatatttgaaggacaacatcatctcagcatgtatggagaagggaaaagaaaacacttatttgccatcaactaacacctcacaattataccatacacttacgtttttgtctttttttttttttgagacatagtttcactcttattgcccaggctggagtgcaatggcaccatctcggctcaccgcaacctcgcctcccgggttcaagtgattcttctgcctcagtctctcaagtagttgggattacaggcacccgccaccacgcctggctaactttgtattttcagtagagacagggtttctccatgttggtcaggctggtctcgaactcccgacctcaggtgatacgcccaccttgccctcccaaagtgctaggattacaggtgtgagccaccgcgcctggtcgtttttgtcctttttatacattttgaattgctgagcctcacaactatcctacgaaaaataaaaattaaaaaattatcaaactcatgctaccaaaaaaggaacttagtttaagtaaaagggcataaccagacatccattttaagctgccttacttctccagcaagctctaaggtggatgatagtctcccttgactattttgtttgctctctgtgtgaccggagaagcaacttctagaactccaggaggactgtggctcccgcagtcggagctctttctgttgcaagttytaccagcccatttgaaaccagcctaggcaaaacaaaaagcggggcgggatccagcctcaagggcccctgcatccaggtacacacgccatcagaactctaactcttgactctttgctctcaatatactagtctcattttcttctgcttcagaaagcttcctatgcagtgggagatatcaactccactcacatttttattacagcttaaagaccccagaggaaagaaagggcttcccttctccctgctgcattgtgaaaatcccacgaagggctcaarcccaggtcgggtcacctgctaagctctggctcccccatgcggccggagggatgcggccactgacattggcaccggcgtgaatccgcctggtttgtgtaaaatctgggaacaggtaccagaaaatgcctgaggtgggggtgatggcagaggcaacactactataccatcctttacagtgaagcttctcttaaaggagcaataaaatttcaccccgatcagttatgtttttaagaggaaggcggagcaagagtaagagcagaaatgcagtccgtggatgggttcccctccatccttactgcaagaactgcaggcgttcctcactgctaatttggagattgctggtttgctcagggtgtggggaggtggagaaataatgttccgaggaatacccatgaaaagctccgttgcagttctctacagttttctagggatacttacmcaatgagaagcgagggtcacccaagcgtcctggggcatgtgaccttattggcaaatcttggcaaagaataatttcttcagtccttgctctacccaatcccagctacagtattcacataccagaggaatacgtctgcctcgggaatcttttcccttttaggactgtacagggcagatcccaatagacaaggcctccctgagkgcttgtcctcagggctagtcagaaacaccaaggcagttgaggctggtgtggtggctcgcacctgtagtccctagccactcgggaggctgaggtgggaggatcgcttgagctcaaaaggtggggctgcagtgagctatgatggcaccactgcactccagcctgggcaacagagcaagatcctgtctctgaaaaaaaaaaaccaaaaaacccactatgtcagtcaacgagatgggtgctgaagtaaagaagtgaagaggaagtaggaragaaacaattttttctgcagactttccagaacaagcaaaacccaactgtgatgctctgccggttttcctctaccttcataatgtaatttgccacatgcatgacccaaagcaatgtttcttacactgcagaccatgacccatcagtgactcctggaactaatgtagcgatcacaaccaccatgttcttataaaaaataaaaaatagaacagaacytatgttaaggcatcacacttaccacttatgaaggtgtcatttcctaaaacttttgtatattccagatatacgatagtttggtccatgtcaaaactaaggaaacttgggaagtcactgacctaaataattaaacagggtatttgttttctcatcgctgtccttgtaaccagactgttaagaatacaaacatatttactatcatgtgtgtttcaaatccaatttaagagtagaacacctttttggatagattattagaatcctcacttgtaaaacaagagaaactgaggctcaaataaagacagcatgtccttcttgctcaaggwttcttagcaacagcagaattaatggtacaagccttttctccatgacacttgagactacggtggcaattcttacggttggcacagcctggcgagtggtctttactttccttactggtagtaaggaaagctggctttaacaagccccatacctttcagcaaactcctagcctagaaagattcgaarggcaatattttgaaatgggaacgtgaactgaaatagccatatttgacttaacccttttaaatcaaagatgatgctcacagcgaaagcaaaacaccttcccaatatttgtttctgagacggagaggctctctgtttaattcttttcttgcctgaatatttcttcagattagggcttccttgacctctaagaatattttttaatcaaaaatagtgacctctaaggtaatagtaataagcagaaattatccaaagacstataaagaaagagttgagaatctccccccacctcctcctcctgcctgaggtaaccaatgtgaactgccctggtttgtatctttccacactctttttcatatccaagcatattcaaacatatatccctacggtgaaatgagaatatagtgtgccagtaaattattctgaaactcgcttttctcaacaaatacttcatggacatcygtccaagtctgcttctcaacagctaygtaatattccaagtatgaatactgtaatttattaaatcagttctgtattttttctgttgtttccaaatttttgttaacttaaaaaacctactttaagcatcaaagtacacatatcatacatactagtgattgtattgctataagatagattccccaacagttacctaagtcaaaatatttgtttcagtgttaacagacattgtcagattactttctaaatagattgtagtaattcacactcccaccagaaatggagaagtgccatttctctgcatctttactagsactgaatattaacctctcttttttagttttaattccaattttaactagaaaacacatatttattggccaggcacagtggctcatgcctgtaatcccagcactttgggargccaaggcaagtggatcacttaaggtcaggagttcgagaccaccctggccaatatggcaaaaccccgtctctactaaaactataaaaattagccaggcgtggtggcacatgcctgtaatcccagctactcgggaagctgaggcaggagaatcactggaatcccggaggcggaggcagaggttgcagtgagctgagatcgcaccactgcactccaccctgggtgacagagcgagactctgtctcaaaaaaaaaagaaaacacatacttaacaacacttagaatccccttacaygaataagggagagtttgacatataaaaatttgtcatatgaaaattcttggcacttttttctatgttttctacatgatgtataaccttttataattacgtaacattaattaaaatacgccatgccaacacttgtgaaaagaagggaaaaataaagtatatctatattgtgatttmtgttaaatattatatttaacaagatacatttccctttccatagtggatcaggttaattagcataaaatgctgttactaagagctatgggatttgaggcttagttgctgagattcagtatttcagtgctgcagtgtttattttcttgctttggtcacacataaaactcatatgattctgaaattcagtaaataaaggtcagagtcatattacttgagaccttggatcaaattaatacttctaccaaaatattcttacaacccatttttaagtaactatttcaaaagctgtattagcataaaccgtttctgccagctacttgggaaactaagggaaaaggtacctattgagtatgtttgtcttcacagcatttatgagaaagacattaagttacgtggttttctctcactaatagtggcaatgtgggaaaattccagaaaaaaaatgcaaaaagccaggctttccaaatcatgcaagatattttttctagagcaggaattggcctagatcacatgtggtttgctgaatcccagtcctggcatcataaagctgagaaaatacagtgtaggtttgaagccgacacaacagcagagtaccaaaaaacacatggtaggagtgggatccacatgggaaaagcaacactgagatggaagttaataaagtgtatatatttatttatatatttattatatttatacatacggtgtctatatatacacactattatctggtctttattaagatttgctttattatagaagaaaatgaaaaggaaactagctatttgaggttgtaaatcctttctaattacaaaggtaatatcaataaatgtcaggttggctcttaaaggagatctgggatggaatgaacaaacaattcgtatatccttttttttttaaaactcaccattatcacaaggcttaaaatatttgtactctgtaactcagctgctaaatgtatatgtatcraggagctacaagtgaatttcattcttttgtatattttccagagtttatataataaaacattttgccttttaaaatgagggcaaaaaggatactattcagtattggccttgcaccaaagaaactgagtttcttctgaatcttgacatgacatacacagaaacagtcagcaagttttgtcataaaagaacaatgacagcacatgtatttgacagctgtttttttttttttttttttttgagatggagtctcactctgttgcccaggctgcagtgcagtggcgcgatctcagctcactgcaacctccgcctccaggttcaagcaattctcccaccttagcctccagagtagctgggactacrggtgctcgccaacacaatcggctaatttttgtgtttttactagagacagggttttgtcatgttggtcagtctggtctcgaactcctttgataggtgttttttatcttaggtgttcagtaaatcatttgattaattcttagccctcagaataaagtaatggtattggctttggtctcagcctattttccattgatgaagctgttgcaggaagagccccaaggtcccaagcatcaaacctagtgctgggtgacagttcatcagttgaacatggcatgacaggcaaaaggcctggaactgagaagcagaatttccaagagcatgagtgaatgaatgatggtgaccagtggcaggaaattatgaccatgtatattccccaggcatgcagaaaaatacattagtttaaaacatgtacgcttagcaggaaactggcaggaagaaataaaagaggatctatattttaaaagtatttaggaaagggaaatagttcagtraaatgctgggtttactctgttagaaagtctgacatacactatgtgcaattgtagggatgtggccacttccaagtagatgatctggtgtacaaaactcagtattactctccttttgtttttgcaggtaaaaaggggtcactatggagttcaaaggacagaactcctgcctggtgaccgggacaacctggccattcagacccggggtggcccagaaaagcatgaagtaactggctgggtgctggtgagtaccagtaccaagagctggcaagagtttcattcttagcattagacataagcagacctggcaaaggtgcctgatgtaccgccagcctaaaggtgcttgctcttccacatctgtttggaatagccttaccatggagtcgctgctcctctttcagagaaactaaaggaaaagtgctttattgcatgttttgaaaacaaccaatgaattaacaagaactagtattttcctaagagttcaaagcaaaatcctcacacggagctgcgtggcccaagcattgttttaactgattatcgattaataaataccttattttacttgaccctggatattcatggagaatactttgatcatatacccttatcaaggttgcccttaaaccgataatgtgtacctatccagtttttaacctatgcagtatgatcaaaagttgtccatgacatttcctcatatgaatcctcagcaaaccaaatatggtagttatcgaagtctcctatcacaggacttgcactgcttctagcagtacctttgctatgaatcccctggtcatcttaggaaatttatgaaataatgacctcactggaaccactgacaaaagagaagaccaccacagaggaatactagatcttttnyctttcacaggtatctcctctaagtaaggaagatgytggagaatatgagtgccatgcatccaattcccaaggacaggcttcagcatcagcaaaaattacagtggttgatgccttacatgaaataccagtgaaaaaaggtacacaataaatctcacagccatttaaaaatgactagtacatttgctttaaaaagaacagaactaagtatgaaagtatcagacgtagctattgatgaaattctgtagttagcaacccataagggcattaagtatgccattaaaatgtacagcatgagactccaaaagattatctggatgggtgactgaacatcgttattatgacttagatgcttttaccttatctaacatgtaagagtcaaaatcaaacttgcctggaatggcttctatttcccatagctttctacctatctacttggcattttccctttgtgttgtgactattaaattcctatttaaaagaaaatgattgtgggcaattctcgcccttcacttttgcttttaaaagaaaaggccacaaaggagagtatattggcaaatacccagttctgttctgcctccccttccttcactgccaaaaagcttcctctgaagaacccatcctgtgtcatagcagtgctactttacatttatatagttctatgaaactgatgtctgaattggctttcccttagacaaaagaacaaaatttaccgtcaccatgtgtcaaaccattccactgtgcagatcactcagctgtgatatgaaaagaaatattaagtaaagaagtatttggtcagattctcttcagccataatgtgtaatgtcaggcaatgaaacagaacagtagctaagagtcaarccatgcrtttgagtctcagctctgctactaattattcctccactttaccttttgaaggagatccggactacaaaggaaaggtctttaacctctctgaatctcattgtgaaatgtgctcttccagttctataataagatgtacctttgatgcatcaaccaatacagcaaaattgcctttcatagctaaaatcatgtaacttgagttccacagagcactccagcatatcatttatacaattactcatatatcctttatccccatattttaacatcttcatttatttggaaacactcaactacmtgccaattcaaaagtcaaccacatccccatatgtaactaatttttatctttttttttttttaaacaggtgaaggtgccgagctataaacctccagaatattattagtctgcatggttaaaagtagtcatggataactacattacctgttcttgcctaataagtttcttttaatccaatccactaacactttagttatattcactggttttacacagagaaatacaaaataaagatcacacatcaagactatctacaaaaatttattatatatttacagaagaaaagcatgcatatcattaaacaaataaaatactttttatcacaacacagtacatatttgtcatttttaaaaagccacacaatagaaacaagacaccaagatatttaattatcttgttgactcctgtaaaatagctaaacactcatcattcgcggtgcaatactcatagacataagttyctgaaacaatagtttgcatgcgtaaggcattcgcaccaaagaaatctgaaaagaaaaaacaaatggtaattagcagaattgtattgaagtgaccccacttctctaccccagaaaaagacaaagatctggtactgtagataatgaataaatgagtggagctgagaacacacattctgctacctcagcttatggtggttctttctcctagtaggctttggtattttacccattctgccagacataatttatattcacccacctcaactaaaaggttttcaaaaactcattgtttaaaatcccttgtacaaagtcttattatttccaaaagatgaatagcttagagaaattaccacactaaaacctaaactggtttttagaaaaatcaaattatcttttccttatttagaactaggaatctcacagaagcatgctatcaaaattgtgaaaatgccaatctgttctgccacactaattctgcctggataatcagaccaacacagtttcctctaaacaaatatcaactgccagtaaagtctatacacacctgggttttattgcggcagcccctgcattcatatgtatgggtcctggtgttggcaatcgccattattccacaaagattgcaaacatgaacctgatatggatctgatgcctcaaacaatctttcccttaaaaactgggctgctccatgggcaatctgacaatctcgttccatttctccaaaacgcaggccaccatcactgttaagagaaaaaaattattactttgtacttattttttattataaacaccgccttgaataatggcaaaggtggagaataatatttgcaaagacggataactaggctctaatttttataccctagcattctctctattggtggggagaggagaagtctaccaactatttgacgtgcattagaaagtccccaaatgggctaagcaaagtggctcacccctgtaatcccagcactttgggaagtggactgggtggatctcttgagctcaggagcctgggcaacatggcgagaccccatctctattttttaacaaataaaaataaaaacagaaggtccccaaatggagtggatacattagattcttaagtagagcatttaattttcctcataagacacaataaagcatagagtggaggttcatcatgctatcatttaactttctagaattcaactctatactaaaaaaatgaataatgaaaaagacaatctaaataaggcagcttgtcaatggaatgactgtcccaggcaatcaaccttgaaatcataaatacatgttggctgaagtaatggaaagaacaggtaaatgataataggtttccccaacataagaagtgaaataaatgcattattcagatggccaggcaaatagatggtgatggcttccttaacatacttaatatccaaaatatacaaaataaaaccaatgggtttataatgatattccaccaaaacaaaaaaatcattggtcgactttggaccactgatctggatcattagacaaccagctcactattttgaaaactggtaaataaaaaaagagaatcaagcatttattcctgcccttactataagaactacatcactaggtaaccaaacagttgaggaaacaaagttttagaagtagtctggctaaaaactgaagaaggactgagaaaaaatagaatggtatcagttggaaatcgccmtttaattaaggtctttagtaatagctgctaaaatcataaaaagaaaggcaaccagatactggaagtatagaataccacctataaagtattactgccaaaaaactcaaacgctaaatctcaagcctcaagatctatttacaaaaaacaaaaaacaaacaaacaaacaaaaaacagcaatgcacagcatttgggatgcaagcagcaaaattcagtctcaagccctggacaaacagtccaggttgttcaacaaacaaattacaaggggaaaaaaaaggttggaaggcaaccaataaattcaaaaaaggacttatgagacactatcaatcaattgcaaagcatggaccttatctgtatactgattaaaaccaacaaacctttaaaaaacttatgtgataatcagggaaatgtaaatctggatatttaatactaaggaggtactgtggttaggtttagtgtcctaatcttttagagcagaggttctcagagtgtggttcatggaccgcctgagagtcaaagctatttttaatagtaatactaacaacatatatttgcttctttcactgtgtttacatttgcactgatggtggaaacatgaataaaactgctgacaccttagcagaactcagggtagcagaaccaaacattactagcagtcatattctccattcaagtgaaggggagaaaagccagttttacttaaaaatgtccttaatgaagcagtgaaaataaatagttttattaaaccttaacccttgagtatacatctctttcatatcctgtgacttttaaaaaaatgaaagtcctcaaccaggcacgatgactcacacctataatcccagcactttgggaggccaaggtgagaggctggattgagcccaggagttcaagaccagccagagcaacacagtaagacccagtctctatataaaaaataaagtaaaataaaatggaacacttcataagcacttctactgcatagtgaagatgactgtcttgaacaaaagcacttgcatgattctgaactagtcccttttaacatggagtatcttttttactcaaatagccagctgacaccaactatgttaactcatcaacatgttaacacccatgatgttaattcagacttagaattaagttgacgatgttgtagatatttggcagacaaagaaatgaacaaaaagaaatgaaagcaaacgaaaaaagtaagtctttgaggaaaataattttaagtatttgttgaaaatgatgaaaattgtgagcttcaagcaaaaatcagaattttaggaaacttctatgcaccactatgggcttgatagcttcctgatatatttaaaggcttttctaatgacatcagtagtcatattaacaaatgcaatttttttattataatgaagtgtgttaacatttgaaaatctacgtaactcagcaaaccaatattttccaaatgaccaattaggatgctacaaaatatgcatgtgtaaaagatacatctgaagtacaagacaaaccaatgaacttcaaacataaatacagaaggttcattcatatggtttcagtttctacatcaaaaccaacctttgagaaactacaacttaccgttttggtgtagtatcaaaaaaatatccacaggccaggcgccttggctcatgcctgtaatcccagcactttgggaggccaaggcagacaggtggatcacttaagctcaggagtttgagaccagctgggaaacatggcaaaaccctgtctctactaaaaaatataaaaaattagctgggcttggtggtgcatgcctgtagtcccagctacttgaggctgagatgggaggatcacctgagcctggaaagtagaggctgcagtgagctgtgattgtgccaccacactccagcctaggcaacagggatgaaactgtctcaaaaaaagggaaggggtgggctgggcgtggtggctcttgcctgtaatcccagcaatttggaaggccaaggcaggcggatcacttgaggccaaccatttgagaccagcctgggcaaaatggtgaaaccctggctctacaaaaaatacaaaaattagctgggcttggtggcgcacacctgtaatcccagctacttgggaggccgaggcacgagaattgcttgaatccgggaggcggaggttgccgtgagccgagatcgcaccactgcactccagcctgggtgacagagtgagactgtctcacaaaaaaaaagccaaaatattcctctctttccaaccacttatttgcatgaaattagaacttcctcatatacttaaatataaaaaataaaatactacaatggaatgaatgcagaagtagatgtaagaatccagctgtttctattaagccaggtcattagagagattcgcaaaaatgtaaaccaatgttattcttgtcactaaattcatctggaaaatagatatatttttcattaaacatggttttttgttttgttttgttttgttatcgagacagagtctcactctgtcgcccaggctggagtgcagtggcacgatcttggctcactgcaacctccacctcctgggttcaagcaattcttccctcaggctcccgagtagctgggattacaggtgtgagccaccacgcccagccaaaacatgttatttatgttaacacgtaatgagcttattagcatttttaaaacaataaatttaaaatctcagctttaacttctaatatgataaatatcaataaatacaactcacataaaacaaaagcattttgggttcctgggatcaagacatttgagaaccattgttttaaagatatacactgaaaaatttataggagaaattatatgatgtctgggctttgcttaaaaataatcaagagggctgggtgcagtggttcacgcctgtaattccaacactttggaaggctgaggctagaggattgtggccatgagttcaagtccagcctgggcaacatagtgagacccccgtctctacaaaattttttgttttttgttttgagatgaagtctcactctgtcacccaggctggagcacaggggtgtgatctcggctcactgcaacctccgcctcccaggttcaagtgattctcatgcctcagcctcccgagtagctgggattacaggtgtgtgccaccatgcccgactaattttttgtatttttagtagagacggtgttttgccatgttgaccaggctggtcttggactcctgacctcaggtgatctacccgtcttggcctcccaaagtgctgggattgcagacatgagccattgcgcctagcctctacaaaaaaaaaattttttttttaaaggtgtagtggcacatgcctgtagttaaaaaaaaggttggaggacaaccaataaattcaaaaaaggacttaagagacaatattaatttagctacttgggaggctaaggtaggattgcttgtgcccagttcaaggctgcagggagctgtgggcatgccactgcactccagcctgggtgacagagtgagactctgcctttaaaacatgatgataatatcaaaggttagaaggacagagatgaatgcaacaagactggccatcagtcgataattgttgaaatgggggtaacaggcacacaggcattcactataccactatctccattttggtgtgttgacatttttcataatataaggttaattaataataatgatgatgatacagttcttaccgagatctaccctccatgggctgtctattgaggatctgaataggtcccctagcacgagagtgaatcttatcatccaccatatgcttcaaacgctggtaataagtggggccaataaatatttgtgatgtgatttttcgaccagtgaacccattgtacaggacctgcaacaaacacagattttgaagtgtagacctaaaaattaaacaacgtcaaagaagatatgtgtatatattgtgttactccatttatataaaaattaaagcacagaactaatctataatgttagcaattaagagagtaattagcttggggtgggagtggaaaggtagcgactaaaaaaggttcagtcgctaccttcacatttttagatcttggtgttagtcatgcagctgtgtttactttgtgaaaattcatcaagctgtacatttctatatgtgcacatatgatacttcaataaaaggttacattgtttcagaataaaactacacacatacaaaaaaaaacaagtggcaaattactactataagagcaaatatacctcatttcctctgagatgatagccataatcagataaaagattagaaatcttctgcacgttaacagcatcattaaatggagtggcatcaccaatttcacccttg

SEQ ID NO: 93745 - DNA, 25450 bp, Homo sapiens
  misc_feature (1)...(25450): n = A,T,C or G
atttgctgctggacttcggggctgtgggagagctctagccaccagccctgtcctgccttgagcacctccacctggggtatctgtcccaaagcatgagtctgggagggccgggtgaccccctccccaagtgggctggcagtgggtgggtgcctgtgaggtctgtcccagcctctccctgcctggcctcctgtgggatgagcgttggagggccaggtgggcctagccacaggcagggcagttaagggacaggagcgggtgctttcctccttgttttgtctggcccaggtggcctccccctcccccgctcatccatgcagacggctggggtgccggggcctggggtaggggtgcaagcaggcagctgagttgcccagcagggctctgtgtgagctgtgctgagaggggaagctgggggtttgggcacaaagcgtggccccccagctgtgggaggcgggggtattcgtggtgagaagggacctgagggtacacctggctgtgtgggccgtgtggccgctgtgggagagagcatgatggcaagagtgtgtgcccttggccctgtcctggcagccctgtgtggcctcctcggctgcctcctgagaggccgtctcgtcctgtgcctggctgcggtggttctctgcctggggcccggctcctgcctccgggtccttctaggggaggaggaggaacttgagctgctggtgtcctgtgcccaggaagagtttaatatttcgagctccctcagggctgcttccatctgctgcaagcgggggccgctcatattcattagggaccactggggccgggctgagtgcagctgagcagtgggagctcggctgttgtggggagcttagccccatgcaagccccgttcaggggaggtggagagtcctgaccattggtccccactgcccccattacccctgggaaccagcagccctgcctgggcttcaaggccactgggagaaggaaagaatttgctcagatgtgaaatcttgcagcctacgaagtggggatggaggacgagggccagaggggcagcagggtgaggaaggggtcactgctggggttgctggcacccaggctcagtggaggcagccccctactctgcacagccgcaggccaactctcaactatgttaggtgggtgatggtgcctgaggctactgcctggccttgacggctcacagaggcccctgttcacagtggggggtccatgctctgctggattgtccaggcatccagtaagccaggacatgaacttggctttagagagaggccccagacaccagcaggagctgcctggagcctagagtgcaaggcccctgaggggacagcctcttttccaccctgttcctgctctagagctgcttggtgggaggggatgtgtccaccccagtttccccccagctggcactctgcccagacagcagagcaggaggggcctgagatggtagctccaggagctggtctagaggcttctggggacccagaggctttgggctcctggtcctggtcagcgtttggtccctggctggaatggggaggggaggttgacccccagggtggagggatggacgcctgcagggtccagctggagagctctgtgccccctcctggagcccccggaacggttgatggtgtgtctggcgccccacttgggtcagcctcatcctgagggctgaacctgagcccctggcatcactgtgcccatgtgggccctcagccctcgttcacgtgactctcactcccagatgaagatctccttcaacgacaaaagcctgcagaccacatttgagtacccttccgagagctccctagagcaggaggaagaggtggaccagcaggaggaggaggaggaggaggaggaggaagaggaagaggaggaagagggatccggctcagaggagaagccctttgcactcttcctgccccgggccacgtttgtgagcagcgtgagacccgagagctctcggctgccagagggtagctcaggtgagtgcccacctgggggacaggcagcctgggaggggtggagcctggtctgtgtccacgtctgcatgtgcacctccattcacaggcctgtccagctacaccccgaagcactctgtggccttcagcaagtggcaggagcaggcgctggagcaggccccgagggaggcagagcccccgcccgtggaggccatggtgagatgcgggggagtggagcgctggggggagtctgacacccgggcgagcccatgtgtccacattctgtcctctcactttcagctcacacccgccagtcagaatgacctctcggacttccgcagcgagccagccctgtatttctgagcccagcactgccaggaccaaggctgagcccagctgtgggagtcccggaagctgggcagtagccagggactactgcacccgcttctgccttgtttggcctcactgtatcccacccacccctcctggccctggaagcagctagggtgcctcctgccatcggggccaggtctgggtctcactccccggccctgatttgggagggtccaagggggaagtggggtggggaactgcctgtgggtgagtgccaggggcctgctgggtggtggccatctgcgacccggcagggggctgtgcagattytgcacctggccattccctgtcctgtctcctcagcctgcctcacagtggccatggggtgtcggggtgaagggctgtcccagctacttgtcctctgcaggaccctaagcccctgcccgcagcccacatgccctctgtgatgagtggcgtctttcctgcctctgatgatggactcaataaacagcactggacaaggctgctggtgtccccactgcgtggtccttggctgagaagggagcaggggcaggtctctgcaggaagaggccacatggggtacagtgggccccagtttgcacgtctatgccagggtgtgtgggaggtgaccccgatctggtacccccactccttgatgtcccagtggccaaggctctgacctcccaacttccatggcctgttaacctgttgcccctccaccccagcctcccagagctggcactgtgggaggtaggatgacaggcctgctgtcaggggcctagacttcaggtgggagggtgagagtgttgcagctgttgggcctgaagtggcttctctgaggggcccagagcctggggagggaccaagggaagggcagcatgagggcagcacaggggacggtgtcttctgctgggcttggcgtgccccccgacccacaggatgaggcaggccgggagcagcgcctgcctcagacggccagagctggggctgtttacagcccatggaacccaagcaccatttcctccctggaggatcaaacctaagagcaaagagataaagagatgctgtctggccaaactccggcggaaggagagtttggtgtatttccctggtcgggttaggcccagctcttttctggaccctctggatcaacacatgcctcccaaatcggcccagtcctcgggccatgcttggttgctgcagggacaaaacagaggccccagggcacatggaaggatggaagtggccagtgcttggtgtgcggccagggaaaggtgggcagcagggcctggtggcagcagtggtgtcatcaggccaagcaaaacttgcaactgaggaaccgacgggggtggggggtgtgaactccccccagtaccttgctgagagggacctgaatctgaggcagctgctggatatgnnnnnnnnnnnnnnnnnnnnnnnnnnnnnnnnnnnnnnnnnnnnnnnnnnnnnnnnnnnnnnnnnnnnnnnnnnnnnnnnnnnnnnnnnnnnnnnnnnnnnnnnnnnnnnnnnnnnnnnnnnnnnnnnnnnnnnnnnnnnnnnnnnnnnnnnnnnnnnnnnnnnnnnnnnnnnnnncctgagaggagggtgagccgtgggccagtcaggggaagaggaccggcggccctgctggggagggctcagggtggggctggcctggggagggtgggcaccctcagcggtgtccctgaggctagtggggcagtcacagggaggccactccagaccctcctccctcctctcccaagggggagcctcaggctctggctctgcaggtgtctggcagccccatgctgttgatacgggcaagcagcaggctggcacggatctttacaaagataatctttattcataatcacaggccacaggggtgagacctgaggtttgggttctgtggtgaaggagaacccctgtcctcctgtcccttgccctgggcctctgctggctgaggagggacaaggtgagggggcccccatggtgctcagacaaccagagcctccctggcagggcaggagtgtgggtgccacagagacaagccccttgcagagctgacctggagcccaccatccccatagcctgtgtgagcatgaagcgaggacccccgggtgggctgtgccctgggcttgtcactgatgccagtggaggctggcacctgcccctctyggcacctgagacagtgagggaaggtagctgctgccgtgaagaacaaagatgctctgagcacacacttgctggggctgagctgaggggcacacggaggcaggccctgcccgtggtctggtcagctgtccctgccgccgctacttttctggtctggggctgtagccttggtcaggttcccagcttccctcttgagaacgctgagcaaagtctgggagctctccaggatctggggccagagaagtgagaaggttgttaatgttcacctgttggtaaggtcctaagccccagctgtcctcacactcaggtgctgggacctggctgggggtgctgtagccaagggatcctgtgtgggggaaggcggaagcccaaggggactggcagacggggtggcagggccctcttccctccggaatctgacccaaaacacttcctctccaccctcaaagccaggctgggttagcactggcccgtgctgggtgctctgcccaagacctggctcttcacactgagcagaaataaccacatggctagcgagaaccggataaagaccaggacccaggatgccccaggccccacagacagccccacagtcactcccacagcagcctgggttcctcaatgggcctggccacgctgcccctgcccgaaatgccagcgaggcacagactgcccacagccgggagccccagccggtcctgacgccttgccgtggcaacacccctgccgtgcctatcccctgatgctcggcctggcctcccgagctccaccttgaggtaggcggcctccgtctccgcgatggtccggtcgaactcgttgcgagaggcaatcttgcgtgccaggttctcgttgacgcgggccagcttctctgtcagctgcctcacctcattctgcagccgctgcttctcgtcctcctcctcctggatctgccggcacagctcctcccgcttctggcacagctcctctatgcctgggggccgggaggggcggcgctgtgggcccagggcaggagcgcggcggcggagggcgggcctccttccacccgaggaagccagagtcaggcaccacccccgagcgcccggcgcggggcctgcgagccagcgagggctcgggccacggacacccggcctccggcacggagggctctgctcagccgcgcgatgcccgcagcgaggcgggtccaggggcaccccgctgcgagccgggaacccggccctgcggccctcccgacctccccgtcccggctgcgccgctcacacttgaccagctcgttgttgtagttctgcagcgccgcgccctgctgggtcatggtcaacgccgcccggggccccaccaccccaaccgccgcggaagcagcgctgtccgcgcctgcgcacgactcccccacggcgcgccgaactagcgcgtcatcgctgagcgccttgtgcgcgtcatggctgcgcgtgcagacgtgcgtcatcgccgcgcgccgcgccgagcgaatctcggagtcggtgggtgcagatggcggcggcagttgtggtggcggagggggacagcgactcccggcccggacaggagttgttagtggcctggaacaccgtgagcaccggcctggtgccgccggctgcgctggggctggtgaggcctgggaagagaggggcggcnnnnnnnnnnnnnnnnnnnnnnnnnnnnnnnnnnnnnnnnnnnnnnnnnnnnnnnnnnnnnnnnnnnnnnnnnnnnnnnnnnnnnnnnnnnnnnnnnnnnnnnnnnnnnaacatgacagagagagagtcccagggattcctgtgcagcgtgtcctggacacaggtgtctctcttctgtcactcaccttcagtcccacagtattcatgccttgaccctggtaaggccctatgtggcttgtgtctgcagcagcaaatttcttagcaactccaaacttcctggactctgcagaattccactgtgccttttgtcgatcctggggaggaatgattctcaccctcgtcgacattccttgccctgtaattgtgaacagaagcttgctgctgcttctctccaggaagatcaggtcactgtgagggcaagcagtctcttgttagtttggagaggagaggggtttgttgtgagagacaggtcctgttgtagttctctagcaattgtcatacccttggccatttgtggtggttttgtcacattgaacgggggtgtagccatgcagctacttgagaggtcttaggtggactaaaggtggactaaaggagtgctccttttgctggcaggggtcagggagaccgtgaagggcttctgttgggctcatccctgcaaaagttacacggcaacttttctcatcctcctcttgagtccttttgtcactgtagaccagagactgcactgaaaggcacaaacagtggcatctgtacctctgcggccagggtagcagtgcagttggttgtcgtttcagagttgatcctaggagataaggctagggcccccgacagccacacctgctgccactgatcacatggggaaggccagtgtccctacctggatagaggccagctgggcggggacagcagagcctgggagtgctctgtgctcccagtggcttcttgaagcctttggtacaaccgccccccacagctgaggattgtggggaggtgtgtgctgggtgtgtgtgtgtgtgtgtgctgcatgcactctacaggcagggcagtcctggcatggggctgttctgggctagaggggccggtgtgtgctctgggtgccccatggccagggctctcctctannnnnnnnnnnnnnnnnnnnnnnnnnnnnnnnnnnnnnnnnnnnnnnnnnnnnnnnnnnnnnnnnnnnnnnnnnnnnnnnnnnnnnnnnnnnnnnnnnnnnnnnnnnnnnnnnnnnnnnnnnnnnnnnnnnnnnnnnnnnnnnnnnnnnnnnnnnnnnnnnnnnnnnnnnnnnnnnnnnnnnnnnnnnnnnnnnnnnnnnnnnnnnnnnnnnnnnnnnnnnnnnnnnnnnnnnnnnnnnnnnnnnnnnnnnnnnnnnnnnnnnnnnnnnnnnnnnnnnnnnnnnnnnnnnnnnnnnnnnnnnnnnnnnnnnnnnnnnnnnnnnnnnnnnnnnnnnnnnnnnnnnnnnnnnnnnnnnnnnnnnnnnnnnnnnnnnnnnnnnnnnnnnnnnnnnnnnnnnnnnnnnnnnnnnnnnnnnnnnnnnnnnnnnnnnnnnnnnnnnnnnnnnnnnnnnnnnnnnnnnnnnnnnnnnnnnnnnnnnnnnnnnnnnnnnnnnnnnnnnnnnnnnnnnnnnnnnnnnnnnnnnnnnnnnnnnnnnnnnnnnnnnnnnnnnnnnnnnnnnnnnnnnnnnnnnnnnnnnnnnnnnnnnnnnnnnnnnnnnnnnnnnnnnnnnnnnnnnnnnnnnnnnnnnnnnnnnnnnnnnnnnnnnnnnnnnnnnnnnnnnnnnnnnnnnnnnnnnnnnnnnnnnnnnnnnnnnnnnnnnnnnnnnnnnnnnnnnnnnnnnnnnnnnnnnnnnnnnnnnnnnnnnnnnnnnnnnnnnnnnnnnnnnnnnnnnnnnnnnnnnnnnnnnnnnnnnnnnnnnnnnnnnnnnnnnnnnnnnnnnnnnnnnnnnnnnnnnnnnnnnnnnnnnnnnnnnnnnnnnnnnnnnnnnnnnnnnnnnnnnnnnnnnnnnnnnnnnnnnnnnnnnnnnnnnnnnnnnnnnnnnnnnnnnnnnnnnnnnnnnnnnnnnnnnnnnnnnnnnnnnnnnnnnnnnnnnnnnnnnnnnnnnnnnnnnnnnnnnnnnnnnnnnnnnnnnnnnnnnnnnnnnnnnnnnnnnnnnnnnnnnnnnnnnnnnnnnnnnnnnnnnnnnnnnnnnnnnnnnnnnnnnnnnnnnnnnnnnnnnnnnnnnnnnnnnnnnnnnnnnnnnnnnnnnnnnnnnnnnnnnnnnnnnnnnnnnnnnnnnnnnnnnnnnnnnnnnnnnnnnnnnnnnnnnnnnnnnnnnnnnnnnnnnnnnnnnnnnnnnnnnnnnnnnnnnnnnnnnnnnnnnnnnnnnnnnnnnnnnnnnnnnnnnnnnnnnnnnnnnnnnnnnnnnnnnnnnnnnnnnnnnnnnnnnnnnnnnnnnnnnnnnnnnnnnnnnnnnnnnnnnnnnnnnnnnnnnnnnnnnnnnnnnnnnnnnnnnnnnnnnnnnnnnnnnnnnnnnnnnnnnnnnnnnnnnnnnnnnnnnnnnnnnnnnnnnnnnnnnnnnnnnnnnnnnnnnnnnnnnnnnnnnnnnnnnnnnnnnnnnnnnnnnnnnnnnnnnnnnnnnnnnnnnnnnnnnnnnnnnnnnnnnnnnnnnnnnnnnnnnnnnnnnnnnnnnnnnnnnnnnnnnnnnnnnnnnnnnnnnnnnnnnnnnnnnnnnnnnnnnnnnnnnnnnnnnnnnnnnnnnnnnnnnnnnnnnnnnnnnnnnnnnnnnnnnnnnnnnnnnnnnnnnnnnnnnnnnnnnnnnnnnnnnnnnnnnnnnnnnnnnnnnnnnnnnnnnnnnnnnnnnnnnnnnnnnnnnnnnnnnnnnnnnnnnnnnnnnnnnnnnnnnnnnnnnnnnnnnnnnnnnnnnnnnnnnnnnnnnnnnnnnnnnnnnnnnnnnnnnnnnnnnnnnnnnnnnnnnnnnnnnnnnnnnnnnnnnnnnnnnnnnnnnnnnnnnnnnnnnnnnnnnnnnnnnnnnnnnnnnnnnnnnnnnnnnnnnnnnnnnnnnnnnnnnnnnnnnnnnnnnnnnnnnnnnnnnnnnnnnnnnnnnnnnnnnnnnnnnnnnnnnnnnnnnnnnnnnnnnnnnnnnnnnnnnnnnnnnnnnnnnnnnnnnnnnnnnnnnnnnnnnnnnnnnnnnnnnnnnnnnnnnnnnnnnnnnnnnnnnnnnnnnnnnnnnnnnnnnnnnnnnnnnnnnnnnnnnnnnnnnnnnnnnnnnnnnnnnnnnnnnnnnnnnnnnnnnnnnnnnnnnnnnnnnnnnnnnnnnnnnnnnnnnnnnnnnnnnnnnnnnnnnnnnnnnnnnnnnnnnnnnnnnnnnnnnnnnnnnnnnnnnnnnnnnnnnnnnnnnnnnnnnnnnnnnnnnnnnnnnnnnnnnnnnnnnnnnnnnnnnnnnnnnnnnnnnnnnnnnnnnnnnnnnnnnnnnnnnnnnnnnnnnnnnnnnnnnnnnnnnnnnnnnnnnnnnnnnnnnnnnnnnnnnnnnnnnnnnnnnnnnnnnnnnnnnnnnnnnnnnnnnnnnnnnnnnnnnnnnnnnnnnnnnnnnnnnnnnnnnnnnnnnnnnnnnnnnnnnnnnnnnnnnnnnnnnnnnnnnnnnnnnnnnnnnnnnnnnnnnnnnnnnnnnnnnnnnnnnnnnnnnnnnnnnnnnnnnnnnnnnnnnnnnnnnnnnnnnnnnnnnnnnnnnnnnnnnnnnnnnnnnnnnnnnnnnnnnnnnnnnnnnnnnnnnnnnnnnnnnnnnnnnnnnnnnnnnnnnnnnnnnnnnnnnnnnnnnnnnnnnnnnnnnnnnnnnnnnnnnnnnnnnnnnnnnnnnnnnnnnnnnnnnnnnnnnnnnnnnnnnnnnnnnnnnnnnnnnnnnnnnnnnnnnnnnnnnnnnnnnnnnnnnnnnnnnnnnnnnnnnnnnnnnnnnnnnnnnnnnnnnnnnnnnnnnnnnnnnnnnnnnnnnnnnnnnnnnnnnnnnnnnnnnnnnnnnnnnnnnnnnnnnnnnnnnnnnnnnnnnnnnnnnnnnnnnnnnnnnnnnnnnnnnnnnnnnnnnnnnnnnnnnnnnnnnnnnnnnnnnnnnnnnnnnnnnnnnnnnnnnnnnnnnnnnnnnnnnnnnnnnnnnnnnnnnnnnnnnnnnnnnnnnnnnnnnnnnnnnnnnnnnnnnnnnnnnnnnnnnnnnnnnnnnnnnnnnnnnnnnnnnnnnnnnnnnnnnnnnnnnnnnnnnnnnnnnnnnnnnnnnnnnnnnnnnnnnnnnnnnnnnnnnnnnnnnnnnnnnnnnnnnnnnnnnnnnnnnnnnnnnnnnnnnnnnnnnnnnnnnnnnnnnnnnnnnnnnnnnnnnnnnnnnnnnnnnnnnnnnnnnnnnnnnnnnnnnnnnnnnnnnnnnnnnnnnnnnnnnnnnnnnnnnnnnnnnnnnnnnnnnnnnnnnnnnnnnnnnnnnnnnnnnnnnnnnnnnnnnnnnnnnnnnnnnnnnnnnnnnnnnnnnnnnnnnnnnnnnnnnnnnnnnnnnnnnnnnnnnnnnnnnnnnnnnnnnnnnnnnnnnnnnnnnnnnnnnnnnnnnnnnnnnnnnnnnnnnnnnnnnnnnnnnnnnnnnnnnnnnnnnnnnnnnnnnnnnnnnnnnnnnnnnnnnnnnnnnnnnnnnnnnnnnnnnnnnnnnnnnnnnnnnnnnnnnnnnnnnnnnnnnnnnnnnnnnnnnnnnnnnnnnnnnnnnnnnnnnnnnnnnnnnnnnnnnnnnnnnnnnnnnnnnnnnnnnnnnnnnnnnnnnnnnnnnnnnnnnnnnnnnnnnnnnnnnnnnnnnnnnnnnnnnnnnnnnnnnnnnnnnnnnnnnnnnnnnnnnnnnnnnnnnnnnnnnnnnnnnnnnnnnnnnnnnnnnnnnnnnnnnnnnnnnnnnnnnnnnnnnnnnnnnnnnnnnnnnnnnnnnnnnnnnnnnnnnnnnnnnnnnnnnnnnnnnnnnnnnnnnnnnnnnnnnnnnnnnnnnnnnnnnnnnnnnnnnnnnnnnnnnnnnnnnnnnnnnnnnnnnnnnnnnnnnnnnnnnnnnnnnnnnnnnnnnnnnnnnnnnnnnnnnnnnnnnnnnnnnnnnnnnnnnnnnnnnnnnnnnnnnnnnnnnnnnnnnnnnnnnnnnnnnnnnnnnnnnnnnnnnnnnnnnnnnnnnnnnnnnnnnnnnnnnnnnnnnnnnnnnnnnnnnnnnnnnnnnnnnnnnnnnnnnnnnnnnnnnnnnnnnnnnnnnnnnnnnnnnnnnnnnnnnnnnnnnnnnnnnnnnnnnnnnnnnnnnnnnnnnnnnnnnnnnnnnnnnnnnnnnnnnnnnnnnnnnnnnnnnnnnnnnnnnnnnnnnnnnnnnnnnnnnnnnnnnnnnnnnnnnnnnnnnnnnnnnnnnnnnnnnnnnnnnnnnnnnnnnnnnnnnnnnnnnnnnnnnnnnnnnnnnnnnnnnnnnnnnnnnnnnnnnnnnnnnnnnnnnnnnnnnnnnnnnnnnnnnnnnnnnnnnnnnnnnnnnnnnnnnnnnnnnnnnnnnnnnnnnnnnnnnnnnnnnnnnnnnnnnnnnnnnnnnnnnnnnnnnnnnnnnnnnnnnnnnnnnnnnnnnnnnnnnnnnnnnnnnnnnnnnnnnnnnnnnnnnnnnnnnnnnnnnnnnnnnnnnnnnnnnnnnnnnnnnnnnnnnnnnnnnnnnnnnnnnnnnnnnnnnnnnnnnnnnnnnnnnnnnnnnnnnnnnnnnnnnnnnnnnnnnnnnnnnnnnnnnnnnnnnnnnnnnnnnnnnnnnnnnnnnnnnnnnnnnnnnnnnnnnnnnnnnnnnnnnnnnnnnnnnnnnnnnnnnnnnnnnnnnnnnnnnnnnnnnnnnnnnnnnnnnnnnnnnnnnnnnnnnnnnnnnnnnnnnnnnnnnnnnnnnnnnnnnnnnnnnnnnnnnnnnnnnnnnnnnnnnnnnnnnnnnnnnnnnnnnnnnnnnnnnnnnnnnnnnnnnnnnnnnnnnnnnnnnnnnnnnnnnnnnnnnnnnnnnnnnnnnnnnnnnnnnnnnnnnnnnnnnnnnnnnnnnnnnnnnnnnnnnnnnnnnnnnnnnnnnnnnnnnnnnnnnnnnnnnnnnnnnnnnnnnnnnnnnnnnnnnnnnnnnnnnnnnnnnnnnnnnnnnnnnnnnnnnnnnnnnnnnnnnnnnnnnnnnnnnnnnnnnnnnnnnnnnnnnnnnnnnnnnnnnnnnnnnnnnnnnnnnnnnnnnnnnnnnnnnnnnnnnnnnnnnnnnnnnnnnnnnnnnnnnnnnnnnnnnnnnnnnnnnnnnnnnnnnnnnnnnnnnnnnnnnnnnnnnnnnnnnnnnnnnnnnnnnnnnnnnnnnnnnnnnnnnnnnnnnnnnnnnnnnnnnnnnnnnnnnnnnnnnnnnnnnnnnnnnnnnnnnnnnnnnnnnnnnnnnnnnnnnnnnnnnnnnnnnnnnnnnnnnnnnnnnnnnnnnnnnnnnnnnnnnnnnnnnnnnnnnnnnnnnnnnnnnnnnnnnnnnnnnnnnnnnnnnnnnnnnnnnnnnnnnnnnnnnnnnnnnnnnnnnnnnnnnnnnnnnnnnnnnnnnnnnnnnnnnnnnnnnnnnnnnnnnnnnnnnnnnnnnnnnnnnnnnnnnnnnnnnnnnnnnnnnnnnnnnnnnnnnnnnnnnnnnnnnnnnnnnnnnnnnnnnnnnnnnnnnnnnnnnnnnnnnnnnnnnnnnnnnnnnnnnnnnnnnnnnnnnnnnnnnnnnnnnnnnnnnnnnnnnnnnnnnnnnnnnnnnnnnnnnnnnnnnnnnnnnnnnnnnnnnnnnnnnnnnnnnnnnnnnnnnnnnnnnnnnnnnnnnnnnnnnnnnnnnnnnnnnnnnnnnnnnnnnnnnnnnnnnnnnnnnnnnnnnnnnnnnnnnnnnnnnnnnnnnnnnnnnnnnnnnnnnnnnnnnnnnnnnnnnnnnnnnnnnnnnnnnnnnnnnnnnnnnnnnnnnnnnnnnnnnnnnnnnnnnnnnnnnnnnnnnnnnnnnnnnnnnnnnnnnnnnnnnnnnnnnnnnnnnnnnnnnnnnnnnnnnnnnnnnnnnnnnnnnnnnnnnnnnnnnnnnnnnnnnnnnnnnnnnnnnnnnnnnnnnnnnnnnnnnnnnnnnnnnnnnnnnnnnnnnnnnnnnnnnnnnnnnnnnnnnnnnnnnnnnnnnnnnnnnnnnnnnnnnnnnnnnnnnnnnnnnnnnnnnnnnnnnnnnnnnnnnnnnnnnnnnnnnnnnnnnnnnnnnnnnnnnnnnnnnnnnnnnnnnnnnnnnnnnnnnnnnnnnnnnnnnnnnnnnnnnnnnnnnnnnnnnnnnnnnnnnnnnnnnnnnnnnnnnnnnnnnnnnnnnnnnnnnnnnnnnnnnnnnnnnnnnnnnnnnnnnnnnnnnnnnnnnnnnnnnnnnnnnnnnnnnnnnnnnnnnnnnnnnnnnnnnnnnnnnnnnnnnnnnnnnnnnnnnnnnnnnnnnnnnnnnnnnnnnnnnnnnnnnnnnnnnnnnnnnnnnnnnnnnnnnnnnnnnnnnnnnnnnnnnnnnnnnnnnnnnnnnnnnnnnnnnnnnnnnnnnnnnnnnnnnnnnnnnnnnnnnnnnnnnnnnnnnnnnnnnnnnnnnnnnnnnnnnnnnnnnnnnnnnnnnnnnnnnnnnnnnnnnnnnnnnnnnnnnnnnnnnnnnnnnnnnnnnnnnnnnnnnnnnnnnnnnnnnnnnnnnnnnnnnnnnnnnnnnnnnnnnnnnnnnnnnnnnnnnnnnnnnnnnnnnnnnnnnnnnnnnnnnnnnnnnnnnnnnnnnnnnnnnnnnnnnnnnnnnnnnnnnnnnnnnnnnnnnnnnnnnnnnnnnnnnnnnnnnnnnnnnnnnnnnnnnnnnnnnnnnnnnnnnnnnnnnnnnnnnnnnnnnnnnnnnnnnnnnnnnnnnnnnnnnnnnnnnnnnnnnnnnnnnnnnnnnnnnnnnnnnnnnnnnnnnnnnnnnnnnnnnnnnnnnnnnnnnnnnnnnnnnnnnnnnnnnnnnnnnnnnnnnnnnnnnnnnnnnnnnnnnnnnnnnnnnnnnnnnnnnnnnnnnnnnnnnnnnnnnnnnnnnnnnnnnnnnnnnnnnnnnnnnnnnnnnnnnnnnnnnnnnnnnnnnnnnnnnnnnnnnnnnnnnnnnnnnnnnnnnnnnnnnnnnnnnnnnnnnnnnnnnnnnnnnnnnnnnnnnnnnnnnnnnnnnnnnnnnnnnnnnnnnnnnnnnnnnnnnnnnnnnnnnnnnnnnnnnnnnnnnnnnnnnnnnnnnnnnnnnnnnnnnnnnnnnnnnnnnnnnnnnnnnnnnnnnnnnnnnnnnnnnnnnnnnnnnnnnnnnnnnnnnnnnnnnnnnnnnnnnnnnnnnnnnnnnnnnnnnnnnnnnnnnnnnnnnnnnnnnnnnnnnnnnnnnnnnnnnnnnnnnnnnnnnnnnnnnnnnnnnnnnnnnnnnnnnnnnnnnnnnnnnnnnnnnnnnnnnnnnnnnnnnnnnnnnnnnnnnnnnnnnnnnnnnnnnnnnnnnnnnnnnnnnnnnnnnnnnnnnnnnnnnnnnnnnnnnnnnnnnnnnnnnnnnnnnnnnnnnnnnnnnnnnnnnnnnnnnnnnnnnnnnnnnnnnnnnnnnnnnnnnnnnnnnnnnnnnnnnnnnnnnnnnnnnnnnnnnnnnnnnnnnnnnnnnnnnnnnnnnnnnnnnnnnnnnnnnnnnnnnnnnnnnnnnnnnnnnnnnnnnnnnnnnnnnnnnnnnnnnnnnnnnnnnnnaggaagggttaggatggtcgtcacaggtgggaggtgtcggctcggggaggaaggggtcgggatggtcgtcacaggcgggttccagggctttctgtctgatgtgtggggcctgtgaggcctccagtgtgcccagcgagtgctcaggactggggggaggcgggcaccccagcgggggacatgtgaggagagggttctggggcacagccagcatccagtctgcagaccccaaccccaggtaccccaggaaggggatggtccagcctcggcccaggcaggaggagcagcctcaggacagagccgccaggaggccggcgggcgggcggggctgagttcaagggagggtccacagcttctccaggtctgctgtgaaggaggctggacctagatgtgttttcctttttcttttgcaagtaagagggccttgctgtgttgacaaaccaagggaacttactcctaggggagggcagggcgatgtgtccactttagaaaccaagggggaagcttccttccggagacagacaaggggagggccaggcggaggcccccagggcaggaggccaaggggctgtggtagggccgggctgctgaccatggtggcgaatgcctgctgcctccctccaggcctcagcttggctctggaagagtccaggtgtcccttgcagcttgtggagggtctgtgtggcttgcacctgctctcggtggaaaggagcaccctggccatccccacacctcgagctctggcctgtgatacagcctggtgtctctggagcctgcgggcaccgtgccccgctgtgttctggtacaaatcatccgtgtggcccggctccgtgctcggtccctttccccctgcccctctggctgcctcaggctctccagcgttgcttccaggcaaggccccaatggcctccctccagggtcctgccttgggtcccaggcatgactcagccacttcctgttgctcaggcctgatgtgctgggacagccacactctagtgccctttgtcttaacttcagtgggacacaggagtggctcagggaggccccggggctgtgctgagaggtcccaccagcagagctcctggccgagcgaccttgttggacacgtggctggccatgcagcccacagcgtcacccctgagcccttgcatgtgtcctgcggcaggctgaccagtggcggcgtttgtggaggtcatggccttggagccagaactaggacctagcaagccactgactccacttccattttctgtccataaagaggggtttgtttccrttagaagctgccggatcctggaaggactcaggagcccttggcccacagagcaggtgtgtcagtgccccagtgctaccagaacaaagtaccacaaaccagcgggcttaaaagaaacatatcattttacagaagtcagaagtctaaagtcagggtcagcagggccctccgaaggctctaggggaggctgcttcctcccctcttccagcttctgggggctccaggagctccggggcctgtgggtgcctcgctctggtctctgccgcgtcgcccgtgatgttcccccgtgtctctgttcctatctccctcttagaagaacactctctctattccagggtgacgtcatcttaattatatctttaatgaccgtatttccaaataagatctcatcagaggcaccgggagttaggggttcatgtgtcatttttcgaggggcacaattcagtgcatgacaatttgccccatggtgggcccctcccacgtgcaagtgacagccccagtgtccccaaaagtcttcaccatttcagcatcaactccaagtccaaaatctcatctaactaccatccacacaaagttccacacacatctcagcctgtaaatgcatcttaacgaggtccaggtgaggctggagtgtgcgccattcctctacgtaaatagatctaaacaaggtacaggtgaggctggagtgcgcgccattcctccagctgggacgccgtgaaatcagccaacagatgatctgtttcaaaagttcagccgtaagacaagcatacacattcccaccccaaaagggaaaactgggaggaaaaaggacagcgagtccaaacccagcagccgaaattccacttgacttccaggcctgcgaatcctctttggccccctgctccgtcagccttggcctcggcggctctgctcttggagcctgccttcctttcactccagcctggcagcacttctgcgggtgtaaaattctcacaccttgttggcttatgcagctcaccagtgccgaagccttcagacaggcgggtccgcagccctttcccggaggccccacctgtccctgtctgctgctgagatggttagttggatacacaggtcacacctcatgtctagcaaaccctggtccagccacacccttggccacgtctcagagctgcctggatagagtatttttcagatccccaagggctggtgcctttttgcttaatggtccctgcctcactgattgtttccctcttgcattctgctataagtagcaaggagaagccaggtggcaccttccacactgcttggaaatctcagcttgatgtccaggctcatcagctgcaggtcccacttcgcacccaacagcagagcagcagccagccaagctctctgctgcctcctccggttcccagtagcacggtcatttccatstgagacctcactggaagcacctgttgggtcggcattgctgccgacatccagtctgtgatgctgtgtgcattctccaagacggcggcagctctcctcttccagccatttccaggcttgtcttcatgcctttctaccagcagtcgtgcaggcctcaccagttcttccagcctctccccatcacccacttccaaagctgctgccacagttcttggtgttaggttttggcagcacccctcctggcccttcctggtaccaaaatctgttcgtttactgtggctgctgtaacaaagtgtcacaaactgggtggcttaaaaaacagaaatagattgtcttagttttggaggctggaagtccaagatgaaagtactggcagccccgttccctctgaaccctcttagagacctccgttgccccccagcttctggtgtttgccacagcccttggtgtttcttggcttgtggccgcgttgctccaggtggtctctgtcttcgtgtggccccctccccgcctgcctgtgtcttcctrtctttccttttcttagaaggaccccrgtcagttgggttaggatgcacctcagttacatctgcatcaaccctgtttgcaaatatggccacatttccaagcactgggggtcaggaggcccctgtagccttttcgggacacaccttatgatgctggccccattgcccttccatggtggctgagcaggtggggaccccacccagtcctgtgctctcgctgctcacctgcctgccagggtggggtggggcaggtggctctgggagcccctttctcactggtaccaggtggcagagcccacgggcmtgagcgccctgcagccgagctgcccgtgctgaccctggccctccttaggccatgcggaccctcagttggaagcacaccctgggcctggtgaccatggacgtggagctggccgaccgcacgctgtctgtggcggtcaccccagtacaggcggtgatcttgctgtattttcaggaccaaggtgagcccaccagcccctagctggcctgccccggccacacggcccagctgtgggtgaggggctgttccccagtgagggtgtggtttggggcagctgcgccagcaggcggcacccttccctttcccacgggcaaggcagggtggcccgggagccccccgacctctcggctgacgggaggcaggggaggtgcagcccgtgcccaggctgcccagcgtcccggtgactctgcacgcagccagctggaccctggaggaactgagcaaggcggtgaagatgcccgtggcgctgctgcggcggcggatgtccgtgtggctgcagcagggtgtgctgcgtgaggagccccccggcaccttctctgtcattgaggaggagcggcctcaggaccgggacaacatggtgctcattgacagtgacgacgagagcgactccggcatggcctcccaggccgaccagaaggaggaggagctgmtggtgcgcgtgcaggccccacggggggccagggggcgggggcgaggcctgcaggtgcctgacgggggctggcctgtgtccgcagctcttctggacgtacatccaggccatgctgaccaacctggagagcctctcactggatcgtatctacaacatgctccgcatgtttgtggtgactgggcctgcactggccgagattgacctgcaggagctgcagggctacctgcagaagaaggtgcgggaccagcagctcgtctactcggccggcgtctaccgcctgcccaagaactgcagctgacacatcgcccgcccgcccgcccgcccgccaggcgctgccctgcaggtgctctcgtcctcccgtgccagcccccgcccgcccgtgtcccagaatgcactgctgaggagcatgcccacccccacccccgcagtgtgcagattaaagcaagtcagatcatccttttctgtcctggtggctttgtggggccccccaggatcctcctctagcctgggcctctctctcagcctggcagggcctgctcctcagcagcaggtgaggggccacctaggcctacacatctgcactgggaatgtagcctcctgagagaatcccgggccgcccccgacccagggtgctcagggagcggcacgtgaaggtccacgtcacgcccgggccacggctcaggcagccacgtcctagggcttagtgcttgctacccgccagacctccagctccattcctgcgcctctggcctttagaaggagccctggggtcaccctctgctcagcctgtgcccacctccacacgctcggccaggaggtctcgggcgannnnnnnnnnnnnnnnnnnnnnnnnnnnnnnnnnnnnnnnnnnnnnnnnnnnnnnnnnnnnnnnnnnnnnnnnnnnnnnnnnnnnnnnnnnnnnnnnnnnnnnnnnnnnnnnnnnnnnnnnnnnnnnnnnnnnnnnnnnnnnnnnnnnnnnnnnnnnnnnnnnnnnnnnnnnnnnnnnnnnnnnnnnnnnnnnnnnnnnnnnnnnnnnnnnnnnnnnnnnnnnnnnnnnnnnnnnnnnnnnnnnnnnnnnnnnnnnnnnnnnnnnnnnnnnnnnnnnnnnnnnnnnnnnnnnnnnnnnnnnnnnnnnnnnnnnnnnnnnnnnnnnnnnnnnnnnnnnnnnnnnnnnnnnnnnnnnnnnnnnnnnnnnnnnnnnnnnnnnnnnnnnnnnnnnnnnnnnnnnnnnnnnnnnnnnnnnnnnnnnnnnnnnnnnnnnnnnnnnnnnnnnnnnnnnnnnnnnnnnnnnnnnnnnnnnnnnnnnnnnnnnnnnnnnnnnnnnnnnnnnnnnnnnnnnnnnnnnnnnnnnnnnnnnnnnnnnnnnnnnnnnnnnnnnnnnnnnnnnnnnnnnnnnnnnnnnnnnnnnnnnnnnnnnnnnnnnnnnnnnnnnnnnnnnnnnnnnnnnnnnnnnnnnnnnnnnnnnnnnnnnnnnnnnnnnnnnnnnnnnnnnnnnnnnnnnnnnnnnnnnnnnnnnnnnnnnnnnnnnnnnnnnnnnnnnnnnnnnnnnnnnnnnnnnnnnnnnnnnnnnnnnnnnnnnnnnnnnnnnnnnnnnnnnnnnnnnnnnnnnnnnnnnnnnnnnnnnnnnnnnnnnnnnnnnnnnnnnnnnnnnnnnnnnnnnnnnnnnnnnnnnnnnnnnnnnnnnnnnnnnnnnnnnnnnnnnnnnnnnnnnnnnnnnnnnnnnnnnnnnnnnnnnnnnnnnnnnnnnnnnnnnnnnnnnnnnnnnnnnnnnnnnnnnnnnnnnnnnnnnnnnnnnnnnnnnnnnnnnnnnnnnnnnnnnnnnnnnnnnnnnnnnnnnnnnnnnnnnnnnnnnnnnnnnnnnnnnnnnnnnnnnnnnnnnnnnnnnnnnnnnnnnnnnnnnnnnnnnnnnnnnnnnnnnnnnnnnnnnnnnnnnnnnnnnnnnnnnnnnnnnnnnnnnnnnnnnnnnnnnnnnnnnnnnnnnnnnnnnnnnnnnnnnnnnnnnnnnnnnnnnnnnnnnnnnnnnnnnnnnnnnnnnnnnnnnnnnnnnnnnnnnnnnnnnnnnnnnnnnnnnnnnnnnnnnnnnnnnnnnnnnnnnnnnnnnnnnnnnnnnnnnnnnnnnnnnnnnnnnnnnnnnnnnnnnnnnnnnnnnnnnnnnnnnnnnnnnnnnnnnnnnnnnnnnnnnnnnnnnnnnnnnnnnnnnnnnnnnnnnnnnnnnnnnnnnnnnnnnnnnnnnnnnnnnnnnnnnnnnnnnnnnnnnnnnnnnnnnnnnnnnnnnnnnnnnnnnnnnnnnnnnnnnnnnnnnnnnnnnnnnnnnnnnnnnnnnnnnnnnnnnnnnnnnnnnnnnnnnnnnnnnnnnnnnnnnnnnnnnnnnnnnnnnnnnnnnnnnnnnnnnnnnnnnnnnnnnnnnnnnnnnnnnnnnnnnnnnnnnnnnnnnnnnnnnnnnnnnnnnnnnnnnnnnnnnnnnnnnnnnnnnnnnnnnnnnnnnnnnnnnnnnnnnnnnnnnnnnnnnnnnnnnnnnnnnnnnnnnnnnnnnnnnnnnnnnnnnnnnnnnnnnnnnnnnnnnnnnnnnnnnnnnnnnnnnnnnnnnnnnnnnnnnnnnnnnnnnnnnnnnnnnnnnnnnnnnnnnnnnnnnnnnnnnnnnnnnnnnnnnnnnnnnnnnnnnnnnnnnnnnnnnnnnnnnnnnnnnnnnnnnnnnnnnnnnnnnnnnnnnnnnnnnnnnnnnnnnnnnnnnnnnnnnnnnnnnnnnnnnnnnnnnnnnnnnnnnnnnnnnnnnnnnnnnnnnnnnnnnnnnnnnnnnnnnnnnnnnnnnnnnnnnnnnnnnnnnnnnnnnnnnnnnnnnnnnnnnnnnnnnnnnnnnnnnnnnnnnnnnnnnnnnnnnnnnnnnnnnnnnnnnnnnnnnnnnnnnnnnnnnnnnnnnnnnnnnnnnnnnnnnnnnnnnnnnnnnnnnnnnnnnnnnnnnnnnnnnnnnnnnnnnnnnnnnnnnnnnnnnnnnnnnnnnnnnnnnnnnnnnnnnnnnnnnnnnnnnnnnnnnnnnnnnnnnnnnnnnnnnnnnnnnnnnnnnnnnnnnnnnnnnnnnnnnnnnnnnnnnnnnnnnnnnnnnnnnnnnnnnnnnnnnnnnnnnnnnnnnnnnnnnnnnnnnnnnnnnnnnnnnnnnnnnnnnnnnnnnnnnnnnnnnnnnnnnnnnnnnnnnnnnnnnnnnnnnnnnnnnnnnnnnnnnnnnnnnnnnnnnnnnnnnnnnnnnnnnnnnnnnnnnnnnnnnnnnnnnnnnnnnnnnnnnnnnnnnnnnnnnnnnnnnnnnnnnnnnnnnnnnnnnnnnnnnnnnnnnnnnnnnnnnnnnnnnnnnnnnnnnnnnnnnnnnnnnnnnnnnnnnnnnnnnnnnnnnnnnnnnnnnnnnnnnnnnnnnnnnnnnnnnnnnnnnnnnnnnnnnnnnnnnnnnnnnnnnnnnnnnnnnnnnnnnnnnnnnnnnnnnnnnnnnnnnnnnnnnnnnnnnnnnnnnnnnnnnnnnnnnnnnnnnnnnnnnnnnnnnnnnnnnnnnnnnnnnnnnnnnnnnnnnnnnnnnnnnnnnnnnnnnnnnnnnnnnnnnnnnnnnnnnnnnnnnnnnnnnnnnnnnnnnnnnnnnnnnnnnnnnnnnnnnnnnnnnnnnnnnnnnnnnnnnnnnnnnnnnnnnnnnnnnnnnnnnnnnnnnnnnnnnnnnnnnnnnnnnnnnnnnnnnnnnnnnnnnnnnnnnnnnnnnnnnnnnnnnnnnnnnnnnnnnnnnnnnnnnnnnnnnnnnnnnnnnnnnnnnnnnnnnnnnnnnnnnnnnnnnnnnnnnnnnnnnnnnnnnnnnnnnnnnnnnnnnnnnnnnnnnnnnnnnnnnnnnnnnnnnnnnnnnnnnnnnnnnnnnnnnnnnnnnnnnnnnnnnnnnnnnnnnnnnnnnnnnnnnnnnnnnnnnnnnnnnnnnnnnnnnnnnnnnnnnnnnnnnnnnnnnnnnnnnnnnnnnnnnnnnnnnnnnnnnnnnnnnnnnnnnnnnnnnnnnnnnnnnnnnnnnnnnnnnnnnnnnnnnnnnnnnnnnnnnnnnnnnnnnnnnnnnnnnnnnnnnnnnnnnnnnnnnnnnnnnnnnnnnnnnnnnnnnnnnnnnnnnnnnnnnnnnnnnnnnnnnnnnnnnnnnnnnnnnnnnnnnnnnnnnnnnnnnnnnnnnnnnnnnnnnnnnnnnnnnnnnnnnnnnnnnnnnnnnnnnnnnnnnnnnnnnnnnnnnnnnnnnnnnnnnnnnnnnnnnnnnnnnnnnnnnnnnnnnnnnnnnnnnnnnnnnnnnnnnnnnnnnnnnnnnnnnnnnnnnnnnnnnnnnnnnnnnnnnnnnnnnnnnnnnnnnnnnnnnnnnnnnnnnnnnnnnnnnnnnnnnnnnnnnnnnnnnnnnnnnnnnnnnnnnnnnnnnnnnnnnnnnnnnnnnnnnnnnnnnnnnnnnnnnnnnnnnnnnnnnnnnnnnnnnnnnnnnnnnnnnnnnnnnnnnnnnnnnnnnnnnnnnnnnnnnnnnnnnnnnnnnnnnnnnnnnnnnnnnnnnnnnnnnnnnnnnnnnnnnnnnnnnnnnnnnnnnnnnnnnnnnnnnnnnnnnnnnnnnnnnnnnnnnnnnnnnnnnnnnnnnnnnnnnnnnnnnnnnnnnnnnnnnnnnnnnnnnnnnnnnnnnnnnnnnnnnnnnnnnnnnnnnnnnnnnnnnnnnnnnnnnnnnnnnnnnnnnnnnnnnnnnnnnnnnnnnnnnnnnnnnnnnnnnnnnnnnnnnnnnnnnnnnnnnnnnnnnnnnnnnnnnnnnnnnnnnnnnnnnnnnnnnnnnnnnnnnnnnnnnnnnnnnnnnnnnnnnnnnnnnnnnnnnnnnnnnnnnnnnnnnnnnnnnnnnnnnnnnnnnnnnnnnnnnnnnnnnnnnnnnnnnnnnnnnnnnnnnnnnnnnnnnnnnnnnnnnnnnnnnnnnnnnnnnnnnnnnnnnnnnnnnnnnnnnnnnnnnnnnnnnnnnnnnnnnnnnnnnnnnnnnnnnnnnnnnnnnnnnnnnnnnnnnnnnnnnnnnnnnnnnnnnnnnnnnnnnnnnnnnnnnnnnnnnnnnnnnnnnnnnnnnnnnnnnnnnnnnnnnnnnnnnnnnnnnnnnnnnnnnnnnnnnnnnnnnnnnnnnnnnnnnnnnnnnnnnnnnnnnnnnnnnnnnnnnnnnnnnnnnnnnnnnnnnnnnnnnnnnnnnnnnnnnnnnnnnnnnnnnnnnnnnnnnnnnnnnnnnnnnnnnnnnnnnnnnnnnnnnnnnnnnnnnnnnnnnnnnnnnnnnnnnnnnnnnnnnnnnnnnnnnnnnnnnnnnnnnnnnnnnnnnnnnnnnnnnnnnnnnnnnnnnnnnnnnnnnnnnnnnnnnnnnnnnnnnnnnnnnnnnnnnnnnnnnnnnnnnnnnnnnnnnnnnnnnnnnnnnnnnnnnnnnnnnnnnnnnnnnnnnnnnnnnnnnnnnnnnnnnnnnnnnnnnnnnnnnnnnnnnnnnnnnnnnnnnnnnnnnnnnnnnnnnnnnnnnnnnnnnnnnnnnnnnnnnnnnnnnnnnnnnnnnnnnnnnnnnnnnnnnnnnnnnnnnnnnnnnnnnnnnnnnnnnnnnnnnnnnnnnnnnnnnnnnnnnnnnnnnnnnnnnnnnnnnnnnnnnnnnnnnnnnnnnnnnnnnnnnnnnnnnnnnnnnnnnnnnnnnnnnnnnnnnnnnnnnnnnnnnnnnnnnnnnnnnnnnnnnnnnnnnnnnnnnnnnnnnnnnnnnnnnnnnnnnnnnnnnnnnnnnnnnnnnnnnnnnnnnnnnnnnnnnnnnnnnnnnnnnnnnnnnnnnnnnnnnnnnnnnnnnnnnnnnnnnnnnnnnnnnnnnnnnnnnnnnnnnnnnnnnnnnnnnnnnnnnnnnnnngcccaggtgtcggccacggcctcgccctcggggtccatgggcgccccggactgccccgaggtgtgcacgtgcgtgccgggaggcctggccagatgctcggcgctctcgctgcccgccgtgcccccgggcctgagcctgcgcctgcgcgcgctgctgctggaccacaaccgcgtccgtgcgctgccgccaggtgccttcgcgggagcgggcgcgctacagcgcctggacctgcgcgagaacgggctgcactcggtgcatgtgcgagccttctggggcctgggcgcgctgcagctgctggacctgagcgccaaccagctggaagcactggcaccagggactttcgcgccgctgcgcgcgctgcgcaacctctcattggccggcaaccggctggcgcgcctggagcccgcggcgctaggcgcgctcccgctgctgcgctcactcagcctgcaggacaacgagctggcggcactcgcgccggggctgctgggccgcctgcccgctctagacgcgctgcacctgcgcggcaacccttggggctgcgggtgcgcgctgcgcccgctctgcgcctggctgcgccggc

SEQ ID NO: 93746 - DNA, 16719 bp, Homo sapiens
  misc_feature (1)...(16719): n = A,T,C or G
nnnnnnnnnnnnnnnnnnnnnnnnnnnnnnnnnnnnnnnnnnnnnnnnnnnnnnnnnnnnnnnnnnnnnnnnnnnnnnnnnnnnnnnnnnnnnnnnnnnnnnnnnnnnnnnnnnnnnnnnnnnnnnnnnnnnnnnnnnnnnnnnnnnnnnnnnnnnnnnnnnnnnnnnnnnnnnnnnnnnnnnnnnnnnnnnnnnnnnnnnnnnnnnnnnnnnnnnnnnnnnnnnnnnnnnnnnnnnnnnnnnnnnnnnnnnnnnnnnnnnnnnnnnnnnnnnnnnnnnnnnnnnnnnnnnnnnnnnnnnnnnnnnnnnnnnnnnnnnnnnnnnnnnnnnnnnnnnnnnnnnnnnnnnnnnnnnnnnnnnnnnnnnnnnnnnnnnnnnnnnnnnnnnnnnnnnnnnnnnnnnnnnnnnnnnnnnnnnnnnnnnnnnnnnnnnnnnnnnnnnnnnnnnnnnnnnnnnnnnnnnnnnnnnnnnnnnnnnnnnnnnnnnnnnnnnnnnnnnnnnnnnnnnnnnnnnnnnnnnnnnnnnnnnnnnnnnnnnnnnnnnnnnnnnnnnnnnnnnnnnnnnnnnnnnnnnnnnnnnnnnnnnnnnnnnnnnnnnnnnnnnnnnnnnnnnnnnnnnnnnnnnnnnnnnnnnnnnnnnnnnnnnnnnnnnnnnnnnnnnnnnnnnnnnnnnnnnnnnnnnnnnnnnnnnnnnnnnnnnnnnnnnnnnnnnnnnnnnnnnnnnnnnnnnnnnnnnnnnnnnnnnnnnnnnnnnnnnnnnnnnnnnnnnnnnnnnnnnnnnnnnnnnnnnnnnnnnnnnnnnnnnnnnnnnnnnnnnnnnnnnnnnnnnnnnnnnnnnnnnnnnnnnnnnnnnnnnnnnnnnnnnnnnnnnnnnnnnnnnnnnnaaaactccctctccaaaaaagaaaaaaaaaaagatgtagagaacacatgaagcaacaaaagcatgtttccaaagttataatgtgaccctatttttataaatataaacagtgtgtatacatatatataggcgtacgagaaggataaatactaaaattgggttatagaaagatagtgattgggaggccaaggtgggcagagcacctgaggtcagaagttcaagatcagcctggacaacatggtgaaaccctgtctctactaaaaatacaaaaattagtcaggtatgatggcaggcatctgtaatcacagctagtcgggaggctgaggcaggagaatcacttgaacccaggaggcagaggttgcagtgagccgagatcgcgccattgtactccagcctgggtgacgaggaaaactctgtcttttttggttttgttttgttttggagaggaagtctcactcttgtcccccaggctggagtgcgatggtgcgatctccactcactgcaacctctgcctcccgggttcaagtgattctcctgcctcagcctcccgactagctgtgattacagatgcctgccatcatacctgactaatttttgtgtttttagtagagannnnnnnnnnnnnnnnnnnnnnnnnnnnnnnnnnnnnnnnnnnnnnnnnnnnnnnnnnnnnnnnnnnnnnnnnnnnnnnnnnnnnnnnnnnnnnnnnnnnnnnnnnnnnnnnnnnnnnnnnnnnnnnnnnnnnnnnnnnnnnnnnnnnnnnnnnnnnnnnnnnnnnnnnnnnnnnnnnnnnnnnnnnnnnnnnnnnnnnnnnnnnnnnnnnnnnnnnnnnnnnnnnnnnnnnnnnnnnnnnnnnnnnnnnnnnnnnnnnnnnnnnnnnnnnnnnnnnnnnnnnnnnnnnnnnnnnnnnnnnnnnnnnnnnnnnnnnnnnnnnnnnnnnnnnnnnnnnnnnnnnnnnnnnnnnnnnnnnnnnnnnnnnnnnnnnnnnnnnnnnnnnnnnnnnnnnnnnnnnnnnnnnnnnnnnnnnnnnnnnnnnnnnnnnnnnnnnnnnnnnnnnnnnnnnnnnnnnnnnnnnnnnnnnnnnnnnnnnnnnnnnnnnnnnnnnnnnnnnnnnnnnnnnnnnnnnnnnnnnnnnnnnnnnnnnnnnnnnnnnnnnnnnnnnnnnnnnnnnnnnnnnnnnnnnnnnnnnnnnnnnnnnnnnnnnnnnnnnnnnnnnnnnnnnnnnnnnnnnnnnnnnnnnnnnnnnnnnnnnnnnnnnnnnnnnnnnnnnnnnnnnnnnnnnnnnnnnnnnnnnnnnnnnnnnnnnnnnnnnnnnnnnnnnnnnnnnnnnnnnnnnnnnnnnnnnnnnnnnnnnnnnnnnnnnnnnnnnnnnnnnnnnnnnnnnnnnnnnnnnnnnnnnnnnnnnnnnnnnnnnnnnnnnnnnnnnnnnnnnnnnnnnnnnnnnnnnnnnnnnnnnnnnnnnnnnnnnnnnnnnnnnnnnnnnnnnnnnnnnnnnnnnnnnnnnnnnnnnnnnnnnnnnnnnnnnnnnnnnnnnnnnnnnnnnnnnnnnnnnnnnnnnnnnnnnnnnnnnnnnnnnnnnnnnnnnnnnnnnnnnnnnnnnnnnnnnnnnnnnnnnnnnnnnnnataaatatatatcatcctaaattttgtattttttttgagacagggtctcgctctgtcacccatgctaaagtgtagtgacaccacaatgactcattgcagcctcaaattcctgggctcaagtgatcctcctgcctcaacctcccaactagctggggcaacaattgtgcaccacgatgcccagctaattttttttttttaatttgtaaagacatggatctcactgtgttgctcaggctggtctcaaactcctggcctcaagtgatcctcccacctcggcctcccaaagtgctgagattacagacatgagccactgcctggcctacatgttatcctcttttttatttatttttttaatacagatcgggtcttgctatgttgaccagactggtcttgaactcctagcctcaagcaatcctcccacctcagcctcccaaagcactgggattacaggcgtgaaccaccacgcccaacatttttttttttcctttaaacatgttattctgtcaaaggctgttgaataactcagagaagagttgatcagggtctgaacccaaagcaggttaatggcatggagagtgtgaagaaaaggggaccaatttttctgaaggataggtgggaattggaaactcactggaaacacttgtggggagtgagagtgggaggagttcagaaagttttttttccttttttttgagacagagtcttgctctgtcgccaggctggagtgcagtggtgtgatcttggctcactgcaacctgcgcctcctgggttcaagtgattcttgtgcctcagcctcccaagtagctgggattacaggcacgygccaccacacccaactaatttttgtatttttagtagagacggggtttcaccatgttggccaggatggtctcgatctcctgaccttctgatctgcctgccttggcctccccaagtcctgggattacaggcgtgaaccaccacacccggctgatttcagaattttaactaagaccatagagatgctcaacctggtgagagatgcaggaggaaggccggtggtggagtgctgagaggtaacatgatccctgccctttgcttatttatttatttatattattattattattattattattattattatttgagaaagagttttgctcttgttgcccagattggagtgcaatggcacaatctcagctcaccgcaaacttcacctcccaggttcaagtgattctcctgcttcagctcccgtgtagctgggattacaggcatgcgccatcacgccctgctaattttgtatttttagtagagtcagggtttctccatgttgctcaggctggtctcgaactcctgaccacaggtgatctgcctgactcagcctcccaaagtgctgggattacaggcatgagccaccgcgcctggcctacttatttatttttttgagacggagtcttgccctgtcgcccaggctggagtgcagtggcaggatcttggctcactgcaacctacgcctctcaggttctagcaattctcctgcctcagcctccctagtagctgtgattacaggcgtgcaccaccatgcctggctaatttttgtattcttagtagagacgggggtttcaccatgttggccaggctggtctcgaactcctggcctcaagtgatccgactgccctgtcctcccaaaatgctggaattacaggcatgagccaccgcacccagcccccctttccagattcttaacagtccctagatggtattaagtagcatttttgtttgtttgttttttgttttttgagacggagtcttgctctgtcaccaggctggagtgcagtggcacgatcttggctcgctgcaacctccacctcctgggttcaagcaattctgctttagcctcctgagtagctgggactacaggcaatgccaccatgcccagctaattttttgtatttttagtagagatggggtttcaccatgttggccaggatggtctcaatctcttgacctcgtgatctgcccgactcagcctcccaaagtgctgggattacaggtgtgagccaccgcagcggtcctgaggtagatttgtttgtttgtttgtttgtttgagatagggtcttgctctgttgcccaggatggagtgtagcggtgcaatctcggctcactgcaacctccacctcctgggctcaagcaattctcttgcctcagattcccaagtagctggaattataggtacgcaccaccatgcctggctaatttttgtatttttgctagacagggtctcgccatgttggccaggctggtcttgaactcctggcctcaagtgatccacccgcctcggcctcccaaagtgctgggattacaggtgtgagccaccacgccagccaggtgctgggaatctgaaggagggacaatgaccctgcctagggtaggtggagagattgcatagaggcagagcccttggaaagaaacacttgaaggatgaggaagagtttaactgattcagaaaaaggaaaagctcaatgtgggtagagagccaaggacgtttggaagagtgagagatggggtgatgaggccagctgagggaggctttggcagtcaggccagaattcagacttgactctgagttactggggagttcctgaaggattttgagcagtggagttctttggccaggattctgaaggaaaatctctcgggcagtggtgtccaaagacctggagtccttttatgaatccattgtctgagctggaaaatgtatggcttcacccactcccaatcccatcatggcttctggtccacttttttctttttctttttttgaaacagcgttggcctggcatggtggctcacgcccgtaatcccagcagtttgggaggccgaggcgggcagatcacgaggtcaggagatcgaaaccatcctggctaacacggtgaaatctcgtctctactaaaaacacaaaaaaattagccaggcgcggtagcaggtgcctgtagtcccagctactcgggaggctgaggcaggagaatggcgggaacccgggaggtggagcttgcagtgagccgagatggcgccactacactccagcctgggcaacagagcgagactccgtctcaaaaaaagaaagaaagaaagaaaaagaaacagggttttgctgtgttgctcaggctggagtgtagtggtgtgatcacagctcactgcagtcttgatcttctgggctcatgcaatcctcccacctcagcctccccagtagctgggactacaggattgtaccaacatgcctggctaattttttaatgttttgtagagatggtagaggggcacgtccctctgttgcccaggctggtctggaactccttggctyaagctgtcctccctcctccgcctcccaaagtgctgagattacaggcgagagccaccttgcccgtcctgggaactgttttctaatcagctcatcaaaaccttcatctcccctgctaacaaagggagccacttccttcctctctgcacataccccatgtctcaccacgatgatggagctacagtgggacttggaatccagatgtgtgaaggatggagggttgaaggtacgtagacaggtgatgggcaaaggggtccaggaggtggcaaccccaagtgttcttggccttggccttccccacctctctgggactgggccagtttgagcatctcagctgcctcttctgcccgcccccttgttagccgcactcagcttcctgccccaccagaggaagtggggagagacggcaggtgcagtgatggctggcggagtcatggtgagtccttacacccagaaacctgggcatctcggcccccagcccccatgcctggggtccccagaccccactgaytcttcctagcccaggaactcaagtgatcctggggaccctgcctgccattgccagcagcctcatattgtccacccccatccataggacaaggagtacgtgggttttgctgcyctccccaaccagctgcaccgcaagtctgtcaagaaggggtttgacttcacgctaatggtggcaggtctgggggttttggagagggaactgcggaggrgwtgtccttaggaggccctggctgtcccctcccctgaccagttgggcctgttctgtccacaggggagtcaggcctagggaaatccaccctcatcaacagcctcttcctcaccaacctctatgaggaycgccaggtgccagaggccagtggtaagaccctccccaccctcttgaggcagtagcccctgtccccaggttacaccctagtcttttccatctggggactcaggtagttgactgctttttttctgagactttcctcccctgggaaatgggtgcaggcaactgtgatattgacaaaggaaattaattctgcctcagagcctccccggatccctgacctctcccccatcccacagctcgcttgacacagaccctggccattgagcgccggggcgtagagattgaggaaggggktgtgaaagtgaagctgacccttgtggacacacctggctttggggactcagtggactgctctgactggtgaggaagaggaaaggggacagaggctcagcctttcacagtggcgactccctggagagttacaggactggtttgtgctggctccctatctcaaaaggtggtgtctgtttcagagggccactgggtccctgtgcttcttgatgactcacctaggcccccaccagttccccttaatgtctttggagggagccaaagaaatgacattctactcccacagtcctggctagccttgccccctgccctctggcctttgatctctgacctcacatcctctccccacacccagctggcttccggtggtgaaattcatcgaggagcaatttgagcagtaccttagggatgagagtggcctgaaccggaagaacatccaggactcccgagtccactgctgcctctacttcatctcacccttcggccgggggtctggtggggggatcctgggggctggcgcatttagggagggctggggggtctctgccccctgaggctgggcaatgaccaatccctgggtgcaggctccggcccctagatgtggccttcctccgggcagtacacgagaaagtcaacatcatcccagtcattggcaaagcggatgctctgatgccccaggaaacccaggccctcaagcagaaggtgtgagtgatgacctctgacctttgaccccatgtgaagccaaacctgatttcagcttagacttctttgatcttgaagtggcctttctggagcatggtgcatcaggctagattgtaggagaagcttctgaggaaggcgggtggtaagccgccagcatagccatgtctctgaaggctcaaaataggctacatatgcagcccccgggctagatgcctggctgaggcctatttgagggcaggagcatagacatgagaacatagtgacttccctctggcccccaccccgtgtcttcagagccctttcccactgtttctgcttatatctctctcggcctctctttctctctctytttttttttagatagagtctcactctgtggcccaggctgcagtacagtggcaagatcagagctcactgcagcctcgaacttgtaggcgcaagtgatcctcctgcctcagcctcttgagtagcagggactatagatgaacaccaccatgcctggctaacttaaaaaatatttttttggctgggcttggtggcagacacctgttaatcccagcactttgggaggctgaggtcagtggactgcttgagctgaagagtttaagacaagccacggcaacatggtaaaaccccatctctacaaaaagtacaaaaaccagccaggtgtggtggtgtgcacttgtagtcccagttactcaggaggctgagatgggaggatcacctgagcctgagaggttgaggctgcagtgaaccaagatggagccactggactccagcctgggtgatagagtgaaaccttgtttcaaaatatatgtgtatatttgttgtagagatgggatctagctatattgcccaggcttctcctggtctcttaatgtctgccccatcttagaatcttgtgtttctcaccatctatgtctctgagattttgtttttgtcttcctgtatgtccatctctccccatctctgtctttcatgtctttctctctgtctctgaccacccagtatctctgtgtctcactgtctctggtcatgaaatgtctgtcattgtggcccgtttcacactgtctctatatctgtttcccctgagatccgggatcagttgaaggaagaggagatccacatctaccagttccccgaatgtgactctgatgaagatgaagacttcaagaggcaggatgcagagatgaaggtgtgggaaacaaagaaggaaggcaggccgggcacggtggctcacgtctgtaatcccagcactttgggaggctgagacgggaggatcccctgaggtcaggagttccagaccagcctgggcaacatggcgagaccccacctctactaaaaatacacaaatttgccaggtgtgatggtgggcgcctgtaattccagctactcgggaggctgaggcaggagaatcacttgaacactccagcctgggcaatggagtgagaccctgtctcaaaaaaaaaaaaaaaaaaaaaaaaaaaaaaaagaggaaggggcaggaagcagaggaggcgggtgtggagattgaagctgggaaagagaaagtttctgccgtgtgagccaatggtgaacccctgccccctgccctccaggaaagcatcccttttgcagtcgtgggatcatgcgaggtggtgagggatggcgggaaccggccggtgaggggacgccgctactcctgggggaccgtggagggtgagtgaggccaggcaggggtcctaaggccagcagggagcccggggcctctgggtcaggcgcactcaacatgtgaagttggggtgggctttggtcccaggggatcctaggaggaaaggggggtcgctgggctgcagaccgcggaccctccgctagagtggcagcaggactttcctgtagacccgacccttacgggtgggttggacccgaaactccctgacgttcgctggtccgcgccgccccccctccagtggagaacccacatcactgcgatttcctgaacctgcgacggatgctggtgcagacacacctgcaggacctgaaagaggtgacgcacgatctgctctacgagggctaccgggnnnnnnnnnnnnnnnnnnnnnnnnnnnnnnnnnnnnnnnnnnnnnnnnnnnnnnnnnnnnnnnnnnnnnnnnnnnnnnnnnnnnnnnnnnnnnnnnnnnnnnnnnnnnnnnnnnnnnnnnnnnnnnnnnnnnnnnnnnnnnnnnnnnnnnnnnnnnnnnnnnnnnnnnnnnnnnnnnnnnnnnnnnnnnnnnnnnnnnnnnnnnnnnnnnnnnnnnnnnnnnnnnnnnnnnnnnnnnnnnnnnnnnnnnnnnnnnnnnnnnnnnnnnnnnnnnnnnnnnnnccggccctaacctcaaggaactggctccgcctcctagaccccaacctcgccccaggccctgcctcctgggcctcacccacaacctcaggtcccgctcctgattcctgtccccttcccactgtcccgcagtaagctttcccgccagagcgccacagagatcccgctgcccatgctgcctctggcggacaccgagaagctgatccgcgagaaagacgaagaggtgagcacgcacctcgcttccccccgaccgatgccccaggtccccctctggcttcgccaggtcaccgcctgcaatctcgccctgcacagctgcgccgcatgcaagagatgctggagaagatgcaggcccaaatgcagcagagccaggcccagggcgagcagtcagacgccctctgaggccacgccccgcccggccttacctcggctccgccttcagtcggcctcttgtccaatccccgcgccccacactgcccagcgccccccgggacctccgcgggtgccgccctcgcgcgggctagggggaggttytcccagcctgagtccgtagccccgccccggcgctggtcccgcccacccagacaccgcccacttcccggcccggggcctgcacaatctccgaccgcatcactgtcttccggagtcccccttcttctcccagactctgtcttcaataaaaactgagcttcccgcggccacgcgagccttctccttccttgcggaaaaaggcggcgggcgtagattgtggggccgacccccgcaggcctccaggccgcatccattcatttgtggggcgctcccacctgaggccctcgcgcagacactctgaaggcgccgcccataagaaacaaagatcagttaaattttattgggagccggggtggaggtcgggccgaacagaagcgtcgggcagcggaggcccgcgggtgcccctactcctggtccttggcgtcgccgtgcgtgatgacgtagcagatgtttttgtagtcgacgttgccgcccacgtcgggggggaaggccgcccacatgttcttgatctggggaaagacgtaggggcgtctcgcacaggcccttagtctccccggccccagcccctttgctgctccggccccgccccggtccccactcacctcctcctgggagaagcggtcacactgcgtggtcagcagctcctccaggctggagagaggtgacacaaggggagttgcgattgggttcctggttcctttccactccctcgcacctcatccccgatgccagccccagcctcccctgaaaacccaggtcactctacttccttcattggcctcccagacactcgcttttgccctctccgcccacatttgctgtgaaaatgcaatcttaccgcccattaccacaatcttaactactcccttacctctggcagtgcctaacccttcgtaggaatttttgggtttttgttygttttgagacagggtctcaccctgtcgcccaggctggaatgcagtggtttgatcacggctcactgcaacctggaactcttgggctcaagggatcttcctgcctcagcctccggagtagctgggactataggtgtttgccaccactcccgcgaatttttttttttcttttttttggagacggagttttgctattgtcgcccaggttggagggcagtggcgtgatcttggctcactgcaacctccgactccagggttcaagcgattctcatgtcccagtctccctagtagctgggactacaggcgcccgccaccacgcccagctaatttttgtatttttagtagagacggggtttcaccgtgttggccaggctgttcttggactcctgacctcacatgatccgcccgccttggcctcccaaagtgctgggattacaggcatgagccactgtgcccggccagcccacgaattttttagttaagtttttagaaacagggtcatgctgtgttatccaggctgatctcaaactcctgtcctcaagtaaatcctcctgcctctgcctcccaaagcactgggattataggcctgagccacagggcccagccttggtagaaatttaaggaggctgtcagtgtgggagcagctggtggagtgggggaagggtcggaagggtgggggagccgatgcttacaacttcttcttgatggtgccctttccctcagggtccaagaccttgaaggctccggtgatcacatcctcagggtcggcacctgtgggggtcagagggcacatgaagctgatgggtccctgaagggtctgggaaaaggcagccggggccttggacccaggacactccactcacccttgagcttctccccgaacatggtcaggaagacggtgaagttgatgggacygctggcttccttcatcatggcatccaactcctcattcttcacattgaggcggcctggagggggttgggggaagcatgggctggagcaggctcctggggccgggcctgcgcttcccactaattcagctgatcccattcatttttcagctgggtagactgaggcccaaggtggagctgacagggctggaacccaaggccactgaatttcctagactctgcagccttgaatattcccacctgggggtagggggctcacccatggctgcgaaggtgtcccgaaggtcctccttgtctataataccatcacggttctggtcgatcacagtgaaggcctggggagggccgtggtggggagggttaggtcccccatggcccagcctcagcatccctaccccaggaggatcagatgctggctctcagccaactgtcctcttccaccccaagcagagaggggaggaaggaattctaaacctttcccctccttcaagcaggtgcacattccagggagagggccagcagggctgcttttggtcagccttccagtttccccgtcccctcacccacctctttgaactcctggatctgagtctggtcgaacatggagaagacgctggagcttccgccctctactgtccttctcttggccctcttgggtgcctggagggtgagggttgaacaaaggggcccatggaccagtccctccacctctctgggggcaatggattaagagtcagaattcttcgagtccctgttcctaaagcagccctttggcctgagtctccccttccttgggacctctttgctgagggggcttgctttgattgcattccccaaattcccgtctgtggctcctgggtctccaactctccatcccccacaatgggtggaagcttccttatcttctcagtgtcctgagcctagctcctctgagcctcagacttgctgtgtgaccccagccactcatttgccctgtttgagcctctacttttcttttctttttttttttttttttgagacagagtcttgctctgtcacccaggctggagtgcggtgctgcgatctcggcttaccgcaacctctgcctcccgggttcaagcgattcttatgccccagcctccgtagtagctgggattacaggcatgcaccaccacgcccagttaatttttgtatttttagtagagacggggtttcgcctgttggccaggctggtctcgaactcctggcttcaagtgatccaaccaccttggcctcccaaagtgctgggattacaggcgtgaaccacagcacctggcctgagcctctactttctcatttgtaaaatgggatgggagttattgcctggctggtgccagagggccttaggaagatggagtacaggaatgaatggatcaggctttgagagggactgggcccctgtgagttgaatgtctgggcggattatcattgattggatcctttaggccatcacacagtctgttttccatcagtgatgccgagaaagagatgagcatccttttaactttttgttggactgggaaccagctactttctttcaaagggtgaggctgccctgaggtctaagggatctgggcaggggttggaggattctcactcaccatgtcttcagtctccggggggcaaggcagcggctccggctggaaagaagcaaggagtcagcatggggcagtccctctggggttatatagtcctgccccagggagcccttaacataccaaggtaaccttagccctgcgggtgcccaccccagataccaaaatagcccaactcagggcctctcctttcttggagggctggcagcagctggagcccagcggggaggaaggggggagcatgtcttgcgatgcatgtctcactagggcctgggcaagaagagatgttctttctcccaaagaggggctggaatgtgccagagtttagaggggacgcaacccaaggcatcgttctgggagataaatgaaccagatcctgtacccctgagtggggtgggctcagatttaaacccagtaaacgtctgggtgcagtggttcacacctgtaatcccagcactttgggaagctgaggcaggaggattgcttgaggccaggagttcaggaccagcctgggcaacatagtgagacccctgtctcccttttttttttttttagacagtctcgctctgtctcccaggctagagtgccagtagtgtgatctcggttcactgcaacctccacctcccctgttcaagtgattctcctatcttggcctcccgagtagctgggattataggtgtgccatgaagccaggctaattttttttttctgtatttttagtagagacagggtttcaccgtgtcggccagagtggtctcaatcttctgacctggtgatccatccacctaggcctcccaaagtgctgggattacaggtgtgagccactgcgcctggcccccgtctctattttaaattaataaaataaacccagtaaacatgtattgaacacacacagtgtgccacgtgctaggctgggctttgtggatgtactttggcagacacaatccctccacccccacatggtggagttcatagtcaagtgtgtgtaagtgtgagggtggtgagaaagagccatctgtggaagctgagggatcaggtgggtctcctacctcccttcaaggagaggggaatttttttttcttttctttctttttttttttttttgagatggagtcttgctcttgtcacccaggtgggagtgcaatggtgcgatctcggcttactgcaacctccgccttctgggttcaagcgatacttctgcctcagcctcctgagtagctgggattccaggcacccgccaccatgcccagctactttttttttttttttttgagatgaagtctcgttttgttatccgggctggagtgcagtggcgtgatcttggctcactgtaacctccgcctcccgggttcaagtgattctcctgcttcagcctcccgagtagctgggactacaggcgcgtgtcaccacgcccgcctaatttttttgtatttttagtagagacggggtttccccgcgttagccaggatgatctcgatctcctgaccttgtgatctgcctgcctcggcctcccaaagtgctgggattacaggcgtgagccaccgtgcccggcatctaattttttgtatttttagtagagatggcgtttcaccatgttggccaggctggtcttgaattccgacttcagatgatccacccgtctcgacctcccaaagtgctcaaagtgctgggattacaggcatgagccaccgcgccgagccaagagggattttttgaggcaagatgctttgtggtctcaggttttgtgctgggccttggtttcccctctgtaaaagggagatgtagttcccatcccacagaacttgccttataactaatagagacaggaatgaatgcagaaactgacataccagagctggtcaggagcccagaagtggagggcgcagcagccctgtctaggagtatgggagtggcttcacgagggccagggagtcaggtgcaggtggaggagcagatgtgctgggcggagggcatggcctgagcaaaggcctggagagcggaagatcagaagtgttcaggtggccagaattgtgatggggctggtgaccagcccctgaggggcctttgccaggcacaggacggagaccctggggaaccttggaaaggtttcatgcagaagaaggatgtgatctagtatgagtctagaatattttctctgggtactggtgtggaggctggaactcaagaggggaggaaaagaccctaaaaggacagccagctggtcactttctgtgaggtgccttgatagccagtggcagctcactttattctggccaagagccagcttggctgattgtgtgactttgatgtaccctctcttctccctctgggcctcagtgacccagtcccctcccatgcagcagaagtctggaaaaatagtggctgaggaagccccaagttggcaaggacaaccatctccttctcctcccgctccctctaggacccgatgtcctgaggaagatgcctccccctgccctgtcccccctcctccaggcccatgccgatacctctaagacattttcttttctgggcactgaggccccagccacctgttgtctctaagaagagagaaggagccaccctaaacttagcagctgcccttagcctcccacaccagcccctccctgcctcagacagcagctgcctcgccttatagggttaccacgggggtccaggccagggaggagcccacttattactgggttctgggagaggaggaggactccaaaaagg

SEQ ID NO: 93747 - DNA, 14305 bp, Homo sapiens
  misc_feature (1)...(14305): n = A,T,C or G
nnnnnnnnnnnnnnnnnnnnnnnnnnnnnnnnnnnnnnnnnnnnnnnnnnnnnnnnnnnnnnnnnnnnnnnnnnnnnnnnnnnnnnnnnnnnnnnnnnnnnnnnnnnnnnnnnnnnnnnnnnnnnnnnnnnnnnnnnnnnnnnnnnnnnnnccaaagttttgggattacaggcataatccaccttgcccggccaaaaaattataatttttaaaaaagatttgcaatgctttgatgagttctgaatgtcagagtgttgcactgtttgcttcttcacattctttgcatttattcattcaacaaacactctctaagactttctttgggccgggcgcggtggctcacgcctgtaatcccagcactttgggaggccgagacgggcggatcacgaggtcaggagatcgagaccatcctggctaacacggtgaaaccccgtctctactaaaaatacaaaaattagccgggcgtggtggcgggcgcctgtagtcccagctacttgggaggctgaggcaggagaatggcgtgaacccgggaggcggagcttgcagtgagccgagatcgcgccactgcactccagcctgggcgacagagcgagactccgtctcaaaaaaaaaaaaaaaaaaaaaaagacattctttgtaccagaccccatgctaagccttgggcacatggagaccagtgaagcggggttccagctgtagggctcacaggtgtcacagaaaacccagaatggtaaatgctagaacagaggaaagaccagggtatgagatcacagaggagagacttcctcttgaagataatagtgtttcttgggcagagaaacagccattccaaagggcaattgagagcagcactgtgttgcctgggctggagtgcagtggccattcacaggtgccatcatagcacaccatggccttgaactcctggactccagtgatcctcctgcctcagcctcccaactagctgggactacaggcttgccccaccaggcatagctctcttgcttttttggcaagagatgatgcactaggccttctcacatttgccccagatacaaagatgaagctttctgtcacttgggatggtggcagctgatgaaggtgtgagggtggtggccataggtgtcatctctcaagtcttctgaggcagagcctgctactcttaagtcccacaggcaagtccaggggaagtggggcttgggaactgaggccatgccgggcctgggtcagggtcagggcgaggtcagggaccggcaatgggggcactcattcagatgctgagccaaggtagtgcaggctcagactgtgggaaggacacttcagaggttccaaacctcttgaatttttttttttttttgagacggaattttgctcttgttgcccaggctggagtgcagtagcatgatcttggctcactgctgtgagacaattttgtctgttgtgttcactgctgtatccccgggtctagcacagtggctggcacagaggaggtcttcagtaagtatttgtgaatgaacccagggagtgttgagcatctataaccaggtatctcaggtaatttttaaccattattttatttcttactagaaaaaatgatgctggccgcggtggctcacatctgtaaccccagcactttcggaggccaaggtgggcggatcacctgaggtcaggagttcgagaccagcctggccaacatggtgaaaccccatctctactaaaaatacaaaaaattagctgggcatggtggcaggcacctgtaatcccagctactcaggaggctgagacaggagaatcgcttgaacttggggcgcggaggttgcagtgagtcaaaattgtgccactgcactccaacctgggcgacagagtgggactccgtctcaccaaaaaataataaaataaataaataaatgagattatcccatttttgctaatttaaaaaaaaacatacatacacagcacacagggcagggttccccacagggcggagggtgacagggcgccccctggagggtgatgcgtgtaggtggaaaatgtttaaaacaccatccattaaggtatcccaaggatttctctttgggaaatgggatttcaagtcgttttaacattcctcctttttacgaagctgtattttgtgatttttctacaatgacaacagaatgattttacaataagaaaaaaaatggggccgggtgttgtagttcacacctgtaatcccagcattttgggaggctcaggtgagtggatcatttgagcccaggagttggagatcagcctgggaaacatatcaagaccctatctctacaaaaatttagcaggagtggtggtgtgcacctgtagtcccagctacttgggaggctggggtgggaggattgcttgagcccaggaggtcaaggctgcagtgagctatgattaaaccactgcactccagctggggtgacacagcaagaccctgtctcaaaaaaaaaaagggggaaatgggaatagtgtactaaaggtatgtatattttaccacagtaaaaaataagaattttttagatgtactgatccttcaagtgtagtgttataaccccaaatgattatcacaattgggccacatacctgacccaaatgctgttgttgtatgtgaaaagcaaaccaggggctaggactccaatcctgttattcttttcccaacctggagtgcagtggcgcaatccatagcttactgtcaccttgaacttgaactcccaggctcaagcgaggtcttcttgttctttttttttttttgagatggagtctcactctggcacccagactggagtgcattggtgcgatctctgctcactgcaaccttcgcctcctgggttcaagttatcctcctgcctcagcctcttgagtagctgaaattacaggcatgcaccaccatgcccggctaatttttgtatttttagtagagacagggtttcgccatattggctaggctggtctcgaactcttgacctcaggtgatccgctcacattggcctcccaaagtactggtattacaggcgtgagccactgcgctcggccacaaatagtaaaacatagctcaatggatctctcagtgagaaataagaaaagaacaaaaggaatgcttccaggtgctgaggctgcagccctcagggtcacccttgagaggcccctatgggtcacctgcacagaggcacatgcatgtgtcattctgagcacagcagtttggtcactggccaaggcaaattcgtgactttctttgcactggcccaagtgaatattgctccaagtagaagcaacagggaactgtatggatgaaaaccttcccccaaagacctctgcttcctagaagggcatggagtagaggttatgagtattatcaaggaggcccctcagccaggtgcagtggctcatgcctgtaatcccagcactttgggaggctgaggcaggaggatcacctgaggtcaggagttcgagaccagcctggccaacatggtgaaaccccatctctactaaaaatacaaaaattaggcaggcatggtggcaggtgcctataatcccagctactcgggaggctgaggcaggagaatcgcttgaacctgggaggcagaggttgcagtgagctgaggtcaagccactgcactccagcctgggtgacaaaagcaaaactctgtctcaaaacaaaacaaaacaaacaaacagaaacaacagagcagcccctgctctgcagagcttacaaacgagggggccagacagataggcatggcattatcacatgattaaagaattacagggccaggcgcggtggctcatgcctgtaatcccagaactttgggaggccgaagggggcggatcatgaggtcaagagatcaagaccattctggccaacatggtgaaaccctgtctcactaaaaatacaaaacattcgttggttgtggtggcgggtgcctgtaatcccagctacttgggaggctgaggaaggagaactgcttgaacccgggaggtggaggttgcagtgagccgagatcgcaccactgcattccagcccgggtgacagtgcgagactccatttcaaaaaacaaacaaacaaaaaaaagaattgcaaattgtactaagtgcagagagggagaagtccaaagaactaagagaatgtataaccagcaccacctgacctagtcactttttaactcaggtgaggtgattacagacataatacaatgttttcctctttcccttagagatatgaggatcctttccctgtacaataggcttaacattttgcaaaacacttttcagctgaggtttcctatggcccttccactagatcctaagcagagattgtgaccctggtttaacagaagagaagactaaggtgcagagaggctagatcacttcctcaaggtcagccagctcactgacagcaatgcagacatcatacaaggtcttttgctttcactgtattttcccactccatcatgctttctttttgcatgttttttaaattctgaaatatagcatacctacaaaaatagtgtgggaaaatatctatgtgcagtttttttttttttttttttttgagacagagtctcgctctttcacccaggctggagtgcagtggtgcagtcttggctcactgcaacctctgcctcccaagttcaagcaattctcctgcctcagcctcccgagtagctgggattataggcgctcaccaccatgcccggctaatttttgtatttttagtagaaacggggtttcaccatatagatcaagctggcctcgatctcccaacctcgtgatccacccgcctcggcctcccaaagtactgggattacaggtgtgagccactgtgcccggccccgaaaatatctatgtacagtttaaagaacaaccatgtaccacgtacccaccaccagcccaatgaacagaattaaacatagcccagaagctccctatgtagccctccctagacatagcccctatgctgagtcttctattcattttcttgtcttttaaaaaagtttttattggctgggtgtggtggcttatgcctgtaatcccagcactttgggaggccgaggccagcagatcacttgaggtcaggagtttgagaccagcctggccaacgtggtgaaatcccgtctgtactaaaaacgcaaaaataagccgggtgtggtggcgcacacctgtaatcccagctattcaggaggctgaagcaggagaatcacttgaacctgggaggtggagtttttaatagatattggcaaactgcccttcatggctatataagatatatatatatatttatttacagagatataggaattttagaatagaccagtcctatgtaacccactctgttccacagatggatgagtcaaccgacgcggagagtgactccacacaaagctggtgggaaacaccattagaatccatgcaggtgtctggacttccagtcctaaatctctctttttgtgtgtgtctgtgtgtggggggggtgtttgtttgtttgttattgttgtttgttttagagacaggttcttgctctgtcgcccagactagagtgcagtggcgcggacgcagctcactgcagcctcgacctcctgagtcctagagttcttgaagttcctgttaacatttcattatattgatgctgcctgcagtttgctaacttaatggtagtagtttaatttctaatttctcatgctttctgttttttcccttgggctattttgccatcctggatcgatcatgtgcgctgtcaagtgacctttgggacaatcctgccgatcatgaggtttgccgagtgaccaatcttccctcgtctacaatttgctggacttggaaaagtgactggaagggagcagagttccgtcagccactgccaagaaaccatttaaattactaagagagcgaaggaaagcacgtgacrttctgcaatcccgttgcaagcggttttgcaagccggaggttgttgcaccttttagagtctaggaagcccgcctctcggtggcggagtcgtcattggatgttgcggctgtcaatcgccagggctataaataagggagtccggcggctcctctatcaggaagattgtgcatgccgtgggtctgacggcttgagtagcgctagggagaatccctgcaggtaatatttgacttttgcttcatattaatctgagtggaaaataaaagggccctcttctcctctcgcttccctgccgggcaggcgccatggcggaagcctcggcgacgggcgcctgcggagaggcgatggcagcggcggaaggctcctcgggcccggcgggcttgactctgggccggagcttctcgaactaccggcccttcgagccccaggcgttgggcctcagcccgagctggcggctgacgggcttctccggcatgaagggctgaggctgcaaggtcccgcaggaggcgctgctcaaactcctggcgggactgacgcggccggacgtgcggcccccgctgggccggggcctggtgggtggccaggaagaggcgtcccaggaagccggcctgccggcaggagcgggccccagccccacctttccagccctgggcatcgggatggactcctgcgtcatccccctgaggcacgggggcctgtcactggtgcagaccacggacttcttttaccccttggtagaagatccctacatgatggggcgcatagcttgtgccaacgtgctgagtgacctctacgccatggggattactgagtgtgacaacatgttgatgttactcagcgtcagccagagtatgagtgaggaggaacgcgaaaaggtaacgccactcatggtcaaaggctttcgggatgcggctgaggaaggagggacggcagtgaccggtgggcaaacggtggtcaacccttggattataatcggtggagttgccactgtagtatgccaaccaaatgagttcataatgccggacagcgccgtcgttggggacgtgctggtgttaaccaaaccgttaggaacccaggttgctgtcaatgcccaccaatggctggataatsctgaaagatggaataaagtaaagatggtggtctccagagaagaggtggagctggcctatcaggaagccatgttcaatatggctaccctcaacagaactgctgcaggtttaatgcacacatttaatgcccatgcggccacagatatcacaggctttggcattctaggacactcccagaaccttgcaaaacaacaaagaaatgaagtgtcctttgttattcataatctgccaataattgccaagatggctgccgtcagcaaggccagtggacggtttgggcttcttcaaggaacctcagctgaaacctctgggggattactgatttgtctgccaagagaacaggcggctcgcttttgttctgaaatcaaatcctccaagtacggagagggtcaccaagcgtggatcgttggcattgtggaaaagggaaaccgaacggcccggatcattgacaagccgcgagttattgaagtcctgcctcgtggggccacagctgctgttcttgctcctgacagttcaaatgcctcctctgagcctagctcgtgagatgaaagaacagaagttgtttggaccttagagccattgtccacaatcacggatggttctcaagagttgattgtaagaaatttccaaagaaggctgcctgcatagtggttccggctgccctttctaggtgattggaatcagcccatctaaagcagtctttatatgcattccgaggccagagtaacattttgaactttggggggatatttgttcatcacttgggtagaagaggagcaaaaatacytctgttttctcttgccaaagtaagatgaagctattccaggttgagggatttttctttgcacggggttgattaatttctgcacagggagtgagattattaaagtaacacacacacaaagtaaattgcaaaatgaaaaaaattagaagcaaatgagttttggaccaatattgttgataaatctaaattgttaagagagatcttataatgcaacatcaaattctttattcaattttactgaagtactggctctttcctgctctggacaagaattgagcaacttgtctgatgactgggaaaggaggacctgcaaccatctgacttggtctctgttaatgacgtctctccctctaaaccccattaaggactgggagaggcagagcaagcctcagagcccaggcctcagtggtcattaagatgttaagtcttttgcggcagattcctggtgatttgatcaataaagagtaatttcttgctaaataaataaaagaaaccttgttgaaaaactattctggctaatgtttggtggtttgaaattcaatacagtcttataaaacgaaccagcttatacactgagtctggtatagcagagagagagtgttttccctgatgctggtgaattgggtaatttaacacccagatttagggttgcaccttccccctgaaatgacagaaaaggactcgaagcaggcatacgccccaagggttagagagtgggcaggaaatagcaaaagaaaggtgtcaacaattcttgaaagatggaaaggaggtggaagaggggtaactgacttaaaggaatccttcatagtaggggaagacaagaagcaagaagatgtgcttggaagatggggtaagacctggggataaaacatactgtttgagagtttatacacggtaattcgatctttagcgttctccacactcttatttcacacagccaggtgactgcctctcacctacgcaggtagagttgggagcaccacacacagcagaggatagggagcctaactgaaaaaataaaaatttaaaatgagactgcccagcccccttcctcaattagatattcaaaatactggccaggccagcacggtggctcacgcctgtaatcccagcactttgggaggccgaggcgggcagatcatgaggtcaggaggttgagaccatcctggctaacaagatgaaaccccatctctactaaaaatacaaaaaattagctgggcgtggtggcgggcgcctgtagtcccagctactgggaaggctgaggtgggagaatggcgtgaacctgggaggcagagcttgcagtgagccgagattgcaccactgcactccagtccgggcagcagagcgagactccatctcaaaacaaacaaacaaaaaactggccaggccaggcccagtggctcacgcctataatcccagcactttgggaggccgaggtgggcagatctcttaagctcaggagtttgagttcagcctggccaatatggcaaaactccgtctctactaaaacaaaaaaaaatacaaaaatacccaggtgtgatggcgtgcccctgtagtcccagctactcgggaggctgaggtgggagaaccttgaacccgcaaggcagaggttgcagtgtgcaaacactgcagtccagcctgggcgacgggagtgaaaccctgtctcaaaaaaaataaataaaagcccaaaatcactctaccacaaggcctcctaggtgaaagcctttattgaatgatgttaagcttttttttttttttttccggacaaagtctcactctgttgcccaggcttgnnnnnnnnnnnnnnnnnnnnnnnnnnnnnnnnnnnnnnnnnnnnnnnnnnnnnnnnnnnnnnnnnnnnnnnnnnnnnnnnnnnnnnnnnnnnnnnnnnnnnnnnnnnnnnnnnnnnnnnnnnnnnnnnnnnnnnnnnnnnnnnnnnnnnnnnnnnnnnnnnnnnnnnnnnnnnnnnnnnnnnnnnnnnnnnnnnnnnnnnnnnnnnnnnnnnnnnnnnnnnnnnnnnnnnnnnnnnnnnnnnnnnnnnnnnnnnnnnnnnnnnnnnnnnnnnnnnnnnnnnnnnnnnnnnnnnnnnnnnnnnnnnnnnnnnnntccaacttaaacagaaaaaggaaactcagagggacaatacaggggagtaggaaaaaagataaaaaatatccgcaaagcaatacttaagagaaccagccacttagaatataaagataaagctaaaacttgaaatttttaatagggggctgggtgcagtggctcacatctgtaatcccagcattttgggaggccaaggcgggcggatcacctgaggtcaggagttcgagaccagcctggccaacatggtgaaacccccatctttaataaaaatataaaaattagacaggcttgatggcatgaacctgtaatcccagctactcaggaggctgaggcaggaaaatcacttgaacccaggaggcagaggatgcagtgagccaagatcatgccattgcactccagcctggatgacaaggcaaaattctgtctccaaaaaaaaaaaaaaaatttctaataggagacataaagttgcagaaatttatcagaaagtagccccaaaaggccaggcaccttactcacacctgtaatcccagcactttgggaggccaaggtgggcttgagcccatgagttcaagaccaacctgagcaacgtggcgaaaacctgtctctacaaaaaatacaaaaattagcaggcatggtggtgtgcacttgtagtcccagcttctctggaggctggggtgggaggatcacttgagcctgggagatggaggctgtagtgagccaagattgcaccactgcagtcaccactgcagtccagcctgggtgacacagtgagatcctgtctcaaaaaataaataagccgggcgcggtggctcacgcctgtaatcccagcactttgggaggccaaggcaggcggatcacgaggtcaggagatcaagaccatcctggctaacacggcgaaaccccgtctctactaaaaatacaaaaaattagccgggcgtggtggcaggcacctgtagtcccagctacttgggaggctgaggcaggagaacggcgtgaacccgggaggtggagctggcagtgagccaagactatgccactgcactccagcctgggtgacagagcgagactctgtctcaaaaataaataaataagaaagtagaccatgtagccataaaaaagaatgagttcatgtcctttgcagggacatggatgaagctggaagccatcattctcagcaaactaacacaggaacagaaaaccaaacacttgcatgttctcactcataagtgggagttgaacaaatgagaacacatggacacagggaggggaacatcacacaccagggcccattgggggttgggggcaaagggagggagagcattaggacaaacagctaaagcatgcggggcttaaaacctagatgacaggttgataggtgcagcaaaccaccatagcacatgtatacctgtgtaacaggcctgcatgttctgcacatgtatcccagaacgtgaagtaaaataaaaaaaaaaagtagcccaaaaagatgcacaataaaataaattctataaagatcaaatgaggcaggaggttcaacatctaagcggagttctagaataaggcagtaaagcagatggaagaaaaaatattatccaagttttctagaacttaaaagttgtaaaccacatacctcttgaactcctagcacagtacattttaaaagatccatgctaattttattaaatttcaaaatgccagttatgaagaagagatcctaataataatgaaagcaaatgtttatatagcacatattctgtgcaggaagtaagtgctttatacgtattaacccaatcttctaacaaccccaatttgcaaatgaggaagctgaggtatagggagaataagaaatttgtccaagcttgcatagtcagtcttgtaggcggtctgactccagaacccatgcttctgatcactatgatcacatacaaaggtgtgggaataatgacacacctttgtatgtcatcatgacatcagacttcacaacctcaaattggaagctaaaaaacaataaagcagccaggtgcggtggctcacacctgtaattccagcactttggaaagccgaggcaggaggatcacttgagcctaggagtttgtgaccagcctgggcaatacagtgagatcctatttctacaaaaaaaatagaaaattaagtttagccaggcatggtggcatgcgcctgaggccgaggtgcaaggattgcttgagcaacagagtgagaccctgtctcagaaaaaaaatttaaaaacaacacacacacaaaagcaatgccttcaaaattctgagggtaaatgataatctctgtagaagtctacagcaagccacatttttcaaataagtaaaataaagatatcttggggcatacagggtatcaaaatggcttcatcccatgtactttttctcaagaaactaccagaggatatgctccaacaaaacaaggaagcaggccaggtgcggtggctcatgcctattaatcccagtaccttgggaggccgaggcgggcagatcacgaggtcaggagttcaagaccagcctggccaacatggtgaaaccttgtctctactaaaaatgtaaaaaattagccaggcatggtggtgggtgcctgtaatcccagctacttgggaggctgaggcaggaaaactgcttgaacccaggaggcagaggttgcaatgagctgagatcgtgccactgtactccagcctgggcgacagagcgagattgtttcaaaaaaaaaaaaaaaaagaaaaccccgtctctactaaaaatacaaaaattagccaggcgtagttggtggcgggtgcctgcaatcctagctacttaggaggctgaggcagaagaatcacttaagcccaggaggcggggaggttgcagtgagccgaaatcgtgccactgcactccagcctgggtgacaaagcgtgactctgtctcaaaaaaaaaaccaaaaaatcaaaacaaaacaaaacaaaaagcaaggaagcaaactgagaaagagaaaaacatgagattaaggaaatgcaacccagcacaggagagaggtgaaggtaatagctaaacagtaggcttacagagcaaccagcccacactggacagggagcctggaaggcttccagaaaggccttccagaaaagaaaaatatgaaactgatataatattgatacatttaattgtgtgaaaattgtattggcaggataatcgaatatgtgaaaacaattagtggccaggcatggtggctcatgcctgtaatctcagcactttgggaggctgaggcaggaggactgcttgaggccaggaattcaaaagcagcctgagcaacataatgagactctgtctctaccgaaaaaaaaaaaaaagaatttgtgataatcatttagaaaattagcaaacgactgccaggcgcggtggctcacacctgtaatctcagcactttgagaggctaaggcgggtgkatcacctgcggtcgggagtttgagaccagcctgaccaacatggagaaaccttgtctctactaaaaatacaaaattagccaggagtggtggtgggcacctgtaatcccagctactcgggaggctcaggcaggagaatcacttgaaccctggaggtggatgttacagtgagccgagatcgcaccattgcactccagcctgggcaacaagaacgagactccatgtcaaaaaaaaaaaaaaagagagaaaaaagaaaattcacaaatgacaacaaaaaatgaatcaacacagccaagaataaccctgtaaaataaaccaactaaccaactccagcccaaaacaaccttatagaacaaatgaaatgtagtcatacatttgtatgaggtatagggagaataataattgaacattgactttttttttttgagacagagtctcacggtgttgcccaggctggagtgcagtggcatgatggcgggtcactgcaacctgtgcctcctgggttcaagcgattctcccgcctcagcctcccgagtagctgggattacaggcagacaccaccatgcctgactactttttgtattttcagtagaaacagggtttcaccatgttggccaggctggtctggaactcctgatctcaagtgatccacctgcctcggcctcccaaagtaatcctgggattacaggtgtgagtcaccgtgcctggccaacattgaatatttacatagccagttatgtaaatactattaacatcaacaacaaaaaataggtaaatcaattcaatccatttttctcctgttcaaagtgcagaaacagcttttccagcaatttcccacccctgctacagatctccagcttcatctcatggcactctctctacctctctcactacctgctggcccatcagccttccctgggacttcaaacaaatcaagatcctttgtgcttgcagttc

SEQ ID NO: 93748 - DNA, 14446 bp, Homo sapiens
  misc_feature (1)...(14446): n = A,T,C or G
nnnnnnnnnnnnnnnnnnnnnnnnnnnnnnnnnnnnnnnnnnnnnnnnnnnnnnnnnnnnnnnnnnnnnnnnnnnnnnnnnnnnnnnnnnnnnnnnnnnnnnnnnnnnnnnnnnnnnnnnnnnnnnnnnnnnnnnnnnnnnnnnnnnnnnnnnnnnnnnnnnnnnnnnnnnnnnnnnnnnnnnnnnnnnnnnnnnnnnnnnnnnnnnnnnnnnnnnnnnnnnnnnnnnnnnnnnnnnnnnnnnnnnnnnnnnnnnnnnnnnnnnnnnnnnnnnnnnnnnnnnnacctctacattatagattcacaattcaccatcaaaataaccaaaaagcatttagtgttatataataaaataaaaaatttattcactaatatatggttaaatttaagttaaattatcccaactttatattcctttatcaaagataattataaaaaatagcactttggttttgtacataatttctctgaaaatctcaacacaacttcaagttttaggacagatgactttagggtataagctatacactgagggcacttgggatgctgagtggctgtcttaactagagaatatatttcctttatagcatcatatgttgccatataactcttatttcttaggtttttttccttagagcccatgaacaaaaataaagcaaatgagattgtcagatttgttttgttaatcttgaaggattcaatcatgttggggtacctgctagttaattattcgctcagatctcgaatggaatggtatctcaatgatctaagatggttaagaaagcttagcttatgcaaaggcccatgaacagagtggccatggtggcagggacagtggctctgtatggtcctactgactgctgaatgtccagcccatagcagcagagaccaaagacctcaagtgtggccagcgtggtggctcacgcctgtcatcccagcactttgggaggccaaggtgggcggatcacctgaggtcaggagaccagcttggcctacatggtgaaaccccatctctactaaaaatacaaatacaaaaattagccaggcgtggtggcgggcgcctgtaatcctagctacttgggaagctgaggcaggagactcgcctgaacccaggaggcgaagattgcagtgagtcaagatcgcaccactgcactccagcctgggcgacagaatgagattccttctcaaaaaacaataacaaagacctcaggcccctcccacctggaggagcagcgattcgttcttcccagaaccgacacctactctgaacgcaactttgctcttcctgccaacagctcctccaccagcacctctatcccaagctttcggaatgtcttaccttccactggaccatgataaatactaacgaccggccgggtgtggtggctcacacctgtaatcccaccactttgggaggccaaagcaggcagatcactaggtcaggagtttgaggccagactggccaacatggtaaaaccccatctctactaaaaatacaaaaattagccagacatggtggcacacgcctgtaatcccagctacttaggaggctgagacatgagaatcgcttgaacacgggaggcagaggttgcagtgagccaagatcatgccattgcactctagcctgggtgacagagcgagactctgtctcaaaaaaaaaaaaaatcctaacaacccaccttagagcctactgtgtggcaatgagctcatgttcctgggactcactgtctcccaaacccttgtcagcccaacggaatagtggcacagtctgctgaaggccctgccccrctgccwgctggatgtcagccccttccagggaggggcacttctgctgggatacggcctgtgctgctgtaaggagttggcgctcgagaaacaggctcaccaggaatctcggggatcagttccaggatcctcagtcccacagccccttcccggcttgggccccaacaaagtatttacagagtcatatatttcgtaaaatttgcaaaagtgaaatattttaaacacaaccagctaaaactgtctcttccccctgcaacctgccatcagttacccccatcagttaccccctcccctgctgcatagagctggagggggtgttgtggggtccagctcccgggaggttgagttgaagctacgttttgcttgggcttagcgggaacagtcacttcccgatacagttatgctatcgctagtcattctggtgtagaaatggcttccggaaacacccacctccctcggctgcatgtcatgacacaacaagctgatgaaattggccaagtgccaactcaaagaggatctaagattagtcacaaacaagaaaacccaaactcaaattcatttttttggggcggggggtggttctgggttttttggtttgtttttttgagacagcctggctctgtggtatgggcaggagtaccgtggcacgatcatagctcacagcatcctccaactccctcggctcaggccaccctcccgtctcagtctctcaagtagctggaactacaggcgtgtgccaccatacccagttaatttttaaatttttttttgtagagatagtgtgtcactatgttgcccaggctggtctcggacacctggcctcaagcgatcctcctgcctcagcttcccaaagtgttggattacaggcacgagctacctcacccagccaagccctgaactgttatggctcatatgtggaagaaatttgataagcggtttcctccaatttaatgacaattctaaaaatgtacatattacccaaaggagcttttacctgaaagcaacttaattattagtaataaaattaaattttgatcaaacatgtgagaggagaaactaaatcattttcttggtttttgtttatttgttttttgttttgacagggtctcattctgttgcccaggctggagtgcagtggtgtgaccacagcttactgcagccttgacctcctgggctcaagtgagcctcccacctccacctcccaagtagctgggaccacaggtatgcaccaccatgtccagttaatttttttttttttttgagacagagtctcgctctgtcgcccaggctggagtgcagtggtgcgatttcggctcactgcaacctccgcctcctgggttcacgccattctcctgcctcagcctcccgagtagctgggactacaggtgcccgccaccacgcccggctaatttttgatatttttagtagagtcagggtttcaccgtgttggccaggatggtctcgatctcctgacctcgtgatctgcccgcctcggcctcccaaagtgctgggattacaggcgtgagccaccgcgcccggcccatgtccagctgattttttgcattttttgtagagatggggttttgccatgttgtccaagctgatcttgaactcctaggctcaagtgatccgcctgcctctgcctcccaaaagtgctgggattacaagcgcgagcaccgcgtctgccatattctttctacatatagaaggttacgttataaaaaggtgttgtcatcttaagagagcatcagagaacgcatcaaagaaatgtaggggaaacctgttggagtcaaatatgtcaggcaggttttctgcattttgtgatgtttgtagtatttgacaacttttaaaatgtttgttatgtgttgggacttcttttctcactattcacttagttttggatatacaattttgtcttatgtttcaaaagaagactgcatagaagagttaacagcaggcctgagaagctcttcttcacaggcaagtttgaagagtgggtgtctgggaacttgggtttttcatggttcccccactctctggtaagcgtgtctcactgtgcctagactgtttgtacaaatatggctcatgctgaacacctgtgttgcttctaggggtctggaatttgggcacatgcttggcacagactgtgtatgtgaccagccctccataaaaccccagggcgctgagtgtctaagaagcttccctggcagacagcatttcacacacacggctccagcttcttcccgtggagtccaccaggagaggacgtggccagctcacgcctgatttcctgtggaattcatcccatgcaccttttctctttgctgattcagacttatatcctctctgtgtaataatcttaggcgtgaagacaagtctatagtgagtccttccagcaaatcggttactctggaggggtcttggggatacctctcacggcccctgaatttgtataagctttaggcctccaaaatttgaatcgacccatgtgtgtaccctaaagctggagtacgagggtcagagaaccaaaggtgtgaggtaggagtggccccataatcctaaacctgtaatgctgccaggttggaggcctggttcctgaagatgaatacttccaccagggaacacagcaaaggttccactgatcttgaagtagcggctatcactggcccactttggacaccttaggctgaagaccaacatcgtcctcattgtcctgagttgctacggtcaatgctacacaactggggtgggcagtccacagagctccctgggcgtctagtcttcccgcatgcggcaaggactgtcagtggacaacccagtaatggccatgcgtggtggcgggaggccgaggcaggtggatcacctgaggtcaggagttcaagatcagcctggtcaacatggtgaaaccccatctctactaaaactacaaaaaaaaagttagcagggcatggtggtgcatgcctgtaatcccagctacctgggaggctgaggtaggagaatcgtttgaacccaggaggtggaggttgcagtgagctgagattgtgccactgcactccagcctgggtgacagtgagactccatctccaaaaaaaaaaaaaaaaccttagccaggcatagtggcaggtgcctgtaatcccaccttcccagctacttgggaggctgagatagaagaatcacttgaaccctggaggtggagggtgcagtgcgctgacattgtgccacggcactctagcctgggtgcagagtaagactccatctcaaaaaacaaaacaaaacaaagaaacaaacgaaaaaaacgatgactcagtaagaacagggacagtaagagctcagactgaaaggggaaaagggctccacaataagcagagtggctgtagagcagagggtggggaatccggggtggcaagtggcagagggtggtgacccatcatggcctcagaccagctgcagcagcagggttgtggcttgctcactcactctcatgcctcagtctttcaggagagcttaaccaccttggaggggatgctgtgacaactgaacttgggcccctgcagcagaccacatttccctagcccgcctgctcttcctacagtctaatattgacactcctcccactgaagggtggggtccctgtcctcatcccttaagcctgggcagatctgtctgactgccttgacccacagagtgtggcaggagggacactatgtgacttctgaggttaggtcctaaaaataccatgcacatgttgtccaccttgttgtcctggaaggctacccttggaacccagttgccatactgcaaggaagccctggttgcatggagaagccacatgtaggtgtgctgcctgacaggcacagatgaggtcctggcccgccaccagcatcagccaccaaagatgtgagggagaaagctttaggatggctgcagccccagctaccatctggcagcaactgtaggagagatcctaagtgcaaactatctagctgagcctagataaccccagattgcagcacataataatagaatgatttttattatttgaagccgctgaggttaagtggcaagagataaacagacatacaacccctctctggaaaggatgaggaaatctgcatcctcaaagggaaaagggaggcccacctgactgcagtgtggaagctcggtgtaaagggagggcatgagaggactggagaggtgccaggtgtggaccatcctgggacaccagcctggtcactttcctaggaccgctcaatgccttctcctgtcagtgtcgcaccccactgggttcatccttccactttcacacttggggcgcggggaagggctgaatgcaggcaccactggtcacgagggcgtgactgggcaattcctccttcggcgggcgcccacctcctggcacccgtggcacagctccgggaacggctgcgggcccagccgctgcttccccgatagcgccgccgcagttccccggagacagaagtagagccggaccgccggaaaccgtagatccggggaggtcggggccgcggtgaactccagttcaccaggacaggaagtgacagcggaacgccggaaaccgcagatccacggaggtcagggccgcggagagctgtagttccccggaaccggaagtgatggcgsacctccggaaaccgtagattccgggcggtcggagccgccgggagctgtagttctcycgcggctcagagaagtaggcagagagcggacctggcggccgggcagcatggcggggctggagctcttgtcggaccagggctaccgggtrgacgggcggcgcgccggggagctgcgcaagatccaggcgcggatgggcgtgttcgcgcaggctgacggctcggcctacattgagcagggcaacaccaaggcactggctgtggtctacggcccgcacgaggcgagtgggcgcgcgggatggggaatcgtgtgsccgtgggagctgcggggcagccgggctgagcgctggctcggggacttgaggggcaacggccggcgcgcctcagtctacacagccgatgctcagcaccgcatctcactcggagtaaacgcaagtccttagtgtgctgcgcggtggtcctgcctttctcatcggcctctgtccctgcgccctccttcctctttgcggctcttcaacgtgctaggcactcccccactcgctccctctcctttcagctctactccgacgtcactccttcccagacgaccttattatccacgcggtacttctcgccctacaataaaccctttgttttgtgcacctacaatctcaaatgcctattttgcttaagcattttcccctttgtttcctcgctggaacataagcttcctaaagaaaggaactttacataaaactatctggtttcattactgtgcttccagcgctgtaactgcctggccagcgaaggtattgaaagagtgtttgcttagcgcatgagtgtgggagctctgctttccaggcggagggaaccagaagggcgaagaccacggtggtgaaaacaagcaaggcacttatgcagagcagaaagactgctggtggggaaagaggggataactccaaatcaggttgagggttcccggggaggtgaggacttagggttttgtagagtagggaaatgatttgggatcttatttcatatgtaatgtgaaacctttgtaaggtagttaggatttgagtgtgtaggtgagacagaagcagcgttgatgtttgtaaacttgggttggcagggaatggggcaaggatggacacaaggaagccaattaaaaggtgccagagggcgacacatgcaagacagagagcgcaaaacagggggctttgttttggaggtaacgcagttgccccttgctgaggcattgaaagtggagggagaggcagacccacagaggacagtggagtgtgagctggaaggagtgggcctggctcatgtgtctgtcctcttccagatccggggctcccgggctcgagccctgccggacagggccctagtgaactgtcaatatagttcagcgaccttcagcacaggtgagcgcaagcgacggccacatggggaccgtaagtcctgtgagatgggcctgcagctccgccagactttcgaagcagccatcctcacacagctgcacccacgctcccagattgatatctatgtgcaggtgagccagctgcagccgtcaatccagggagggaagggtgtgatggggttggrgagggagtstgatagactgacaccctgggttccctgcaggtgctacaggcagatggtgggacctatgcagcttgtgtgaatgcagccacgctggcagtgctggatgccgggatacccatgagagactttgtgtgtgcgtgctcagctggcttcgtggacggcacagccctggcggacctcagccatgtggaggaagcagctggtggcccccagctggccctggccctgctgccagcctcaggacagattgcgctgcttgagatggatgcccggctgcacgargacsacmtgragsgggtgttggaggctgctgcccaggctgcccgagatgtgcacaccctcttagatcgagtggtccggcagcatgtgcgtgaggcctctatcttgctgggggactgaccacccagccacccatgtccagaataaaaccctcctctgcccacacacccctcactgtacgttatcacctaacagcacttcagagccatgtgaaggctggcagagcctggtctggtgctggctcctggggatgattagggaccctcgcccacacatgaacggcctatctctgtgtagcctgattcaaaccctgaagagaacagtggattagggggtttctgtaggggaggccctgggtggaaaaagcagcatgtcccagtaaggactcaaggcagctgagcaggaggcagggcctggcaagatgagccaggccattagactgaggaatctgttacccttattccagcacatcgggggccctgagcaaagggctgaggaagaactcagctggctctgggtacccaccctagggatgtgggggccatgtcccacaacctctggactatggtttggagccccctgggcttttcctgctgcttaccttgggctctgaaagtacaacagccaggcatggtggctcacgcctgtaatcccagagctttgggaggctgaggcaggcggattgcttcaggtcaggagtttgagaccagcctggccaacatggcgaaaccccgtctctactaaaaatacaaaattagctgggagtggtggcacatgcctgtaatccaagctactcaggaggctgagacaggagaatctcttgaacctgggaggcggaggttgcagtgagccgagattgtgccactgcactccagcctgggcgacagagcaagactccatctaaaaaaaaataaaagtacaaaaattacctgttnnnnnnnnnnnnnnnnnnnnnnnnnnnnnnnnnnnnnnnnnnnnnnnnnnnnnnnnnnnnnnnnnnnnnnnnnnnnnnnnnnnnnnnnnnnnnnnnnnnnnnnnnnnnnnnnnnnnnnnnnnnnnnnnnnnnnnnnnnnnnnnnnnnnnnnnnnnnnnnnnnnnnnnnnnnnnnnnnnnnnnnnnnnnnnnnnnnnnnnnnnnnnnnnnnnnnnnnnnnnnnnnnnnnnnnnnnnnnnnnnnnnnnnnnnnnnnnnnnnnnnnnnnnnnnnnnnnnnnnnnnnnnnnnnnnnnnnnnnnnnnnnnnnnnnnnnnnnnnnnnnnnnnnnnnnnnnnnnnnnnnnnnnnnnnnnnnnnnnnnnnnnnnnnnnnnnnnnnnnnnnnnnnnnnnnnnnnnnnnnnnnnnnnnnnnnnnnnnnnnnnnnnnnnnnnnnnnnnnnnnnnnnnnnnnnnnnnnnnnnnnnnnnnnnnnnnnnnnnnnnnnnnnnnnnnnnnnnnnnnnnnnnnnnnnnnnnnnnnnnnnnnnnnnnnnnnnnnnnnnnnnnnnnnnnnnnnnnnnnnnnnnnnnnnnnnnnnnnnnnnnnnnnnnnnnnnnnnnnnnnnnnnnnnnnnnnnnnnnnnnnnnnnnnnnnnnnnnnnnnnnnnnnnnnnnnnnnnnnnnnnnnnnnnnnnnnnnnnnnnnnnnnnnnnnnnnnnnnnnnnnnnnnnnnnnnnnnnnnnnnnnnnnnnnnnnnnnnnnnnnnnnnnnnnnnnnnnnnnnnnnnnnnnnnnnnnnnnnnnnnnnnnnnnnnnnnnnnnnnnnnnnnnnnnnnnnnnnnnnnnnnnnnnnnnnnnnnnnnnnnnnnnnnnnnnnnnnnnnnnnnnnnnnnnnnnnnnnnnnnnnnnnnnnnnnnnnnnnnnnnnnnnnnnnnnnnnnnnnnnnnnnnnnnnnnnnnnnnnnnnnnnnnnnnnnnnnnnnnnnnnnnnnnnnnnnnnnnnnnnnnnnnnnnnnnnnnnnnnnnnnnnnnnnnnnnnnnnnnnnnnnnnnnnnnnnnnnnnnnnnnnnnnnnnnnnnnnnnnnnnnnnnnnnnnnnnnnnnnnnnnnnnnnnnnnnnnnnnnnnnnnnnnnnnnnnnnnnnnnnnnnnnnnnnnnnnnnnnnnnnnnnnnnnnnnnnnnnnnnnnnnnnnnnnnnnnnnnnnnnnnnnnnnnnnnnnnnnnnnnnnnnnnnnnnnnnnnnnnnnnnnnnnnnnnnnnnnnnnnnaggcgggagagggtccgtagccgcgccgccctgccccgccatgggcctcctgtcggacccggttcgccggcgcgcgctcgcccgcctagtgctgcgcctcaacgcgccgttgtggtgaggacagggcccggggaggcggggacccgagggccctgggctcgcgccggcggccccatgcgcggtccccatcgagggccggggccgctccagctgctcgcgcccctccggctgctcgcgcccttccgctcctgccctctggaagcactgagggtatcaggcccaggcttagggctcgggtccggcgtcccgatgcaggactccgggtttaggtctcccagacccgcgcgatcgaccccgggtgcggaggttgtggcctcgggtcggcgtctgaggacccgctgacgctccggtgcccctccgtcctctctcacagcgtgctgagctacgtggcgggcatcgcctggttcttggcgctggttttcccgccgctgacccagcgcacttacatgtcggagaacgccatgggctccaccatggtggaggagcagtttgcgggcggagaccgtgcccgggcttttgcccgggacttcgccgcccaccgcaagaagtcggggtgagcggcagagcagggcgtatggggcgagcagtggtggctaaggccggggagctctgctcagaggctcccttcgtgtctgcagggctctgccagtggcctggcttgaacggacgatgcggtcagtagggctggaggtctacacgcagagtttctcccggaaactgcccttcccagatgagacccacgagcgctatgtactgggggagtggggtgtgcctgggcccagaaagcaccttggagggaggggtctgggctgggtatcaccttgcgggggtgtcatggggccaggaagctcagtgggagggaaatccctggtgggcactggagggctaggaaagttgtggggggcccttcagccccctaccacaaagttacactgaggctccccccaccgatgctgcatacagatggtgtcgggcaccaacgtgtacggcatcctgcgggccccgcgtgctgccagcaccgagkcgcttgtgctcaccgtgccctgtggctctgactctaccaacagccaggctgtggggctgctgctggcactggctgcccacttccggggtgagtctcagggctgctggccgtggaggggtttggtcagtgccccagaccctgctgatcctgcttctggcctccagggcagatttattgggccaaagatatcgtcttcctggtaacagaacatgaccttctgggcactgaggcttggcttgaagcctaccacgatgtcaatgtcactggtaggttctcttgtcctgcctgccctggtccccctctcagggtcactgtcctcaccacgtcctccattagcactcattcacttgctcctacaggcatgcagtcgtctcccctgcagggccgagctggggccattcaggcagccgtggccctggagctgagcagtgatgtggtcaccagcctcgatgtggccgtggaggggcttaacgggcagctgcccaaccttgacctgctcaatctcttccagaccttctgccagaaagggggcctgttgtgcacgcttcagggcaaggtggggctgcctgcctgcctgagggctgaagggcacagggtctgtgggaggggctgtctcatcctgtcctgcacctctaaagctgcagcccgaggactggacatcattggatggaccgctgcagggcctgcagacactgctgctcatggttctgcggcaggcctccggccgcccccacggctcccatggcctcttcctgcgctaccgtgtggaggccctaaccctgcgtggcatcaatagcttccgccagtacaagtatgacctggtggcagtgggcaagtaagtagtctctggtcccccctttccatgcccaggatggggtctagctggagcggagtgggggatggcctggtggctctggccagccgtgaacctgccccacacctgacagggctttggagggcatgttccgcaagctcaaccacctcctggagcgcctgcaccagtccttcttcctctacttgctccccggcctctcccgcttcgtctccatcggcctctacatgcccgctgtcggcttcttgctcctggtccttggtctcaagatatcctctgccccttgccatctacctgtgaccagcctccagtctcctcaactctaggctggggagagtcttccatcctgatggggggtggggtacgggggtgagccctgggtccccctctgggcagatcccgttacacctcttgttggggtccttgattgggctacgctctggaactgtggatgcagctgcatgaggctggaatgggccttgaggagcccgggggtgcccctggccccagtgtaccccttcccccatcacaggtgatggcacccccttctgttgttggaatgggcttctggggtctgactggtgtttagtgttgcaacttagcctcagctggtgggatggtggtggtctttggggatcccctggccccagggtccatctccaagagcctgtgtgccctgcagggtgtggggctggcctcgctcgtggcacctattgctgatctcacaggccatgggactggccctctatgtcctgccagtgctgggccaacacgttgccacccagcacttcccagtggcagaggctgaggctgtggtgctgacactgctggcgatttatgcagctggcctggccctgccccacaatacccaccggtaagaggctgggctggttgttgggggcaggggtagaggtcccctggacatgcagacagcttgtgggttgcctctgagtcctttgtcttacagggtggtaagcacacaggccccagacaggggctggatggcactgaagctggtagccctgatctacctagcactgcagctgggctgcatcgccctcaccaacttctcactgggcttcctgctggccaccaccatggtgcccactgctgcgcttgccaagcctcatgggccccggtatgtatggatcagccccacttcccccaatgcctgtgccctcatcacagaccgcaccctcattcagtagccctttcccccaacctggtgcccatgcccccaccatggagcctaccttgatgttgcttctccacccaggaccctctatgctgccctgctggtgctgaccagcccggcagccacgctccttggcagcctgttcctgtggcgggagctgcaggaggcgccactgtcactggccgagggctggcagctcttcctggcagcgctagcccagggtgtgctggagcaccacacctacggcgccctgctcttcccactgctgtccctgggcctctacccctgctggctgcttttctggaatgtgctcttctggaadtgagatctgcctgtccgggctgggacagagactccccaaggaccccattctgcctccttctggggaaataaatgagtgtctgtttcagcagctatttgagctcctggcccgctgtccgtgtagggccccagggcatgggggtgagaagcctctgtctgcagggcttggcattcctcacacctcctccctggcaagggctgctgtagtccacttactgggtagcattcctgccgaccagggctctgctgctgcatcaggtgcactctcagccctggcgggtgccatgcaggctcagaggctgtgtgcattgctctgtggtactgtgccaggagcggtgctgggaaggagaatacaccatagccatggtttgagggcctgccaggagctgaggcacccagaaaccacctaacaccatctttactgctaggactgaggctggagctggagccctgcagaggaggcccagggtgcatggcatggggcccaggcaaggccatcgccttggtgtgggattgggatggagcagggaggagcacccggcctggcttcctcagagtt

SEQ ID NO: 93749 - DNA, 13222 bp, Homo sapiens
cagagtctcgctctgtcgcctgggctggtgtgcagtggcacgatctcggctcactgcaacctccaccgcccgggttcaagtgattcttcatcctcagcctgccgagtagctgggactacaggcatgcgccaccaggcccagctattttttttttttttttttttttttttttttagtagagacggggtttcaccatattggacaggctggttcgaactcctgacctcgtgatccacccacctcagcctcccaaagtgctgggattacaggtgtgagccaccggtcctggccctggaatgctctttatacagatatccactctttgcctctttttacccttgtaaggtctttgctcaaatgttgtcttctcaacaaattctgaaaaaattctggcatacccttttaccctacactgttttacttttcaccagagcattttcaccatcagacatactatctattttatatatgcatttgtttgtctttctacctcagccagaatgaaaactccatgaggacagagcatttgaactattcattgatatttatccagagcccagaacagcatccattacagaatagacagtaaatacttgttgaattgatgaaggaataaatgtttacctcattttatcttcacttacaccctataaggcagatattattatccctactttactgatgcagaaagtgaagttcaaatagcttgaataatttgtccaatatcatacatctagtgaatacaagaatcaaaatttgacccccacacctactttcaaagcctgtccttcttctcatgacactgaagaatgaagtatttatcctgcctttcttatatgaactgtgtcactaagtaaccaaatatagatgaagggaagggtctttattgaagtattccaactaacaaatgaagtagaaattagagaattagaacataactattttgcagccactaatctaagcattgagcatcaaaggctgctaacgtcacaaaaatagagacatccagacatatgtgcttgctgatgaatcataccatcctcagtcttgtcaaaaaaaatactgaatctgaatctgaacaaacctctagattggggatttttcaacctcagcactaatgacattgagagggggctaatgcttttctgtggggggagctgtcctgtgcctcataggatgtttaacactatccctgtcctctacccactagacgccagtggcaccacctactccttttcaaaaatcaaaaatgtctccaaacactgccaaatgtcccctgcaaatcacccctggttgaaaaccactcctctagttacaactagcattccacaggtaaaacagaggaccatgttaaactaaactgcatgtatacaatcagcaaaatacagactatgggaaatgtcacacatcaaatgacccagtttcttcaacaaataaatttccaggaaaagaggcagggaagaagggggaatctttggatcaaaatatatagagaagacatttttttaaccaggcaaaactaaactatagggtttacaggtacacagttgggtgataaaattacaaagaaatggaagaaagtgattgttgcaaaagtcccatagggagaagggacgtggttgaagttggaatgcgacacttggttggccttgggacttcttaggtgacatgagattctatttcttgacttcttgacttgggtggtatttaaaagggtgttgaccttataataattcattaagttttatattcattttatcctgttctctttctttttccagtaaaaaaaaaacacataaataagtgaaaactgtaataaataaacagaataatctgccttcccttctacttcagttgagttgaagttctgtgggaactgtccttgagaggagaactttgaatttattgagttcaggtcgatgtttatgttccctcagcccagaggtgtaaatcctcatcaatgtttcagaaatgactttggaaatcatagcaggacttactacaactctccacaagccatatgtgtgatgtccatatcttggagttgaaggaacaactcacatcaaatcagcaaatacctaccagaaagcctgttgtgatccaggcggcctgccagacactgtgagggaagcaaaatgcaaagcagtgaagtcttggcagatgtgagcaaggctcatgagaactgtgtgggctgagtagagatttgtgggacgatgactttaagaaggatttgcaggcccaatagagagacactccacaggtgtatctcctttcttgcaaaagatacgctcctgaagagttctgtcatgattaaatttttataaatttgattatattttctcattgacttacattataatcagagagtggctttatctacattttggattaatcttcaactggcgatggctcccaacagtttaagtttccctgcttctctgtcaagtagttaatagtttataaacaaacatttaaaggcactatttaaaggaacccttgagtgaatccttttgaacaacaaaggattctttggtaagattaataaataatcattagattggaggctcatcaagctttcttaaagtacagcatagctatacgcaagactccagtgtcctttgataggatttcattgcaattatctttttacctaagagtaagaatctattttatgtgtattttaggacaacatcttgcattactggtcttcccactttttccaatagcatttggaagaacatcttgtccagagactcgtgagaaacactactaaatgtagctcatattactgagttgcgtgatgcaataggaccttggctttcaggctgcagtttaaaattacactgtaaaaacaaaatgcttctaagtccaggacagaggtaatttgaaatgactggcctactggttggattctctgggacaaaagatgctcaagctactccccttagaactgcctcttgaaaagtgggctgcctggaaatctcaagtaggtcactggaaagctggaatgagaatggagctcactgaccccacctttgccaaccacatcaccacatctctcccctactcctccacactaccctgcctgtctgcccaccacgactcctcctcacctccctgttttccccatcaccattcaactcttagccctcctgataacttttcttggacaaaccaaaaaagatgttttcctcagtgccaacagcatttcacattggtcaagtcacacttgggtctactacatggcaagagattcccaagctgctagagaatggcaaaatcctagggctgctgatgctcctccagttggtataagtaaggttgctctcgtacttccccttgactggaatttgtggactggtttttaacatgatagctcaccctgctagttacacacacccaaagaaatgtgatttatgttgagtttcagaagggctagctttgttatttctaattgaagaccccatttattttggagtaaatgggtaagggttagttcactttttttgtctttggtgacaagaatataacttataattggtttatttaaaaaatatactggaaataaaaaatggaatacagcacagaagaatatattgagtcagttttattgtagagggaaaaacaatgctctttccaaattcattactgtccactgcttctaggactgcttcctgaggacagacactgtcttccttgctgtgttcaagaaggtttatccataaggcatttatctgagtgtagtgatatggcctaatagggtatagttatggagcacctatagaattctacagctattggcaagcatttcattatagcctttgtggtaggccaaattctaagatgactcccaatgacctacaccctattataatcccttctccctcagcataggcagaacttgtaaattgcatctaaccaatagcatatggcaaagatggagggattctgcagatgtaattaaattgcctaatcagttgacttcattaatcaaaaaagattacactgaataagcctaacctcatcaggcaatgtgtttaaaagagggtctaagaggtcagagacttgaagcagcagagactctgtctccattgctgactttgaaaatgcaagcttcaattaattctacagcctcaagggaatgaattctgccaacaaccacgtgagcttggaagtgaatccttccctaagggagtctccagatgagaactcgacctagccaacaccttgatttcaggcttgtaagacccagagcagagagctcagctaaactgtgacagacttctgacctacagaaactgtaagataataaatggcttttgtttcaagcgtctacgtttgtggtaatttgttatgcagcaatagaaaactaatacagccatgaagaatcaacaatgaaataaaagcctctgctaaatggatccctaatccgtaagaatcagtgagtagataaacaaagaaaaagagcatcacaaaccagaacatgtgcttccactctcacccatcccccatctacctttccatgtctaagagcaaaggatgtagaaaaatggagacaatgtctatttcagaaaggttttccctgccccagcactgttggtttactacagatcattattctacgtccacttttttcttgcaaagagtccacatgtacagcccttaagtgaaaagagataaaagaatcaaatatgcttccaaagaaataagaaaatcctagcctctgtaggtaactataattgcccatgaaatgcatgcaaatatcaaaatcaacccccaagggcaaaaacagaaccaagaatagcattgcaggcagcaaagcaactattgccaatggtgtccatggctgaaaagaaaaggcttaaatgaaaaaaggaagactgcccgttgcatatattagatgcccaggatttgtctgaaatccatttgaatggatgaatgaatgagaattaaaagggattaacgttgcaaaagaacaagaaactagagaaaaatgtagtagtgaccaaaagccaggacaaggtcagaaaaattcttaatgcaagaagccatcgagagttgatgtaaccatagagcagtggttctcaaagtgcggtcccaggaacagcagcatcagtgtcacctgggagcttgttagagatgtaaattatctggcctcaccccagacctactaaataagaaactgtgatgatggggcccagcaactgaagaaacccaggggattctgacacacgctcaagtgtaagaaccactgaccaagaaaaataaagaaatcctgtggagatggtttgaaagaaaagcccaagggtcttaaccctggctgcacatcaaaatcagctgaggacctttaaaattacgaatacccaagctggtccatcaccagagattcagatttaactactgtgagataggaaccaggcatctaaattatttaccagctctccaggcgattcaaatgtgcagccagggctgggaagctttaatgtaaaaggtgaagcagtgtgagagggccacattcaagattgctacataaatgacctctaaaagaaggtttgactcttcagatatggtgttctgctgcctccaaagtattcacacatatattctcagctgtcaacacgtctacgctttagcacagggcatggaaattgcttttattcagcagcacagaaaaaataacacttttcacggtccctgctcaccttctgtgctggttttgtacaagcaacactttccctccctgccctcagtatatggggtgcccctaagaaacaggaagagaagctgcactttcttctattcatggtagcagcagtcaccacagggtcaccaccttacttgacccacggacctctctgaggacccagtatacacaggcagatgtcccaagacgtctagatatcccttcaactctaagctacacagtccctcagctactctgagggcatcttctcctgaacctggaaggcgaatgaggatctccagctgagagggacaataaaagaggctttcaggtagagaaacccgggaccgggatcatggcagctgagacttggaacgtggccgaagcagaggccccgcagccccagaagcgctactaccggcaatgtgctcaatccaaccccatggcagaccacacgctgcgctatcctgtgaagccagaggaaatggactggtctgagctatacccagagttcttcgctccactcactcaaaatcagagccacgatgacccaaaggataagaaagaaaagagagctcaggcccaagcggagtctgcagacataggctgtggctatggtggcctgttagtggaactatcaccactgttcccagacacactgattctgggtctggagatccaggtgaaggtctcagactatgtacaagaccggatttgggccctacgcgcagctcctggaggtggcttccagaacattgcctgtctctgtagcaatgccatgaagcaccttcctaacttctacaaggccagctgacaaagatgttcttcctcttccccgacccacatttcaagcagataaagcacaagcggcaaatcatcagtcccactctgctagcaaaatatgcctacgtgctgagagttggggggttggtatatacgataacccatgtgctggagctacacgactggatgtgcactcattttgaagagcacccgctgtttgagcgtatgcctgtggaggacctgagtgaagactccattgtgggacatctaggtacctcaactgaggaggggaagaaagttctacgtaatggagggaagaatttcccagccatctttcgaagaatacaagatcccgtcctccaggcagtgaccccccaaaccagcctgcctggtcactgactgcttactctaccttagctggaccttgtcttccagggactagagagaagagcaggatccctgggtcttcccagttgagactgctggagctgagacacagtactctcaaagaaggtggggagctgcccagggcagaacccrctggtgttsatgactacccctggctcctctcaccttgtccctccactcccaacagaaaacaaagcagctgactgaggtggtcaaaggacttcggaccataggggatctttggaaggctgtggggtcttgctctgccttagcactcccttctccttgggagatctctcctcagctggaatgaggaatgtagtccatctaaactgcttgctaggcttaaaaaaaaaaaaaaaaaaaaaagctttcaattacttgggagcacatgaccctccccctcccagggctcagcaatagagtcatttcactgtctgcataacctaagtccacttgggccagtgagtgagagggaacactcagaaaagtttaaacttccaagatagaaactaaacatttaaattgtccaagaacaccacaggatctgtgtacttatatgcaacatacaagcagattccctcccagttatatgcatgtgcatggggcctttatgagttcagctaaaggagatgctccaccactaaatggtacagtagtgacttgattgagcaggttcacaccacacagatgacaagtaggaacaagcaataatgccttgtcccagaacctcagaatgctatatctaatagatgacaatgacaacaatgatggtcaccagattcatcactggaaatttaagttttccaaaaagcttaagcaagcattccttaaagaggctgagagaacctccaagtattttggaatctataagcatgttgtctcaataaaaacgcccaagagtagccaaggggcagatgccagagcaggaaatggagatagggcaggtggagtatcaggtcttacattttttccaaaactgattagacaaattctcatgttcaggactgctacctagagcagcggttctcaactggggtctattttgcaccccaggggacatccggcaatttttggagacatttttgggttttacaatacagtaaaagagtgctactggcatccagtgggtaaaggtcaaggatgctgttgaacatcctataatgcacatgacagcccacgaacaaagagttatccagcccccatgtcattagcaccaggattgagaaaccctgatccagtgaaatgccctctcaacaaacagcagagaaggaaaatagtaatggattttttttccataaaggcccagattctacccacagtttccattagcatcctagaagaacagagcttgttctcttcaaggagacaggtaaattgatcctgacagattatctcacccaccccctgctttcaggaaactcaataactaaatcacccaggacaaataattctatagactcttatcaaatatattcacaaataaaagcccccacagcatccctgtagccacttgttccaatgtttgtcttcctaatggacaaaatgttaggctgaatcatttgaaattgccaacatttgatggattttggccttcaaaatggccatttcatgtggctcaacctaacattattcccttcaacaaaaatgtgtcctacttttagaagccattttcttgtgttgactcttcagtcagcacccaaacaatgaatgttggtgacaatgatacccggccatctgctgtctggtagatactccttccccacccacattcctcacacccagtcttggttggctctttctccagaaaaattattcagtttttttccacatcaattgttacttttttttttttgcacctttagctataatttcattttatctgatgggaaggagctgaaattaagttgctatatattgctatacacatagggccttaatacctgagcagacatgaaagaaaagcccagaaggtctagctttcttgggtcttattttcatatacactgtgatttatttaatataggccttaaatagcatacttttagttaaaagaaaaccagacctcaacctcaaactgctgctgcgtacttaaaagaaggaggaactcaccgttattaaatggctgtgaggtgccaagcagtatgctacaagctttcatatatactatcaatttaatatctaaaacaaggctgtaatgaagaattctcatgccatttcacagaccacaaaactgaggcagctcaacaaggttaaataacacttcagtgctggtttttatgagccatattttacacctatgtccattggataccagtgcccacatttctaccattaccctaagcagactgaaataaaggtctatagagattcagagtttcagaataaccacttgaggaacaccatagtggagcgtccgcttaccagaagaaaaaaacacacatttcatagtgtatatgatctctcaagatatcagcatcatctcctcttctcatttcaagattaaaaaaacaaaacagccagtaaaactgcctgtgagcttttttttaaaaacaagtcttgctatatccgtttttagctgaaaatattattcgttgcttttcattcagctatttcataaaaaaacataaattcactgattaaagatgaaatcatatgtattcttgtcttccaaaaacactgcttaatgtacttaaaattcccctcatgtaaaaaggggtggggagcagcagaagcatttctgcgcaggtgaagggatgagctgcggccaccttgtggctaattgttgaaggaaacacttttctgacaacagaagggacaaaggcagaatgacaccccctcctttggtcccctgcatctgcaaacttgcttattattcttaatcgatttctgggtgcagtaaacgggcatttattgaacagagccatactctccataatgggagacagagaagcagcggggctttgtcaagttctagtcatcaccttcttaaagttttgtagcttagggtgttcgatgcaatctataaggggcatttaaaagcaaatcaaatgtgcttctcatggctgctaaggacttaaattctgctcatcattgggtataatttttcttttttctagaatagcatgtgttatttgcccatgatctgaaataagaatatattgtgtacattgtatgtgaaacagtacatataccatatttacaattatgtatcagtttaaaattttaaaaaacatttctaatgtaaaaagtatctctcaaactgtgtaggttagcttttgatttatatttaaatatgaatcttaagcaaaatagtaaaaataaccatcctgatttagtgtttttctcccatatgtgaattgcatatacttaggtgaggacaataaaatcaactgaactataagcttagaataggcctgagggataatttcacacagcagctttactaatggtacattgttacactgttgcttcaaaacacacacacacacacacacacctctctctctctctctctctctctgacttaggaaacaaatggccaaaaggattcgtactttacctttggagggcctcaaagtgttatttggagttgataatacttcagctaaaaccaagaagaatctgtttttttctgaggagtatcggtagcataactgtgattataaacaaagtacacttaagatatgtatgcaatgactgctatttatacaaaatttaaatctgcaaatggaatcaacatgcttatgggttattaaaattgtctaagttcttagattctgtatagtacacgtgtattgatttacaaataaatgatttattaagtgataaagaagaatatattgtgcacgaatgtgtagtacagtcatcctaaagtaaattcatttacttctaaatgtcagttagacagaaagaatcattgtacctccatgaaaagtcactggtcagaggaaatagagaatctgacttccaccacactccatcactaactagctatgtgactttaattcattcatcctcactttccttatgtgtaaaacctgggattataaaaatcagtagattttcacagacttttagcaatgaagcgctttttttccaaaaagagtttccaaaaccctcatatagcaaagtgaacaagaggcagctgctatggctaaatctgaacaggcatgccagacctacctaccaccaccatccccctcccttccctcttcccatcccaaccccttaacacacttctgcaggatcctgggtgtcagaagttgaagatcattggaccaaactatttctaaagtccctttgtgccctaagtgtctatcaggctaaacgaccaaagttttaaaaaggcaaacgttttatgaagacattttatagacatgcttccaacctttcagcctggaaaagattatgcacactgagcaattagagaacaatttaattctctacattaagctatgtgcccctagctcacaatacaagagaaggtcctttgaagagcactagatgaatcattcttacaaagtacacacagtacttgtggcccaggcagaatcactgattatttcctccagctgccatccccattggcctcatggtggccactgtgcaggctgtgtgaaccaggaaccagataaggcctgatccatcagcgttgatctccactcagaactgtgcttgtgctgatgcctcctttgaacccagtgccttccttactcaattgacaacagctgcctttattagtggctgtttccttgcctgaatgataaaatgtgtttgcatttgccctttagctccaaaacctaattattgagtgatctaaggtggggtgaatcatattatcttgatggactatgaagccccaatggaggacttaatatgagaacaaaattaaattaacagagacttgatggaaattagccaaaggtattcattaagaaagatatctaccattgaagcaaatcaaaaatatttttcaaacaaattataattaattcacttaataattaattcaagcaatttttttgaacatcaactatggtccaggcactgtgttaggtgccaaggatactataaagagtaaaacattgttcctatcctcaagtcgcacacccaagttccccactgccactcatgtaaagaaataagtgagacagagcacggtaagtaccacaattgaggaaaatatagtggggctacaaagacaagagttccaagttcaagctacaaaggttgggagaagtgactcccgaactagtttttaaaggatgaagtggcaaagattgtttctcttttgctcattgtggcagaaaccaccagtgttcctcttctttgggggaacatggccaggttcaaattttaagcttcccttgcagattgctgttagatgttgccacatgactaagttctgaatgtaagctgaagtgatgtgcaccacttccaaacctggcccattaaaaaccctctcacattcaaccttcatccctcttttcccatccaccatttggctgattgaaaaaaaactccaaggatctagacaaaaatagatccacaagatgtgaagagctaaatgcatgccacagagccccctccacactctcattgttaaagaaggtggagggagatatttatagttccagtaaccaagaaatactagcactgaaaaactttgtttgccacacatgagattgatgaataatccagagattattcatgaggcagtgggaaacctttgaattgttttatacaaagaaataacatgatcagatttgtttttaagaaaaaatcaatctggtggcgatatggaacatggatggagaggtaaggcaaaagtagaagcagagagaacaaaacagagttttgtgccatagtaaatgctagagaagatgtgtatttgaactaaatcattagtgatggggatatagaacaaggaaaaggctcgagtgacacttttagaagtaaagacccattaaaacatggttgggccaggtaggagaatcaggagccacatataacttttagattcctggcttttgtgagacttcattcacaaggaaaggaaacacaggtagtgaaggtttgggggacagattaatgagcatttttcatatgttgaatccaacatccaggcagagatatctagaagatagttggatatataggtctagaactcagaagagagatctgaactgaagctcagatttgaaaatcacttgattaacaccattgaatctgatgaggtagcccaaggagaacatgtaaaatgagaaggttaaaatccaaagaatatttaagagagggtgaaagaaaattagctagagaaaaactgagaaagaatggtctgacagg

SEQ ID NO: 93750 - DNA, 15641 bp, Homo sapiens
tttcagccttcatctttctcccatgctggatgcttcctgctcccgaacatcaactccaagttcttcagcttttggactcttggacttacaccagtggtttgccaggggctcttggaccttcagccacagactgaaggctgcactgttggcttcactacttttgaggttttgggacttggactgagccactactgtcttccttgctcctcaacttgcagatggcctatcgtgggacatcaccttgtgatcatgtgagtcaattctccttaataaaatccttttcacatatacatatatcgtattaattttgtccctctagagaaccctgactaatacactatctggttgatgaaataatttgtacaacaaaccccagcgacatgtaatttatccatgtaacaaactggcatatatatgtaccctctgaacccaaaagttggaagaggcaaaaaagaaagcaaacaaaggatagaggaattttttaaaggagatgcactaaaatagcaaaatattgtaattaaatcaaattttattgatagtactttaaatgctaatagactaaacacccccaagtaaaaggcaaagattatgagaatatatacaaaaacaagatctaaatatatgttgtctaaaggaaatgcagtttaactataacagcaaaataggctgaaaataaagggaaagaaaaagatctaccacacaaacagtaagcataagaaagctgtagtggtgatattaatatcagattttgtacttggtggctacaggacattttatgcctctgcctcaggatataaccatgaataaaatgaacaaagttctcaccctttcaaagttaatgttttagtggggttggtaaaagataataaacaaataagtaaaatatggagtatgtgatatggcctagctaatttggacaagcacaacatgattgacagttaagagaagggagttaggagccatgatggtggatttcagtcacagctctgcccacttaaaaactgtgtgaccttagggacaataataatagtatctccctattaaacttgatgtgagaaataaatgtgttagtacatatgaagcactgaaaacagtgcatggctaagagagggaactaccaaagtttatgctgtcatttttattgtggaacaattaatgcagggaaaggagatggggagtgcagaagggatgtgaacttttaaaagtagtataatcattgaagttctcactgatggaaatgacacttgagcaaagacctatttctatgtaaaggattattgtgtgttacagcagaagccagcacaggggaagtgactcactaaaagtcctatgacccgtgatagacctggtatctgaggcctaggtatcagataccgtttctccagtggacttatgaatgtcatctctttctcagacttaatggaaaattgcttctttgacattcaactaaaaggtgaaatgacaaagaaataaaaacacatagaataaaaagctttcaatgataaattctgttcctctaggttttgtttttgttttgttttgtttgggattgttttggaggggggacagggtcttgctttgtcacccagactggagtgcagtggtgcaatcacagctcattgcagcctcaacctccctcgctcaagcaatcttcccacctcagcatcccaagtagctgtgactaggcaggcacatgccaccataccagactaatttttgtatttttgtgtgtgtgtggagacagagtttcattattttgcccaagctagtctcaaactgctggactcaagcaatcttcccgcctcagcctcccaaagtgttgggattacaggcatgagtcactgcacctggcccttcagaagtttttaacatttcattcttactacgaaatgctttttctcacattaacttctttcttcttcttactactctcacaaacatttttgctttccaaactcgattctaaaatccaccatttcacacactctccagacaatatccccaaatcccatagagtatcagtagggtcacaaactttctttttaacaatgatcataaagtcataaatacacattaactggttccaaattctttacagtgaattatattactaatttaattataaaaaggaagggaaagttaaaaaaagactttgcctatccaaaaacagaaaaataattttaaagaaatatgaattatgggaaacaattccagcatattttacaggcagatatttaatattcttaatatataaataagtctgaatacctaaaatagttttattccaagtctgcagtgaaataattcaaataataattctgcattacaaacatataaagactaaggaagaacaaaattataatgtatgtaagcaaaaatacatattaaacaacagaatttattaaccatactatacatatagtgattaaaattttctaaaacaatatataatgtcatctgaacctacctatatagtactaggaacatggaaatatatctagagaatagaaactacattaccaaggatggacatcttgttacataacaggacaagagatttaaaacttttctccaatgaatacttatttctccactgcatttatttttggaacaaatacattaattttgaagtcagcaaaattaaaacgagataaaattttataatattatatatttctcattagaaatgtgaccacaataataattctgtcaaaatgtagttctgtacatgaaaaaatatatatcaaatatacatacatatgcgcacataatttttaaaaagaagttacaaaacattttgcaatatacatctgtatgcaggcatttatgtgtgtgtgtgtgtgtatatatatacatatatatataaaaaaatcatctgtctcacacacacacaaacaaacacacatacacagagagctttctttttatcatggaggaggctgaagaaaacttcctggcacatgatttaatataatttaattacagtaggctctgtctgggccactttatttgccatgtaaaattctagaaagttccttctgatggggcctctccttcccaggcttcctgcttaatgatgtacaagtagccattttggaactggtcactagatggtactgatctctaatttctgatttttccaatgaaaatcaataataatttgggaaaatgaaacaatcttctgctaaaagtcattttgccttgcgagtggtgcaagagtgtgtaaatcaaaataatgatcaaatccctttacttagttttcctttctatggttccacaaatataaatatttcttcttactactctcacaaacatctttactttccaaacttgattctaaaacccaccatttcacacactctcctgacagtatccctaaatcccatacagtatgtagcaatagtggtaacactctgctgtgagggctggggtcagagcaaagagaggagaatgggttcagccactttctataattgtttcattaagtttcacacagttttctggacatgcccaaccgctgaatagtggatttccataatggatttctccagggatgaatcaggttatatagcatttcccgtcttttatatctggctagaatctcagattatctcctccttctactctttccctggataatgcctcttttcccctcgggtctcagtttaaacatcacttcctgtgggaagcttccccaacacatcctaacggttttattaactttacccacctagtaactccaccagcttcaccgtttccagatacactttttcatttgaaaagggtccaatgagtgtgcactcaaaatttctcatggctgtggcttcacacaatggactgatgactctggagctttcaaatgtcttatctaatgattggcccaaggatttgcctattccacttttgagcgggatgcctgggacataggtcagatgagtaacataggtcagataagcccagatagtgaagactacagtggatacttaactcttcaatgcccagacactgaagaacatcttgattacggtatatacttttatgggctttgtttctgaatgtaacaggaattcaccctcaatttaaacaatagagaaaccacattcataaatgtaggggaaaatacaaataacaagctcactgcaacctctgcctcctgggttcaagcgattctcctgcctctgcctcccgagtagctgggattacaggtgcctgccaccacacccagctaatttttgtatttttagtagagacgcagttttgccatgttggccaggctggttctcgaactcctgacctcaggtgatccacctgcctcggcatctcaaagtcctgggattacaggtgtgagccaccacgcctgaccaattagtgatattttaatcagtttctactatcttctaggccccttccttctattcttattaaattctcacaataataataatgtcactagactagtgttatgagaatgttgatagattattctgctgccactactagtttatatgatacttaatagcattgcttcccttctatttctatttaggaggtgaagaatcttttttttttttttttttgagacggagtctcgctctgtcgcccaggccggactgcggactgcagtggcgcaatctcggctcactgcaagctccgcttcccgggttcacgccattctcctgcctcagcctcccgagtagctgggactacaggcgcccgccaccgcgcccggctaattttttgtatttttagtagagacggggtttcaccttgttagccaggatggtctcgatctcctgacctcatgatccacccgcctcggcctcccaaagtgctgggattacaggcgtgagccaccgcgcccggccaagaatcttttaagaaagtggaaagctgctatatttaaatttgtattgcaaaacatttgtgatacagtatttgtaaaattgaggtaaaaaaatttctcaaagtctattttttcatctcgttcttttaataaaggaactatagctgaaaaaaaaaggaataagataaattccctgaagtggaaattgtgggacagaataaatttttgtccagttttgttttgatggaaggtgcatttggaaacagactacattcatttttttaagacaatacaaaaggctgacaaagactcagagcaacttaactgtcatacattgccctggcagggattcaaatggcaaaatgaccttggaaaacaatttggcagtttttataaacaacataaagatagcacttaacccacaatcccactcctaggtattttacctaagagatttgaagacttcataagtttgcataaaaatgtgtacatgaatgttcatagtatcattgttcataatagacaaaagtagaaaaagcccaaatgtctatcaattgatgaatggataaatatatggtattgtaagccatacaatgaaatattaatattattcagccttaagaaggaattaagtgactgatgtatgatacaatgcagatgaacctaaaaaatattaagctaagtgaaagaaaccagaaaaaaacaaaggaatatttcctatgtaattccacttttataacattgtggaaaatataaaactatagagataaaaaatcagattagaggttgccagagactggcgggagggagaaggggattgactacaagagcacaactgggctctaccagtgatagaaatgtttatgcctctgtgatggtcatggttgccaattgtattcatttttcagttatcgaactgaacacctaaaaacaatcagactgacagtaggtaaagtatatcccagtaaccaaagttgagggggcagaaatggaccacatttaagaccagatctgagttgaagaggctgctgaaacactgagagaataccatcagaaacaacaggaaacacttaaaaatagctaagagagcaactgttcacatttggctatttcccttgccctctgtgcaaactttctggttttaaaaataaaataagtaggttcagcggacgcgcgcggcctcgatctctggactcgtcacctgcccctccccctcccgccgccgtcacccaggaaaccggccgcaatcgccggccgacctgaagctggtttcrtggcagcctcaaagaaggcagttttggggccattggtgggggcrgtggaccagggcaccagttcsacgagctttttggttttcaattcaaraacagctgaactacttagtcatcatcaagtrgaaataaaacaagagtccccaagagaaggatgggtggaacaggaccctaaggaaattctacattctgtctatgagtgtatagagaaaacatgtgagaaacttggacagctcaatattgrtatttccaacataaaagctattggtgtcagcaaccagagggaaaccactgtagtctgggacaagataactggagagcctctctacaatgctgtggtgtggcttgatctaagaacccagtctaccgttgagagtcttagtaaaagaattccaggaaataataactttgtcaagtccaagacaggccttccacttagcacttacttcagtgcagtgaaacttcgttggctccttgacaatgtgagaaaagttcaaaaggccgttgaagaaaaatgagctctttttgggactattgattcatggcttatttggaatttgacaggaggagtcaatggaggtgtccactgtacagatgtaacaaatgcaagtaggactatgcttttcaacattcattctttggaatgggataaacaactctgygaattttttggaattccaatggaaattcttccamatgtccggagttcttctgagatctatggcctaatgaaagctggggccttggaaggtgtgccaatatctgggygtttaggggaccagtctgctgcattggtgggacaaatgtgcttccagattggacaagccaaaaatacgtatggaacaggatgtttcttactgtgtaatacaggccataagtgtgtattttctgatcatggccttctcaccacagtggyttacaaacttggcwgagacaaaccagtatattatgctttggaaggttctgtagctatagctggtgctgttattcgctggctaagagacaatcttggaattataaagacctcagaagaaattgaaaaacttgctaaagaagtaggtacttcttatggctgctacttcgtcccagcattttcggggttatatgcaccttattgggagcccagcacaagagggataatctgtggactcactcagttcaccaataaatgccatattgcttttgctgcattagaagctgtttgtttcyaaactcgagagattttggatgccatgaatygagactgtggaattccactcagtcatttgcaggtagatggaggaatgaccagcaacaaaattcttatgcagctacragcagwcattctgtatataccagtagtgaagccctcaatgcccgaaaccactgcactgggtgctgctatggaggcaggggctgcagaaggagtcrgcgtatggagtctcgaacccgaggatttgtctgccgtcacgatggagcggtttgaacctcagattaatgctgaggaaagtgaaattcgttattctacrtggaagaaagctgtgatgaagtcaatgggttgggttacaactcaatctccagaaagtggtgaccctagtatcttctgtagtctgcccttgggcttttttatagtgagtagcatggtaatgttaatcggagcaaggtacatctcaggtattccataaaacctaccaaatcatggattcccaagatgtgagctttttacataatgaaagaacccagcaattctgtctcttaatgcaatgacactattcatagactttgattttatttataagccacttgctgcatgaccctccaagtagacctgtggcttaaaataaagaaaatgcagcaaaaagaatgctatagaaatatttggtgttttttttttttttaaacatccacagttaaggttgggccagctacctttggggctgaccccctccattgccataacatcctgctccattccctctaagatgtaggaagaattcggatccttaccattggaatcttccatcgaacatactcaaacactattggaccaggatttgagtctctgcatgacatatacttgattaaaaggttattactaacctgttaaaaatcagcagctctttgcttttaacagacaccctaaaagtcttcttttctacatagttgaagacagcaacatcttcactgaatgtttgaatagaaacctctactaaattattaaaatagacatttagtgttctcacagcttggatatttttctgaaaagttatttgccaaaactgaaatccttcagatgttttccatggtcccactaattataatgactttctgtctggatcttataggaaaggatactttcttttttcttccatctttcctttttatattttttactttgtatgtataacatacatgcctatatattttatacactgagggtagcccatttataaattaagagcacattatattcagaaggttctaacagggctggtcttaagtgaaccactgtgtatataaatatgttggaaaacagctgtatacatttttgggcaacggttatgcataatatttaccaggagaatttttttcttaacaagccaacatttaaaatttatgttttatgtcaataaaagaaaatatactttattgtgacttcaactatatttcttatcccttacatttttatttaattgtcttagcttaaaaaaataagaaactgtggaatactacagtaaatattgttttcaaacacaagcaataattcaaatagttatttttcttttgaattaattgtagacatattttggatcctattgaggggataagaggatgtcaaaaaagttaaatacctaagtagaaaaaaatatagaaataaagccaagaatctctttcagttcaaatgttatcaattgttaataagaaattgctatctgggatgacagaattatctctgcttagtgtcttattataactgaaagaaggtttatcattacaaatgccttccaatgaaaccaagaatttctcaaaatatttaatgtcacatattataagaagttacctaatcctgcttcttaacgtcaatttttaaaaatatcttaaaattactttgttttgcagtaaacagtgaagaaaagattgcctcctaattatttttttcaacragtgctgaatrggaaaacatttatatcttactataaaaggttctgttttgtttggaattaatggtagctttattgactgttctgattgtgctgtttctgaattattgaatctgctaggttttattcatgcagccaccacttaagtgacataaatattatagaaaggtactgtgaaatgatcactttgtggcaggggtacttttaaacataaatgtttctacaaaagtaggttgagttcattgtaaataattgtgaaagccactgttcaaataattttaagattacattaatttttctataaactgcaagatttataaatgtttgaaattgtacacattgatatttaatgacaaatttacttaaaataaattgaccccttgttcttaaaaaataaataaataaaaataaaaaaataaaataaaataaaataagtatattgtaaaaaaatcttaatgataatgactaaaagaatagtaacttaatgtataatttgctgaagagtagaattaaaccaaggatttgagaggagaaaaaagcctgaaagaatttgaaaactgccagaaaaacagaaaaaaagtagggcatagaaaaggtagaaaaatagaaagcacaaaataaaatggtaaaagtaaatccaaatgtataggaaatcatattaagtataaactaactcagtcagtttttaaaaagacaatatctgattgatttttttaagttcagttatacgcaatttacaagagacaccactaaaatgaaatgacacagaaggggaaaacaattctagatacactgagttaacaagatttatagctaaaatatgacagcatagaaattttgaaagtaaagggacagcaaaagacataccagcaaaatactgaacaaaagaaacttagcgtagctatattactatcaggaaaaaaacagtctttaaggcaaaaagcattattaagggtaatgaaggtcagtacagatgaaaggtataattctccaggaaagtatcacagttatatgcttttatgcctcctactaacacagcttcaaacctacagagcaaaaatcaacgaattacaaagagaaattgacatatctaccatttctgagagttcttaacattcctctctcagtaattgatagatcaagcaggcaaaaaaaaaaataagtaaagatatggaaaacttgaaaaacaaaattaacaagcttgatctaatggacatattattctgcaccaactattcaaaaactcaatagaaaggaggcagaacaagatggcagaatagaaaagctccactgactattcccagagcaaggaaccaagttaaaatctacacagaaaaacactttcataagaaccaaaaatcagatgagcactcataatatgcagttttaaattcatatcactgaaagaggcactgaagacatagaaaatcaccaactccacccttccgcaaccctggtcagtagtggtgtggtgcagagagcatctcttggcgctgggggagggagaatacagttgtgtgcaattatgaggcattcaaataagtgctgtcctattagagcagcaaggaaaaccaggacaaacttagctgacagagagagcatttaaatcaacactagctagagtgagaatcacccatcgcagcagtctgaactggagagtccacaaacctcaccacccagggctacagcgctgtctccaagtaaacttgaaagtcagtctaggttataaggactacaactcttagacaagtcctagtgctgaactaggcccagagacagtggactgtgggggtggggggtggggcatgcaaccaactgagaaaccagctgggtcagcctagggagtgctggcatcacctctcccctaaccccaggcttcacagttcatggcttcaaaagagactccttccttctgctttagaagaggagaaggaagagtggtgaggactctgtcttccatctaagataccagctcagtcacagcaggatagggcactgctcagagttacaaagcccccattccaagccctaggtcctggatgacatttctagacacacactgggccagaagagaacccactgccttgaaggaaaggaccaagtccttgcagcattcatcacctgctaactgaagagcccttgggccctgaataaccagcagcaatacccaggtactaaattgaggaccttgggtgagccactgagactagctggcttcaggtgagactcagcacattaccagctgtggtgtctatggggcaaaactctttctgcttgagaaaagcagagggaaaagtaaagggagctttgtcttgtaccttaggtaccagcatgactacaggggagtgaagcaccaagagggctcttggtgtccccagttctaagaatttactctgggaaggtattttggacctttcctgggagagaggggagcccactgccctgaagggtgagtcccaggccaggcagcattctccacaagcggacttaagagctttggggtcttaagggaacatcactggtagtctggcagtactcctcatgaccagaagaagcagcggctatggggtgaggtttctctgcctttggaaaaggaagagaagagtgacaaggactgcatcttgtggtttgactgccagctcagccacaataaaatagaacaccagatagacttctaaggtttttcatcctactccctgactccctgatggcacctgcagacccacccagggcctgggggcctttgctaccctgaagagaagaatattggcttgactggccttgccacctgctaactgtggagccccagggccttgagtgagcataagcagtagtcagagaagggttacagtaggcattgggtgaaactcagcactatgctggtttcaggtctgaccgagcacagtcatagcagtggtggtcacatgggtgttgtgtcactccacccccagctttaggtggctcaaaatagagagagagagagagagagagagagagagagactttataggtttgggaaaaataagggaagaaaacaagactctctgcctggtaatccagagaattctcctggatcttgtccaagaccatcgcggtggtaccatgaagagtctgcaagaaccacagcgttactgggcttggggtgccccctaaagcagatatagcttagctaacaacactcaagtcttttcaaatatctggaaatgcttcccaagaaagacagctaaaaataagcccagacagtgaagactacaatgaatgcctaactcttcagtgcctagacactgaagaacacctactagcatcagcaccatccaggaaaacatgacctcatcaagcaaactaaatgaggcccaggaaccaaacctggagaaacacaggtatgtgacctttcagagaattcaaaatagctatgttgaagaaacttaaagaaattccagataacacagagattgaatcaaaattctattagataaatttaacaaagagattgaaataattaaaaggaatcaagcagaaattctgaagctgaaaaatgcaattggcatactgaagaatgcatcagaatcctttaatagcagaatggatcaaacagaagtaagaactagtgggcttgaagacaacctatttgaaaatacaaagtcagaggagacaaaagagaaaagaataaaaaacaataaagcacacctacatgatctagaaaatatactcaaaagggcaaatctcagagttagtggccttaaagaggaggcaaagaaagagatagaggtagaaaatttattcaaaaggaataataacagagcacttcacaaacctagataaaaatatcaacattcaagtacaagaaggttgtagaacaccaagcagatttaacccaaagaagactacctcaaggcatttaataatcaagctcccaaagatcaaggataaagaaaggatcctaaaagcaccaagagaaaagaaacaaataacatacaatggagtccaatacatctagcaacagacttttcagtggaaaccttacaggacaggagagtggcatgacatatttatagtgctgaaggaaaaaaacttttatcctagaataatatgtccagcaaaaatatcctttaaacatgaaagagaaataaagacttttccagacaaactaaagctgaagagtttcattaacaccagacttgtcctacaagaaatgctaaagaaagtacttcaatcagaaagaaacggacattaatgagtaataatcacctgaaggtataaaactcactggtaatagtaagtacacagaaaaacacagaatattataatactgtaattgtggtgtgtaaactacttttatcctaagtagaaagagtaaatgatgaaccaatccaaaataataactacaataacttttcaacacatagtcagtaaaataagatataaatagatacaaagagattaaaagcaggaggagaaagttaaagtgtggaatttttattagtttcctttttgcttgtttctttatgcaaatagtgttaagttgttaccaggttaaaacaatgggctataagaaggtatttgcaagcctcatgggaacctcaaatcaaaaaccacacaatgaatacagaaaaaaataaaaagcaagaaacaaaatcacatcaccagagaaaattaccttcactagaggaagacatgaaggaaagaaagtgtaggaagagaagaccataagaagccagaaaaccagtaacaaaatggcaggagtaagtccttacttatcaataataacattgaatgtaaatggcctaaactcttcaatcaaaagacatagtctggctgaaaggatgaaaatgcaagacccattgatctgttgcacataagaaacacatttcacttacaaagacacacatagactgaaaataaagagatggaaaaatatattctatgccaatggaaagaaaaaaagagcaggagtcactatacttacatcagacgaaatagatttccagaaaaaaaaactataagaagagacaaagaaggttactatataatgataaaatgttcaattcagcaagaggatataacagttttaaatgtatatgcacccaacactggatcacccagatatataaagcaaatattattagagctaaagaaaaagaaaggccctgatacaatatagctgaagacttcaacaccccactttcagcattggacagatcttccagacaatcaacaaagaaacatcaaacttaatctgcactatagaccaaatagatgtaatagatatttaaagaacatttcatccaatggctacagaatacacattcttttactcagcacatggatcattctcaaggatagaccatatgttgggtcacaacacaagtcttaaaacattccagaaacctgaaattgtatcaagcatgttctctgaccacaatagaataaaactagaaattcaaaacaaggaatttggaaaactatacaaatacatggaaattaaacaatattctcttgaatgacagtaattgggtcagggaagaaataaagaaggaaattgaaaaacttcttgaaacaaatgataatggaaatacaacataccatatcctatgggataaagcaaaagtgatactaagacggaaatttatagctataagtgcctacatcaaaaaagagaaaaaaacttcaaataaacaatctaatgatgcatcttaaagaaatagaaaagcaagagcaaaccaaacccaaaattagtagaaaaaagaaataataaagatcagagcaaaaataaatggatttgaaatgaaaaaaaaacacaaaacatcaatgaaacaaaaagtcagttttttgaaaagttaaaattgacaaaccattagccagattaactaacaaaaagagagagaagatccaaataaataaaatcagagatgaaaaaggagacattacaactgataccacagaaatttaaaggatcattagtggctactatgagcaaaaatataccaataaattggaaaatctagaagaaatgaacaaattcctggacatacacaatctaccaaaattgaaacaggaagaaatccaaaccctgaacataccaatagcaagtaacgagatcaaagctgtaataaaaaaatctcccagtggagaaaagtgtgggatctgacagcttcaccgctgaatttttacaaacatttaaagaacaactaataccaatctgaatcaagctattccgagaaatagaggaggaaggaatactttgaaattaattctatgaggccagtattaccctgattccaaagccagaaaaagacacacaaaaaagaaaactacaggccaatatctctgatggatatgggtgaaaaaatgctcaacaaaatactagcaaaccgaattcaacaatac

SEQ ID NO: 93751 - DNA, 13877 bp, Homo sapiens
tagagtgactttctcttgaggctttcaaaatcttatctgaagttagaactctcatttgttaatattttgactactggtacaaaaatacagtattcaaatatttgaattaaaagataatccaggggctagctgtctatggcttgaaagctaaatccagtctatggcttatttttgcacatcttttgagataagtattttttttttacattttaaagtattatttctaaaaaacacaacaatatgacacagaaactacatggcctaccaagactgaaatacttattgtagggcctgttaaagaaaaatttgctgacctcatattaatttaatacatattattctgctttgcattattgtatacattttttcacccattgcttaatttatttacctacagattgaaaattatggattactttctgatcttactgtatcccttccataaatcatccagctttatgataccatggtttcagtcgggggaacttggcccaaggctcatgtgaatacacaaacatgtatgtgaggtaggagaccagcaggacttgttttctagtcataaccctactgaccaaaacaggatctgatccaaacaggataagatagtgaaactggcagaaaccagcaggtggccgtgagggtgatttctggctgccctcattgcttattagcatgggaccttcccaccagcatcatgacagtttataaatgccatggcaatgaaccagaagtttaccataataaagtaaatagcatattgctatttatttgattaaggatttgtggttgtatattctctctaaaggaatttaatattaattttcttgatgtaagatattatttcttttctgattaaaaagtagtagatgatttttacagaaaattgtaaaatatggaatagcagaataaaaacagccaaaatttcacagtgtgaggtaaacatttgttgcacttctatccaatcccttttataactcactcatatcttaaattgtatacatatatcaaatcatcaaattgtacaccataaatatatataattattagttgttaagtaaacatttttaaagaagaaaaaataataaaaatcatcaacaattttgaaacaatatatcaacagaaaagttattctttgtataacgtgacagagttaatactctttgtacacacaaacaaaaacccttgagatgaaaaaaattaaaacagtatggatataacatgataaataaaaataagaataaaatggaaaattagcaccaaaacagttcaaattataaagatatagaaacacttatgcaccttctagtaattttggaatgaaaaataaagcaaaatttaaatggaaactttctccatcaaattagaaaacacttatttttgaataaacaacgaatacccatggatattcttcataatgctgcagttaaatgggcactattataaatctcccattgctgagatttttgtttatgattttctgtgttttgtaatttttctttttttaatttttttattatactttaagttttagggtacacgtgcccaacgtgcagttttgttacatatgtatacatgtgccatgttggtgtgctgcacccattaactcatcatttaacattaggtatatctcctaatgctatccctccccactccctccaccccacaacaggccctggtgtgagatgttccccttcctgtgtccatgtgttctcattgttcaattcccacctatgagtgagaacatgcggtgtttgtttttttgtccttgcgatagtttgcggagaatgatggtttccagcttcatccatgtccctacaaaggacatgaactcatcattttttatggctgcatagtattccatggtgtatatgtgccacattttcttaatccagtctatcattgttggacatttgggttggttccaagtctttgctattgtgaatagtgttgcaataaacaaacctgtgcatgtgtctttatagcagcatgtttttaatcctttgggtatatacccaggaatgggatgtgtttcctgactttttaatgatcgccattctaactggtgtgagatggtatctcattgtggttttgatttgcatttctctgatggctagcaatgatgagcattttttcatgtgtcttttggctgcataaatgtcttcttttgagaagtgtctgttcatatcctttgaccacttgttgatggggttgtttgtttttttcttgtaaatttgtttgagttcattgtagattctggatattagccctttgtcagatgagtagattgcaaaaattttctcccattctgtaggtttgcctgttcactctgacggtagtttcttttgctgtgcagaagctcttgagtttaattagatcccatttgtcaattttggcttttgttgccattgcttttggtgttttagacatgaagtccttgcccatgccaatgttctgaatggtattgcctaggttttcttgtagggtttttatggttttagatctaacatgtaagtctttaatccatcttgaattaatttttgtataaggtgtaaggaagggatccagtttcagctttctgcatatggctagccagttttcccagcaccatttattaaatagggaatcctttccccattgcttgtttttgtcaggtttgtgaaagatcagatagctgtagatgtgcagcattatttctgagggctctgttctgttccattggtctatatctctgttttggtaccagtaccatgctgttttggttactgtagctttgtagtatagtttgaagtcaggtagcgtgatgcctccagctttgttcttttggcttaggattgacttggaggtgtgggctcttttttggttccatatgaactttaaagtagttttttccaattctgtgaagaaagtcattggtaaccgaatccagcagcacatcaaaaagcttatccaccatgatcaagtgggcttcatccctgggatgcaaggctggttcaacatatgcaaatcaataaacgtaatccagcatataaacagaaccaacgacaaaaatcacatgattatctcaatagatgtagaaaaggcctttggccgggtgcggtggctcacgcctgtaatcccagcactttgggtggccgaggcgggtggatcacaaggttaggagatcgagaccatcctggctaacacggtgaaaccccgtctctactaaaaatacaaaaaaaaatagctgggcgtggtggcgggcgcctgtagtcccagctactcaggaggctgaggcaggagaatggcgtgaacccgggaggcggagcttgcagtgagcagagatcgcgccactgcactccagcctgggcgacagagtgagactccgtctcaaaaaaaaaaaaaaaaaaaaaagaaaaggcctttgacaaaattcagcaacccttcatgctaaaaactctcaataaattaggtattgatggcacgtatctcaaaacaataagagctatttatgacaaacccacagccaatatcatactgaatgggcaaaacctggaagcattccctttgaaaactggcacaagacagggatgccctctctcaccactcctattcaacatagtgttggaagttctggccagggcaatcaggcaggagaaagaaataaagggtattcaattaggaaaagaggaagtcaaattgtccctgtttgcagatgacatgattgtatatctggaaaaccccaacgtctcagcccaaaatctccttaatctgataggcaacttcagcaaagtctcaggatacaaaatcaatgtgcaaaaatcacaagcattcttatacaccaataatagacaaacagagagccaaatcatgagtgaactcccattcacaatagcttcaaagagaataaaatatctaggaatccaacttacaagggacatgaagaacctcttcaaggagaactacaaaccactgctcaatgaaataaaagaggatacaaacaaatggaagaacattccatgctcatgggtaggaagaatcaatatcgtgaaaatggccatactgcccaaggtaatttatagattccatgccatccccatcaagttaccaatgtgttttgtgatttttcaacaagcaaaattaaaaacatgatacaaatgaatgtttttcactatgtttaccaagaatttgtatcaatataaagacatatttatgttataatgtatacatttatataaacatgggtctaatcaagaagaatataacattcttcaggatattttctaacttatgtatgctctttttttaattgaactctcaatctatttcccaattactcatctgaaagtaattgggataacatgataaccataactctaaatgttatggtttgtttatagtactgatgatgtattattggttagatatgatggtcacataagaattatcaggatcacaaagtagtatagggatgccagaaatcttgttggcatagaatttggctactttgtcttcctaaatatcctaagctgaaactgaagctgaatagaaaatttaggccaaatatttgtgaaaaagcaaactttgaatggctgcatgcaataaaaaatatgcttggaatgattaaagggacacctgattttaataagaaagaaaaccctgcattctcttgtagtttttaagtagaagacacacagcacttagttccaggtcctgacaggacttaattcacggtcctcacaggatagagtgaagaaaccctcatgaacccgcagacagagatgaccgtggatgattgaggaatctctagctgacttcattgttcactagcacatgacactgtcaccagcaccatgacagtttacaaccgccatggcaatgaaccagaagttcaccctcccctgcccccctgcattactagacagttctaaataactcgcccttcaatttgcattaacctaccccttcatttacatggaactgaaagtgggtataaatgagtataaatacagttgtcaagagcccataggttgctgcctcctggcgcactgcctgtaggttagccctgttcagaaaggagccgtactgttctataaaagtattgctgtctaacaccaccagctcatgcttaaattctctccgaggcaaagccaagaacccccctggaataagctccaactttggggctcgcctatcctacatgagtttcaaggcaataattttcctggtagtccacaattgtgtatttctcaagttgatttgttaataatgtcaaaatctcagaatctttcattctatgtcttggtcaatatgtcatttaagcataatggtgacgtaaaagctgaagtgtaataattgttagtctgactagaagtgcagtaggattattgccctgtaagatcttttattgttacattcactggaagcatggcataaaacccagaatcacagaaaaaagtgattaatcaaagcatgtataaaaattggccaaggtgggaagatcacttgagcccaagaatttgagaccagcatgaacaacatagtgagaccactctctaaaaaataaatgaatcaattgctcaggtgttgtgtccacacctgtagtaccacccacttgggaggctgcaggatgaggattgtttgagcccaggagttgtgccactgccctccagccttggcaacagaacaacatccttaggaaaaagcacgtataaatacagacataaaattccttatttctgtcacaaaagaaatacatcctccactaagggtgacatgggactgtgtgtttccagtgtttcttgatgcaggagattgtttgggcaaagaaacaaaagctctcttaagtccctttctttttactaaaaaatgccctgtggatgcggatacaggtgttatgggatctttggggtgtcgattttctggctggaaacctctgtggctggtggcacctttgttcaagttcttgtcctgcatccaggaagtataaggtacacagacaagtggagggtaaacaagacaaagaggacttttcagtcgggcactgagtggttttttggatcatgtctggtggctccatggattataacagagaacgtggcagcccagagggaatggaccctgatggtgccattgagagcaactgtaatgagatcgttgataactttgatgatatgaatttaaaggagtctcttctttggggcatctatgcttacgattttgagaagtcttctgctattcagcagagagctattattacctgtatgaaagggtatgatgtgattgctcaagctcagtcaggtactggcaagacagccacatttgctatttccatcctgcaacagttggagacccaagcactaatgctggcccccaccagagaactggytccacakatccaaaaggtaattctggcacttggagactatatgggagcaacttgtcatgcctgcattggtggaacaaatgttcaaactgaaatgcaaaaactgcaggctgaagcaccacatattgttgttggtacacttgggagagtgtttgatatgttaaacagaagatatctttttccaaaatggatcaaaatgcttgttttggatgaagcagatgaaatgttgagccatgggtttaaggatgaaatctatgagattttccaaaaactaaatacaagtattcaggttgtgttgctttctgccacaatgccaactgatgtgttggaagtgaccaaaaaattcatgagagatccaatttgaattctggtgaaaaaggaataattgacccttgaaggaatcaaacagttttatattaatgttgagagagaagaatggaagttggatacactttgtgacttgtatgagacaccgaccattacgcaggctgttatttttctcaaggcccaaagtggactggctgactgagaaaatgcatgccagagacttcagtttctgctctgcatggtgacatggaccagaaggagagagatgttatcatgagggaattctgatcagggtcaagccgtgttctgatcactagtgacttgttggctcgtgggattgatgtgcaacaactgtctttggttataaattatgatctacctaccaatcgtgaaactatattcacagaattggcagagggggtctatttgggaggaaaggtgtggctacaaactttgttactgaagaagacaagaggattcttcatgacattgagactttctacaatactacagtaaaggagatgcccatgaatgtggctgaccttatttaatttctgggatgagagttttggatgcagtgtttgctgttgctgaataggcaatgacaatatgcattgtggttctttctttgggactatttggatcttgtctcaatgctcataatggatcagaaatatagattttgatagcaaagctacattagtcttgagctcttgtgaggaaagtcattggcttcatcctctttagagttagactgttggggtgggtataaaagatggggtctgtaaaatctttctttcttagaaatttatttcctagttctgtagaaatggttgtatttgatgttctccatgatttaataatatacttgtggactaaaagatataagtgctgtataaaatcagccaattatgttaaactagcatatctgcctttattgtgtttgtcattagcctgagtagaaaggactttaaaattttttttaggaagcatttgaatgcattttgtttggtattatatttattcagtaaaatatttaattagtgctaagtgtgaactggaccctgttgctaagctccggcaagcaatcatcctaggtagggtttaatccccagtaaaattgccatattgcacatgtcttaacgaagtttgaatgttaagtaaattgtatgttcactttttaaaaaaacaagacatagaggagctttattgagtgttagaacagctcagaggagatccgcagtgggtagttcctctgtaggcaggttgttcactcaagtgttcagctctcagcagagaggaggccctgaagagtgtggctcctctttgcaggcaggtctttccaatgtctgcagctcttagcagggaggaggcactggagagggtagctcctctctgcagctggtcgtcccattgtctctccatcctttgccctgctctggctgagtcccaggcatttacggacctcggaggggagaaagtgcatgtacattggtccatgggtggccatggatcggcccagaaaaggcaccacaagtccacactctggtctctgggattggctgcctggccagtccctggtctgaaggtgggtccttaccagggactgcccccttctgctctggagccggtctgcctcccactgcagtctatggtgcccaggctgctcacaccaaggggcacctgcaggcctccgcccagctgccctcagcacctccttggcttcccctctcatgttcctcaaaaatcaaatgctggagtgtctgaggtggcagggggctggcatgccagtgctggcctggccatgtgcacacttggctgagctgtgacagtgcaggggctcagctcccaacctgctctgaaatcagagtgggtgctgagagcagggagagatcaggcagtgggtgctgacacttccaagtctgcagggacagtgggggccttcctgggcttcagagagtgcaggctgcagacacgcctgggtcttgcacctgggagggcagttgcagctgctcctggggagctcccaacccaccaactctgaaggggtggggctcccacctgtccccagctcctgggtctgcagccatagatcgcttggctgcagctgcacccaggagggcagggatcctgcctgctcacagtccccccaagaggacagggaggcttggatctgtagccacaatatgcctgctccatggagctagaggtctgggtctacagctgctgtttgggcagctgcaggtgcacccaggagctccctccccaactcgtaaaagatggggatcccacttgtccctggctcctgctgcctccacagagcgtgcagccctggctgggcctccctgctgcagccagtgtgatggcagcagctgctgctatcatggtgacagtgaggaaactctggctgtccctgaaagtccctggctcaatgtgcatgttccttcctatgcaagttcctgctgcctgtgggtcttgctgtctgccttctgtccctgcagagctgtgggaggaaatgttgtgacttctttcttgctgactatgacacatcaggtgggtccacagatcagtcctcccagaagttgaagtgtgagtgagtgtgagggaaagtgggcagacttcccatgggttgggccacttggtccgtggcctgacagagagcctcatcctcctactagaagtcagcgacaccaccatgcacttgctcccttgaggggcctggaaaagggaggaacaagggccatagaggggaggagggtcaggtgaacacggagtgagttttgaatggtgatattggggtatttgagtctcagaggcataaaaaaacacacagggaggatggattccaaagtccttagtggggtcctaggaagggatggaggaaagagcagggggaggkgggagaaggagggacaccacagcccttaaggctagcgcacatctcactgcgcatgctatttgggcgcccacctcagtgcacatgttcactgggcgtcttctactctaccccttcgccctcgtggtgaatgccttggagctgtgaggccaagttcctaaggtctagattctttctctcctactgagatgcagcaggtaggtccacaggccaatccaactgggagttgaagtgtgagtgagggtgaggaggagccagtgggcttctggagggtcaccggtgggagggagactcagagggagaagggcctcgaggtcttcattctttatatgtggcactgcagccatgggccttcttttttgtcggggccacaactggggaggaaggagggcctcggcatgggggggactgggttatgatggggtgcatactgggggagctgttggaggtatctgagtcccagaaatgcctcaagcccccaaaagaggacagattgtagactccccaggggggacccaggcagggacggcgtgggtggcaaggaaggggcctgggaactgggaaggctgcgggttggtgacttcagccccgaggtctgtagaatgccaggcacaggtgtccagtgaggagcacccagtgctgtgttgcaacttctcaactccatgaggtttgaatggacggggctttgtggtcgagcaaaacttgattttagggaggaactgggaccaggaaatgggtatgtgacaaacactgtggtcactcccagtttaattctctagttctattttcctacatgtctccatgatggaaattccagctgtgaaaccaaaccacatcagagatatccagtatctcttgccaggagccttaagacattgatagcttgaccaccttaagtgattgtgcaagcattctattcagaagacacacaaacttatacttgccctgggacttaccttcaaagtatttccaaactttaaaaaagtgacacgttaacatttggccatggaagtgctcaaatatagctatcctctcaagtgccatttcccaatcacagtgttctgtattctctttgcagagtgaaatataatttggcgaggaagatcaacatgtaggcctagaccaagacgaagtttacaacctcctgagctgattgggagtatgcgtgagtgctttaacattcgttgttttctattagcagaaattatttttttttgtgatagtgtcattgaactagtatgcatacactgttaaaggtcttccgagctgataaaaaatgatcatggcatctcatgaaggaaagactggtccaagaggattacgttgtgtgtgttttttttggagacggagtcttgctctgtcacccaggctcggctcactgcaacctccgtctcctgggctcaagcaattctgctgcctcagcctcccgagtagctgggactacaggtgcacgccgcctcgcccagctaatttctttttgtattttaatagagacggagtttcatcatgttgcccaggctggtcttgaacccctgagctcaggcaatccgcctgcctcagcctcccaaagtgctgggattacaggcctgagccactgtgcccagcctacattctgattttgcctggatggattccccagattttgcccatgacttcctccgtatgcttattcataacagattgcacacatccatcccaacatagattaaactgccttccaaagcccttgagtgtaactgtcttagagtaacctctctgtgggaagaataactttatgaataataagtatgtggaatagtgttggagaaatgtctttagacttatgatcagaaatatctatgtattctgtatatttgcattattgacatgtatttataacaaaactttttttttttttcccgagatagagtcttgctctgtcacccaggctggagtgcagtggtgtgatctcggctcactgcaacctccgcttcccgtgttcaagcgattctcctgcctcagcctcccaagtagctgggattacaggcatgcgccaccacgcccgggtaatttttgtattcttagtagagacaaggtttcactgtgtttgctaggctggtctcgaactcttgacctcgtgatctgcttgccttggcttcccaaagtgctgggcatgaaccactgcgcccggccaaaactttttatttatacacacacaaccacagtcccaggagcccagtgatgaggagcctcgagaggaaccaccaactgaaagtcgggatcctacacctggtcagaagagggaagatcagggtgcagctgatattcaaggtggtgggaagggaaagaaagaacgtctatggggggaggaggcctatgtgtgcatcatgcattatgccatgaccggtaacaggaggaaagaaaacattaggaaaggatcgcaaacatttgctgaaagttggctggaaaagtgaagagtacagtttacagcttcatgcagtccctggatataaggaatcttctcctaactttgaaatatattttgtgcctccctctccctctccctctccatctccctctccctctccccacggtctccctctctttccacggtctccctctcatgcggagccgaagctggactgtactgctgccatctcggctcactgcaacctccctgcctgattctcctgcctcagcctgccgagtgcctgcgattgcaggcacgcgccgccacgcctgactggttttggtggagacggcgtttcgctgtgttggccgggctggtctccagcctctaaccgcgagtgatccgccagcctcggcctcccgaggtgctgggattgcagacggagtctcgttcactcagtgctcaatggtgcccaggctggagtgcagtggcgtgatctcggcttgctacaacctacacctcccagccgcctgccttggcctcccaaagtgccgagattgcagcctctgcccggccgccaccccgtctgggaagtgaggagcgtctctgcctggccgcccatcgtctgggatgtgaggagcccctctgcctggctgcccagtctggaaagtgaggagcgtctctgcccggccgccatcccatctaggaagtgaggagcgcctcttcccagccgccatcacatctaggaagtgaggagcgtctctgcccggccgcccatcgtctgagatgtggggagcgcctctgccccgccgccccatctgggaggtgaggagcgtctctgcctggccgccccatctgagaagtgaggagaccctctgcctggcagctgccccgtctgagaagtgaggagcctctccgcccggcagccaccccatctgggaagtgaggagcgtctccgcccggcagccaccccgtccgggagggaggtgggggggggtccaccccccgcccggccagccgccccgtccgggagggaggtgggggggtcagccccccgcccggccagccgccccgtccgggagggaggtgggggggtcagcccccccgcctggccagccgccccgtccgggagggaggtgggggggtcagccccccgcccggccagccgccccgtccgggaggtgaggggcgcctctgcccggcctcccctactgggaagtgaggagcccctctgcccggccaccaccccgtctgggaggtgtacccaacagctcattgagaacgggccatgatgacaatggtggttttgtggaatagaaaggcgggaaaggtggggaaaagattgagaaatcggatggttgccgtgtctgtgtagaaagaagtagacatgggagacttttcattttgttctgcactaagaaaaattcttctgccttgggatcctgttgatctgtgaccttacccccaaccctgtgctctctgaaacatgtgctgtgtccactcagggttaaatggattaagggcggtgcaagatgtgctttgttaaacagatgcttgaaggcagcatgctcgttaagagtcatcaccaatccctaatctcaagtaatcagggacacaaacactgcggaaggccgcagggtcctctgcctaggaaaaccagagacctttgttcacttgtttatctgctgaccttccctccactattgtcccatgaccctgccaaatccccctctgtgagaaacacccaagaattatcaataaaaaaataaattaaaaaaaaaaataaaatgtcgcctgtcaagcgactgcttatgaagggttattcctcaactaaatatttctaaatgagtctgaggtctgttggccttcaatctctaccaaaacccagagaacttgatgatgcc

SEQ ID NO: 93752 - DNA, 21622 bp, Homo sapiens
tgcagtggcatgatcttggctcactgcaacctctgcctcccgggttcaagcgattctcctgactcagcctcctgaataactgggactacaagcatgcgctgccaccacacctggctaagttttgtatttttaatagagatgggatttcaccatgttggtcaggctagtctcaaactcctgacctcagatgatccacctgcctccacctcccaaagtgctgggattacaggtgtgagcccccacccctgctagtcctttccttcttcctctttctttctttctttctttctttctttctttctttctttctttctttcttttctttctttctctccttctttctgtctctttctttcctctctcttttttctttctttcctctctctctctgtctctctctttctttcctctctctttttttctttctttcctctctctctctctgtctctctctttctttctttctttttacagacagggtctcacactgttgcactgttgcccaggctggagtacagtggcatgctcatagcccactgcagcctccatctcgatctcccagactccagggattctcctacctcagcctcctgagtagctgggactatagacgtgcaccaccatactcccctaattttttattttttgtagagacagggtctctctatgctgcccaggctgttttcaaacacctgggctcaagtgaccttcctgcctcagcctctcgaagggctgggattacaggtgtgagccattgtgcctggccaagtctcttttttctttccttttcttttctttttcttctttctctcgctctctctcttttttttgaggcagagtctcactctatcacccaggccccaggctggagtgcagtggtgtgatcttggctcactgcagcctccacctcctgagctcaagtgattctccagcctcagccccccaggtggctgggactacaggcatgtgccaccatgcccagctcatttttgtattttctgtagagaccgatttcaccatcttgcctaggctggattcgaacttctgggctcaagcaacctgccaggcttggcccctcaaattgctgggattacaggtgcgagccaccgccaagccacccgcgagcctgttttcttaatgttgtcacaatgttaattaaggaaggaccattcctttccccaccaaagttgctcgtgtggctcttcttctccccaacccaattccccctcatcaccctctttaggggatccctccaccacaaaaccagaatgtaaatgaacacacttgcaaaatctgacctcgctctgatcccagtgtcctgctggtgtgagcctgggctgttgtggccaagatgctgagaggggaggggacgaccacgggggagtattcctgagttttctgcaggagaggaacagaacatatgtcacctctatcactgggtttttccacacgtattactgctattgttatttcaaaatgttcggggccagaagtttctgccaactcctgtaccaaaaaggctcctgtccttccctagtgacagtctccagctctctctgccggccccctccctcccctccctcccctcccccagattctctgcacagtccagagaaatagggcaggcatagagggtgggaagagggcacgcagcctccacaggtgctggcaggaaaggagttttttcgtctttgctggaatacagcagagatccaggctggggagaggtggagcccaggctattgactaacccttcttttgtgtggatttaatctcactctctgggaacacaaaagctggaatctctgcaaacctttccctgaataatctgcgagtcagcggagaatctgcgggtgaggaaagccagggcagatggaggctgggactcccagcgggagggaagtatgtggtgttgggaggaggtgagatggcacagaaagagcactgggaagtggagcaggagaccaaagttctaatcccacctgtactcctctctccttgctgtgaatttgggcaaaccactgccctctctgagccgcagcttcctcttctgtaactcatagaagtaacagaggatccctacctgcttctggggtcgagtgaccctctctgagaatgttccccagtctataaaattaagatcttgatatctatcccgcaccaaaggaaagatcagtccaaccttccaatcctaacagacaagccctgtctggtcccaaacccctctccagcctcacctccatgccttttctcattctgtttccttcacctgcatctcccttccctttttaagttaaagtctacttttctttgaagactcagtgcgggtctgatctcttgagggaggcttccccagtctctttcctacaggctgggttaggggctgctcctctgggctcctgtgctgttctgggcataaggccactgtggccttaacaactaagaattacagctgaggtttactgagcactcagtaagtgtccagacaggcccttcacccagcattaccttgtggaattttaaccacgctcttgtgaaggtattgctggttttctttttttctttttttttttttctttttgagatagagtcttgctctattgcccaggctggagtgcagtgacacaatctcagctcactacaacctctgcctcctgggttcaagtgattctcctgcctccacttcccatgtagctgggattacaggcacccgccaccacacctggctaatttttgtgtttttagtgagacgggggtttctccatcttggccaggctggtctcgaactcctgacctcaagtgatctgcccacctcggcctcccaaagtgttgagattacaggcatgagccactgtgcccggcagctgctgtttttatttctgctgtgttttttgttattttggtttttttttaaaatcatggtcgaaggctggtgattttcctgatcaggacactgagcctgacgggggtgaaagctgagtgtcgggtctgggatgtagaccccgggcagtgtggctcctactcctattctgaccctctgcctgatattctctctgccctcctgcgacgctgagcataaggtatgataggtttctgtttagggcaatgtatttgaccttcccctgagctgtgaacccaggggtgcagggtctcagctccctttgtgcctccactccatggctctcacagttccagcgggagctgcatctgaacctcatgttcccaggtttacagtcagggctctcctccttgcccttgggagcccaggaagagcctggatgtgccagggcccctcbccagtgctaactcaatgttccatcccacccaatgctgcctccacacctgcctagggtcagatttaatccagctaaggggactctgcttagaggtcatggccacatgtgccaatgtgccaagccgtgggcccagcctcctcagactttagctcactgaggcctcagggcaatctttgagagagattgggggatgatttccatttcatagatgaggaaaactgaggctcagctgccatcacagagcaagtggatggagccagaagtgactccagggttatgtgtctcaaagccccttagctttcccatggcctcccttctgttcctgacagggccatgcgtgcaaacatccccagaggacaagagtgtgattaatctttgcatccgccatgggccagtggctacacccaggcactgagaggccggttgtgagagtctgggctgggcaggccctggttcacagcagactccaaataactgtttattggtggaggtcagccgggcagggattaccatctccagtttatagatgaggaagttgcaatcagccgggtgcaggaaagttgcccaaggtcatccgtgagtcagaagaagagcaaagacttgaactcagaacactgggggcctctgcagagtaagaggaaggaggctggggctgctgggctgggctctcccactcaggtggcctgggctggcagctttatgggccctgtaagtcgctgggacatgtcagcactcattccagctctaacgaccctaaatcaggccttgtcccctacaggtaagcagggccccaggtagtctaaatagtgacaggtgactggtttatggcaggccaggactggggtcagggctggagataaggctgagaatgttaagaccaggaacaggaagagagggccactcaccctgtgtaaccttgaagttagagatggcagatggagcaggaaccagtccaccaccccatcgccaatgtgcaggctctgtggtgcccataattaagatgcacccataagagagtgtatagctttacccctcccgcattcctcagaggggatgccctaccagggactcgttctcctcacccatctttatggtcccaaaatgcacccagggcccccctctctcctggggggcctgaatgcaatgaactttaaagtggatcattgatcaacagtcccttaaccccaccaaagtttcccaagcctctcccctgctcatcagggggctggccagaggtcacagggactccctgggggtggtttttattcccaggaacaggcttcctcagtcctgaaagggacatttttatagccctgtgaacacaaatgcactccccagaataggctctgggtgtggaatccctcctgtggctgtcatggtcgcaggctggtgattacattatacagtggtgttgacaatagagccctaagcctggcatggacaccccctcacctccctcctgcctctctgtaggatcaaagctgctctgtgaggctgtgtgatcctgggccaggagcggggagtcagcctcaaccctaagcaaggaggaagcatctttgcctgaatccttctgggggaggcaatcccccttcagaagtccctagcccaggttcgaaggtcggtagggactgagaggttggcagcggatggggagtggctaaaccagaaaaagggggcttcctgttgatggrttgatggaggaggtccaggtccactgcctggttccccgtccctctcccgcaccccagcctgagcttcccaaactcccacagaagcccccaccccatgtgggacacagaggacctgcagtagcaggagggcacagctaagagaggagacaagaggcagcttgggggcatgggggggaccccatttccccaaatgttggagccgcccttaagggaacttcccctggactcctctggaggtcttgccagatgggagaaccaggggtccattcagaccccagtctcttctcttcccatctcatctctccacctggggggctcaaagaacctagctcctcccctttgaccccatcagcttctccctcaccgaatcctcttacaatccatttcttaattctgccccatcaaccctccctggtcatcacataaacaccagcaagggcagtagtttagggacagctttgctctgtattcgaagaaaggtctttggtctgcttagaaattaagtttggagcagcctgggaggaaatagaagagatgagacccagagaatcaatggccactgccaaagagagataggagagcctttctgcggccactgattcaacaaacggcatcacacgcccctcagcctctcatctcttcgaggccatctccacccccacccccacccccaccccaaggccattccaaggtcccattcaagaccactgcgcaggggtggcgccagaatgatcaaagtcatcatggggcactcatctttgtgtgggtcaagcactttgtggtgtcgtgtccctgttcccaaaccagggaccaggagtaggatgggggaggggcagggcgccgctgctgagtggagaggacgcggagtgggtgagggggccttgcgcacagggcaagaggtggccaggcagggcgggggaccggggagagcggaggatttcagatgagggacaggggaaggtggagaggggagggcaggccccgccagggggaggagccgcctcccgcgtccagctgtcggggctccctcccgtcgcggctccgctataaaacccaggccggcaggatcgctgcacccgcggcggcctcctcggtgcgcgacccccggctcasaggactctttgctgtcccgcaagatgcggatgctgctggcgctcctggccctctccgcggcgcggccatcggccagtgcaggtgagctcccgggctccggccccaggtgcccctcggcggtcccctccgtgcccccagctcccgcccctgcagaggatccccccgcgggcgaccggtgagcgtcggtggcgctggggtcccgggttgcgtgtgcgccgggggccgsgagggtgcgggaggactgggcagcgcgcgagcttgtgtgtgcacacgcgtgtcagcaccggctgggggagcgtgtgcacgggtgtgcgcggtgagggtgtgtgcgcgtggcccggcgagacgagttgggagtccctgataaggatgcgtctcaggccgggcgcgggtgctccagcctgaaatgccagcacgttgggaggcagaggcgggtggatcacctgagcccaggagttcgagaccagcatggccaacatggtgaaatcccatctctaccaaaaatacaaacattagccggacgtggtggcacacgcctgtaatcccagctactcgggaggctgaggcccgagaatcgcttgaacccaggaggtggaggttgcagtgagatcacgccactgcactccagcctggtgctccgtttaaaaaaaaaaaaaaaaaaaaaaggatgcttctcggacccgcctmaacgcacgccttyttttctmacccagcctcctccgtctgcccgtgggtttccgtccgtcccgctgggactcagcgctgggtgactgccccgcggccagagcaagggcggtstggcagggtcctggaagccgcgcttcccacacgggttccttgcscctgagggtcgcaagctcccctggcctccctaacctccagcgctgaattgggagcctggcgggggcggggggtgggggacccggagccccaaggcctctgcggagccggtctttccggacagggtgattttcgtttaaagattaatggtgaagccgagctcttaattattcctctaggtgggaggtggcaggaaaggcatgttaatatttgataagaagctaaaggcgcttcaagcggctgggcacagggatccgatcctggaggcaccttctttgcaaccccagaccccatcaccggaagaccccctctgccagttctcagcccaaccacccctcggatggttcttggggtccacgcaggctgaaacctcctctcccaagttaggtgctccatcctcaaagcggcggagtgaggggtgaaggtgtcctctgcacagagaggagccagcgtgtgccctttgcagcagggactggctgagctgtcttagagggtcgaggggcaccttgcagcctctccaccgggcccctgggagaagaaagagaaaaagcagaatgtggaaacttttatttgtagggttggacattggaaacctactaagcagctagaaagtagaaagagaaatgctttgcagttctggtgctttgtagctgtgtggtcttgggtaagtcacttcctgtcccatttgcaaaacaggtgttgtcattctgacttcaggggttttaagcgtttgaataagataatgggtttaagtgattagtgcggtgcctgtgtggcacgtggctggtgtgtcatataccaagtttatggggctctcccccaagcctggggccagtgtcaggaatgtgtctcagctcacccctcacacaagctgctatcccctttagtgccaaggctttctgactgggacctgccttccattcatcttatggaggactcaagctgagaagggaccaggttgcatatggcgacccccagagcatctctgtccattgagacaagaggccgggtgaggatatttggtccccttcagagccccagacccctggccgggagcgactgagactttgcccaggaaacacttgggttgtgctgagctgtttttcaggattatcccctgtccctcagagggggaggtggggtgagcaaggtccattagagaggcttcttcagccatcttgaaataagggggaggggtggcaggtcagtcagtgtggggggcagtagctgggtgacaggcgactgactttcggtctctaacctctggtcagggtggatggactaggtaggatgtggcgctggacaccgagacctctgggtaggtagcccctctccttcccaagccctcttgggagtggcctgagtcagtgggctggtacttacctgcaagggtggccctctcattcaacgaagacaggaacctgagtggtgggtgctcctgccaccagcaccccaccctcatccaccgacatggacctgacccctggccttgacctcaccaccattatgttttcctggctgctgcttcctgaagaaggtagttacaagtgcgttcagccaagcaggtcaaaagtctccatgattaagacagtggatcacaggtcaccactacaaacctaggagctgcggccagagccagggaagaccaaattcctaagaaaagctaagcctggaccagatgggccccagggaggctgtgaggcgagttacagggggctccaccctttgcagctggctcttggggatgctggctgaagggaggcttctcctggaatggctgcccccgggccctccagtcagagaagaggccagcccaatcttcaaaaccccttcctccttcaagacctctgcgggtggggacatgggatgattatggcaaggaactgtcatggtgcaaatgccctctgatttattatctcctyagtcaccagcactgggaatttggtggctgcacctgtcagaggcgtttgaaccagagtgactccattttgggtgagagctaggaaaatgaggccgagatttgctgggctgcattatcagaaagtcaggcatttctagcctctagatgtttgcagttaagggaacaaattaataatatttactacacagacccagacttgggaaggtccagatactccgatatctggagagcaaaggcattcctaattttgctttaaaaataataatgttggctgggcacggtggctcacacctgtaatcccagcactttgggaggccgaggcgggtggatcatttgaggtcaggagttcgagaccagcctggtcaacatggtgaaaccctgtctctactaaaaatacaaagattagctgggcatggtggtacatgcctgtaatcccagttactcaggaggctgaggcaggagaattgcttgaaactgggaagtggaggttgcagtgagccaagagcccaccactgccctccagcctgggcaacagagcgagactctatctcaataataataataatatcaattcttggataatgtagtaattaagaaaattaatcctttatcacaaacccttgtagcagagcacatgtccccatatatacaacgcattgaatgcattccttccttctctgacttttgggaatgtcctactctgtctatggagtagctgtcctttcaccactgtactttcttaataaacgtgcttttcctttgcactgcagactcaacctgaattctctcttgtgcaagrtccaagaaccctctcttggggtctggatcgggacccctttcctgtaacatgccttctgtcagaggaagattatgggactcagaatgtcagataactcccctgtggagactgagcaaaggcagagcgggagctggaggcttcggagctctgccccactgctggggtggcgagtggccactgccctctgcagaatccacccacatgggggtggttcaggtgcagcaactcccagggacagcagagccctgcccggggctggggatgggccatcagggggaggacactgcagctctgaaaaaggcgatgccagcagggaaggagaggcagtgatcagggcagggaaactccaaagcccaaagcagctcttcgtggccagttagttttcctggggatgctccctcatggctccttccccatcctgtccccactccggggactctaccctggcttagactacaagaagatgggactgtgggggcagcccaggcaagaagggagagggtggatgagctcagagacctcagctttggctgagtgggaaccgtgcttttcttaggaatttcctcatcttgatttctttccaagtcacttcatttctctcctctctcggcccctccttggctttggccatctgctcccaaaaggaggccatggggtgggtgggaggggtgggggggagggaaggagttgtcgatgggattttactaagtgccaagccgcctgaaacctcatttaatcctccccaaggccctatgaggtgggtatgtttgtctcatgttacagatgatacaactgaggctcagagagcttaagggacttgcccccaaacccatctaagccccctgagcggctcagccagaattccaagctctggatgagatgttgtgttcgccctgctggtgcagccttttaaaaaaattaatagactttatttttagagcaattttaggctcacataaaaattcagcaggaagtacagagggttcccataggcccttctgccctgcatgcactttcccctcttattaacatcttgcatccatgtgggacatttgaggtgcagcctttttttcagagatgctgggttctattgccctgaggcagagccctcagcctgtccccagagatcaggactgtgcggttgaggggcaggggaggaagcctggctgctttcctcctagcgggagctgtgagacgctagccaagaagggatcttagtaacacagggtgagacattctggggaggggccgcctaatctcctccctcatcttggatctgggaaggctgcccggttgaacctgactctattgtcccaggagcggaggctgggccaagtcctcctcttctcctctcaccagcctcttttccaggtttggggtgggggaggtaagcgcggaggaggctgctggtgaccaaaggatggagtatccaagccagccccatgttagagatgagtggcctcagagggcttccctggagggccagtggctgcttggcctggccctgcctggggaacagagccctatgccagctgacctgttgatcagcccctgcttggttttcaattgagtctctttttctgggccctcaatcctgctgccaggaacactccatcccagcccaagaggggctccaaccccaggggtaggcccagcctctgatcctcctgtgtgtgtgagcaacaagacacacgcacgcacacttcacacccttcctctctgctccagagtcacactggtgctacgaggttcaagccgagtcctccaactacccctgcttgggtgagtacagccagtccaggggactgctctttgtgcatggtgggcaccacgcaagccgaaatggagaccccggaagagtgggaaggggaggggtgatggtggcttcccaggcagatatcagttcccagcatacacacacacacacacacacacacacacwctctctctctctctcacacacacacacacacagatatacaaacacacacactcacacagaaacacacacacaacacacacacaagcacacactcaaacactcacactcacacatgcacacacacactcacactcacacaaacccacactcactcacacacacaaacacacactcacactctcctgtcctggtgctcagggaccagggagcatagagtgacctgagtcttcactggcacctgctgtcatcgagagggcatgttccctgtggaataaatcggtagcagcattaaaggaagaaaggcgttttgctgtttcccataataaaacggggagttgtttctatcccagtgacaccccttgcagggtgcctgagtgatggtcctttacgcttttatttgaatgctgaccaattcgaatgcaaaccctgcagtctgctgtgttttggtgactgagcagtgctgcccgctcctgaccctggcccacctggtgttggggtcaccagggttcggggaaccagctcctccagggttactcctctccctcccattcctcagatgatgctcagcgcccttcatcagcagcccccccgggggtcccactccacagtttccaaagccctctccatccrcctcctttaaactctctgacatcccagggaagcggattatctctgcagttcccattttacatttgggaaacccagggcttggagaggccatgtgcaccacctcatgaagttgtccctaccccggagctcacagtcaacagttggcaaccctgttcccaccctgttccacactggggctagactccccagccttgcatgtatgtttctgtggaggaggaggaggagggcccagggagggcgagagtggagttcggagctgagcatccctgcagcacagccttcaggccaccccaaagcgtttctgtgtgggaactgagtgggtgggcctgacttcagtggggtggtgggggctacaccttggtgccaggcacccgactctcagcccaccttctctccctgctcagtgccagtcaagtggggtggaaactgccagaaggaccgccagtcccccatcaacatcgtcaccaccaaggcaaaggtggacaaaaaactgggrcgcttcttcttctctggctacgataagaagcaaacgtggactgtccaaaataacgggcactcaggtgggctggatggaggccccaggcaggcctgggcacccgagttccccaaggactgagaggatggggctcctcccaggwgggtgtgccagacccaggcccatctgtgctgtgaggtggctgaaaatcccatgggggaggacagcttccaggaggagagagcactctagtatgttttcgttacttttgtcagaccagtctgggatgtgggggcaggaaacgttccaggaagaaggacatgtgcaaaggcgcggaggcatgsaacagctcggcgtgttcagaggactgccaggagctctgtgtggaggaaggacagacagtgaagccaggcagagcccaagcaaggcccaggggcagctgggctggggcccaagggcagatcacccaggcctgaggagtttggacattaccccgaggacaccagggcaccacagaggaggtggacgcagaggaggcaccaggacagagctgcagtttggggcagtggagggtgcaggagagggggaggcaggcagggagaccaaggaggaggccagggaaaggtccggggctgtcccaccctgtcccaccccgcgccacccctgcaggccagaaccagagctcatgaaggttgggaggcaggagacaatgtcccatctgggtgaagctgggatgaagagctagaggaggctgagggaggctggttcgaggactctgccccttctgtgctcccagtgatgatgttgctggagaacaaggccagcatttctggaggaggactgcctgccccataccaggccaaacagttgcacctgcactggtccgacttgccatataagggctcggagcacagcctcgatggggagcactttgccatggaggtgagggccccttcccgactgggaccttgtctgggctctgggcgcgcacctgccttgggcaaggagggtagtccaggcccttcataggtccccttttcacccctccaccccgaccagatgcacatagtacatgagaaagagaaggggacatcgaggaatgtgaaagaggcccaggaccctgaagacgaaattgcggtgctggcctttctggtggaggtgggactcccatcccccacttcccggggaacccggggctgagagcttcttcttaggattcagagacctgggactccagcgaggcaggagggggcggggagactccaacttccgcctctgtttctggggttgcatgtccccgggccaggtggggagcccagagcctcaatcccagaagctgcctggccttccgyccccagatcgggagaatgaactggccaccaccactggctccctgcagactttctcaagacccttccctccctttccaggctggaacccaggtgaacgagggcttccagccactggtggaggcactgtctaatatccccaaacctggtgagtcaggatgggggagaagggcttggggtgaggggggggattcctcccacaaaggaaggggtgggtgtgcggggagctgggctctcagagtgcaggggaagaggggctccttctcccaccctcactgacagtgtcctctgcccctatctcagagatgagcactacgatggcagagagcagcctgttggacctgctccccaaggaggagaaactgaggcactacttccgctacctgggctcactcaccacaccgacctgcgatgagaaggtcgtctggactgtgttccgggagcccattcagcttcacagagaacaggtgcacagggcctggggcagggcatgggctcccactgcctggctccccagaaattatccctctgtctgccctcagaggtccctcaggatacaggtggggagcccaggtaactgaagtccgttgttaatcatcgacattcactgaagacaggcaagaaaagcctgagctgttccatcaccagattgggggctagacaggaggcaggggaaggtggagtcattcagaaaatggtgctggggtttctatcatgaacgaggctctggggagacagcagtgagcccaaaggacccaaatccctacccttgcactgctttcattccaaaacagtggttctcaaagtgcggcccctggaccagtggagtcaacatcatcactgggggaatttgttagaaatgctaatcctcagagctactgaatcaggaactctgggggtggagcccaggcatctggggcccaacaagcccgccccccagctgatgctaacgcatgctcaagtttgagagccacagtcctgtagtaagagtgacaagagaagcaggcattgcgggccccctggggtgtgagtgaaaggaagccaatgggcacttagccttcacccatgccacgcacctcatttacatcccctattcttatcatcttcacgaccaccttgagagccaggggttcagagcccctctttcctaatgagggctcccaggacaggatgaggtgcctgcctgaggtcacacggcagggagtgcagctccccctgccccgacctgctgagccccatcacttccgcagatcctggcattctctcagaagctgtactacgacaaggaacagacagtgagcatgaaggacaatgtcaggcccctgcagcagctggggcagcgcacggtgataaagtccggggccccgggtcggccgctgccctgggccctgcctgccctgctgggccccatgctggcctgcctgctggccggcttcctgcgatgatggctcacttmtgcacrcagcctctctgttgcctcagctctccaagttccaggcttccggtccttagccttcccaggtgggactttaggcatgattaaaatatggacatatttttggagaaacctttctcaagtgtgtttttagccttccacaactaccccaccctgtccccctccacccacccctgttcctcctgttccagggcgggggctttaaggccaggagatttctcccaagcaggtaccaccaggtgtccccactcccgttctatgtgaattccgtgtctataccccactcccttctaccaggacctggaccttggagagatgctgaaggcatcttggagcttcatcacagcggaagctagaggagttccaatctgatctcttcatcatatagagggggaaactgaggctgagaaagacaaggttggggccgggcatagtgattcacgcctgtaatcctggcacgttgcgaggcagaggcacgtgaatcacttgagccctggagttcaagaccagcctaggcaacatggtgaagccctgtctctataaaaaatacaaaaattaaccaggtgtggtggtgcacacctgtagtcccagctactcaggaggttgaggcaggaggattgcttgaacccaggaggcgaaggttgcagtgagctgagattgtgccactgcactccagcctgggcaacagagcgagagagaagaggctgcttggctggctggaggccatatactgaggctagggcagagccgactgcatgacggcagccccagccctgtgcgttctcccctgtgctaggggtgaaagggtgtcatgtgtggggatggcctaggcaaggtgggcgaaaggaagttcatttgtttgctcaaaaatttattgagcgtttatgctctaggcactggggatatggcagagaataaaagacaaaaatgcctgccctcctggagttcacagtctagtggagagacagcccataaatgaagcaggcatgttgtctaatagatcgggaggcagtgagtgcatgggagaaagagaattcagggcagggggccgggcgcagtggctcatgcctgtaattccagcactttgggaagccgaggcgggcagatcacctgaggtcaggggtttgagaccagcctggccaacgtggcgaaacaccgtctttactaaaaatacaaaaattagctgggcatggtggcgggtgccggtaattcagctattcaggaggctgaggcaggagaattgaggcagagtttgcagtaagccaagattgaaccactgcactccaacctgggtgacagagagagactctgtctcaaaaaaaaaaaaaaaagagagaattcagggcagggaaggtgggaagccctgggggaaggggcggctgggaggaggccagagatggaggcctctggagactgcaaatgttgaggtgcggcagggagggagccttccagagaaacagcagggaggagtagagggagggagggagggaggaagcagggggaggggaggcaggagagtgaggtggagggcattggtttggagcagggaggggagctatagaggtgaaggcagaacgcagggacagttcaggggctgccgcagtgcccaggagctgatctgctgatgggttagcagtgagatatgagggagagctcatgggggtgtccaagggtgtggggcttggtcccttgggacttgtcaggaaagtccccaccaccacggtgattacatctctaatgggttgttttccctcctgtggccagagggaagtggagggagagactgggaggaggctggtgagagggggtccaggacaccagaatgagaaggaaagaaggggacccacgcggtccccaagccaggtcaggccccaggtgccaggaactgagggcccgcagctgtcagacctcatcatcaggagtaggactggattttggaattcgtgagccttggagtggggttggctgagtgaatggggcacccaggtttccctggctgggtgaggacccctttggcaggctgagagtccggaggtagagagcttcctcacaggaaggcgtgcccaccaggagggcactgagggattccatcacctggttctagaatccctcgctggctgtgggaggggagctggtgggagaaggtggtctctaagccttctctcaccccgagccccccatgcccctgaccacccccagtcagcccagggagaggagagacggctgctcccctccctcctccctttccctccgtcttcccttttgtaaccaaaaataagtcccccctcccttccctggtgaccacgcagctgtgggggaggggtggtattgctgttgccatggcaaccgcaggccgcctgtcagcggggggtgtgtggacgcagaacctggaacctgttctttggttcccacacagactgcaggggatctaagctgccccccaaaggatcagggctctgaggtcagaatggcccctcccagctccccaatggcactgcatccccacccccatccctgccctccaggcaaccttagtgaataatgtggcagcaggaccaggaagtcctggcctttccaacctaaggcagaaggtgttcgaccctccccatccccctggtccctaaatcataaatccggccagcaggagccagaacgggcacagcttgtccagggcctggggctctggccacctcccatgtcctgcctgccctccctgcggcccagaggccacagcaggtgctgccagcactcaactcccagccaagtcaccagggccagtcacagcagaagtgggcagctcaccccgggcactggcccccacctcccgaggccgccactgatggcattccttcctgtgaacatgcgtgtgttcatgacgagcttcctgtttttagtaaattcactccctccatgcggcctccaccacccccagcagacccccaccctggggatggtggctctgagttccctgtgcccagtctggcctggcttctgagacagttccctctgagggcgagggaggagaacccccttattcacaaagagggtccagcctggcccctgagccctcctttcattcatttctgaggccccgtgggtgactgcatggggtacacacacacacacacacacacacacacacacacacacacaccagccttcactccttcactgtagctggccaggcctggggaaggctcacaggctgatggttttgcctgcaccctgacttctctgagggtcactggccggcactcagcacagcataaagcacattctggggtgcccatcgtgttccaggtgggggccgtgctgcaatcccattggggtggtgttatccctcccacagcacggataaggaagccccaaggcacagagagggacggggcacttgtcagaacctggggccactcccctgtgcctccttggctcccctggccggctctctcctttggctgagccatctgtgtccaggggcagggtgggggctgcagcaccccgtcccacccatctccgctggttgctctccatccccagtgggccgcctctttggccccctgtttagattcagcatccgggtgggagccaggggctaaaaatattcctcatgtgtttagatggttcttggaaaataaacttccccatcttggctcttggtttgcacacttgctggccctgcttcctgtggctctgatctgacaatgtaggggtgggggaggaaggtggggcggaggagggtctacagggggcccagagtcgtgggggctgtgtggacgtctgcccatggttcgtgcaggctgccgtgtcttaaaactccagggggcgcctataccgacagggccttgtgaacggtgcccccagcgtggtgcaaccctgaggctctgagcttgtgtgtgtgttggggtgggaagaggcaaggaagctagtggctccatgggcatggaggcatgctccctgctctgggcctcrgttcatccatctgcagaaggggctacccttggtccccccatctaattgggcaaggctgtcccgggctcctgctgtccccggtgacctcagaaggaaggccaggcctctctgaggttggggaactgttcctgcacctcgcactacacatgtcctagccgctctgtttgtttatctgagagggacaaaggcattctttcccccagggacaaaggacgatgtccaaggcccagggaggggcttcctttggagaagagctgcgggacagaagagtcagttccttccgcagagccctcggctggacacgtgggaggctcctcaggttgttccaagtgtcagctgcggcaaggcctggaggacaggaagagggcagcggagcaggacacagggaagggatgtgggtgcattctggaacaagatttaatcttccatcaagatttagtctttcagccaggcgcagtggctcacacctgtaatcccagcactttgggaggtcaaggcgggaggatcacttgagcctgggagtttaagatcagcctgagtaacttagggagatcctgtctctacgagggggaaaaaaagaagccagacgtggtggcacgcctatggtcccagttacttgagaggctgaggtgggaggatggcttaagcccaggagtgcaggcaccattgcactccagcctgggcaacagagagggaccctgtctcaaaaaaggaaaaaaaaaaacaaacgtaatcttccttcctccctccctccctccctccctccctctctctctctctttctctttttctttctttctttctttttttctttctttctctttctctttctctttctttcttccttccttccgtctttccgtccttccctccctccctcctttctttctttctttttctttctctttcttccttccttccttctgtccttccctcctcccctccctccagtctgtctgtctgtctgtctttctttctttctttcttttttctttttctttctttttatacagtctcactctgttgcccagactggagtgcagtggcacgttttcggctcactgcaacctctgcctcctgagttcaagtgattctcctgcctcagcctttcgagtagctggtactacaggcgcatgccaccatgcagctaatttttttcatatttttagtagagatggggttttgctatgttggccaagctggtctcgaactcctgacctcaggtgatccacctgcctcggcctcccaaagtgctgggattataggcatgagccaccatgcccggccttaatctttcaacaaacactattatttcctctgtgccagggacagaggatttagggaggaaaatcctagtctgggctcttcctccgagactcccaactgtagggcaggcagacacagcaggcacaggagcaccaggtttacgacacagaagccaagagaggaatgcagaaacatccgggcatgcagcccagactcacaccggcctggggtggaatccccctccattgctgactctctaggtgcccttggtagtttaattcatttttctgagcctcagtttcctcatctgtgaaatgggggtgatgacagcatttacctcatgggcttgttgtcaagatgaaacaagatgccgggacaagaggagatattcaataatttataattattatgatgattctttttattggagagggcaatgaaggacaggcaagacccacaggtggggagtagggaacactgggcggaggctggaattatgcagagtgatgcataatgaactctgatctgtggttggtggcagttctttcctatccaagggagaaaacttaagacccttcaaggggccacctctctgcccagacacttagggacatccctcagcactctgtcccaaccgtacacagaacagtttacagaggaagatctcccagcctgaccttcacctagaattgtctaaggtcacccagagcatcagagggagaaaagggggccctctgagccccaggactgccctgcagttcttatgtcctgccttagggggtagcaggtgcagagttcagagtcaggctgagcccacatccctgaaagaaggggctctcggccagggctcctcctgctttctcactgtggggatt

SEQ ID NO: 93753 - DNA, 21331 bp, Homo sapiens
  misc_feature (1)...(21331): n = A,T,C or G
gctcaccagctatcattagtgttaacgtattttatgtgtggcccaagacaattcttcaaatatagccaatttgaagccaatatggcccaggtgatggggacccctggggtttaaaccgcacaaactttaggcattatcatttcaagtttaagtctcacccaactcctacccacctagtagggtagaggttcattaagaaaattatgtgccttaaagggaatagataattacatttttaaaaaacaactttgaggctgggggcggtagctcatgcctataatcctagcacttggggaggctgaggcaggtggattgcttgagcccaggagttctaaatgagcttgggcaacatagggagaccccatctctaccaaaaaataaaaaaaaaattagccgggtgtgtgggtgctcacctgtagtcccagtgagaggtgacagcatgctggcagtcctcagaggcctcactcgctctcggcacctcctctgcctgggctcccactttggcagcacttgaggagcccttcagcccaccgctgcactgtgggagcccctttctgggctggccaaggccggagctrgctccctcagcttgcaaggaggtgtggagggagaggcatgagcgggaacaggggctgtgcgggcacttccgggccagctggagctccaggtgtgcgtgggcttggcgggcccgcactcggagcagccggcaggccctgccggccccatgcaatgaggggcttagcaccagggccagcggctgtggaggccctgtactcagagcagtgccgcccaccggcactgggctcgatttctcaccggccttagctgcctccctgcggggcatggctcgggacctgcagcccgccatgcctgagcctccccctctctgtgggctgctgtgctgccggagcctccccgacaagcaccgccccctgctctacggcgcccagtcccatcgacgacccaagggctgaggagtgcgggtgcacggcatgggagtggcaggcagctccacctgcagcccaggtgcgggatccactgggtgacgccagctgggctcctgagtttagtggggacctgcagaacctttatgtctagctaagggattgtaaatgcaccaatcggcaccctgtgtctagctcagggtttgtgaatgcacgaatcgacactctgtatctagctactctggtggggaggtggagaacctttgtgtctagctcagggattgtaaacacaccaatcagcgccctgtcaaaacagaccactcggctctaccaatcagcaggatgtgggtggggccagataaaagaataaaagcaggctgcctgagccagcagtggcaagctgcttgggtccccttccatactgtggaagctttgtctttctttgcaataaatcttgctgctgctcactctttgggtccacactgcctttatgagctgtaacactcaccacgaaggtctgcagcttcactgctgaagccaatgagaccacgaaccccccgggaggaatgaacaacttgagacgcgctgccttaagagctgtaacactcaccgcgaaggtctgcagcttcactcctgagccagcgagaccacaaacccaccagaaggaagaaactccgaacacatctgaacatcagaaggaacaaactccggacacgccacctttaagaactgtaacactcaccgcgagggtccacggcttcattcttgaagtcagtgagaccaagaacccaccaattccggacacaccagctactagggaggctgaggtgaggggatcacctgaatccaggaagtcgagggtgcagtgagccgagatcatgccgttacactccagcctgagtgacagagtgagatcttgtgtcaaaaaaacagaacaaaataaaacaagaacgttgaataggctgtgtgttaattctgagatggagtccagacttaagaatgatcctgaggcttagacccatatccaagaggatgattccagcctggcacttataggttcttcaggcacttcagatgcaccctgtcctgaattaagccctttgtccttgaacctgctttccttggtaaacagcaccaagggggctagaaacctgggggctgcccttaccttccctctctcaccatgcacctctaatgggtggctggacttgtggttgcatttccgtgatctcccagctttcttccagtgatggccttaggtgggctcttatcctgtctcccaaatggcctctctgccttgagtctcaccccatctgctctcagtccacccactgagctattccagagaccattctgactccctgtggacacccctctggtggcttctcctctctgtcagttagaaattgcttttgactgcatgtaacaaatgtggttacgctatttaaccaaataaaggtttatttttctcgtgatgaaaagtacacagataagcagcctacttccatcgataaccattgagggtttcttatgactcttacagcaatgaaatgtgtatttacagtataaagatatacaattttaaggttttaatataattgggcctaagcacagtattttttgttttagttttcaactgcccaggtgattctattgtgcagccagggttgataaacactgcatctaggcccagtgcctttgatttgcagctgaggtctagagagaattattgaaactgcagtcccagctacttgggaggctgaggttggagaattgcctaagcccagcggggtgaggctgtagtgagtcaagactgcaccaccgcactccagcccgggcgacagagcaacactccatctaaaaaaaaaaaaatttctggtctacctttttgcccaccttttaaccacagaggtccccaaacatgaattttcactctcaggaaggctgaaatgacacattacaagcggtttagtcatctgcacgtgccgccatctgatttaaggcatctattcctcctcaccattcctgacaaagttgaactgtctacatgtgccacattctcctctttctctaattccttccctccttccctcctccctttcttccctccctccctccttccttcttctttctctttctttttctttctctctttctctttctttctctttctctctcactctcttttcttctttctgacagggtttgcctgttctgcttctttaaaccctggggttcaagtgcaaaggtccctctcatctgatttccctattttattttatttaagttagatactccacgatgatgatgatgattattgttgagacaggatttcattctgttgcccaggctggagtgcaatggtgcgatcacaactcactgcagcctcaacctcctgggcccacgcgatcctcctacctcagcctcccaagtagcttggactacaggggtgtaccaccatgcccggctaattacatgtgccagattcaacccacgttccagggttccaaacaaccaaggctctatcatmctgtcttaacaaatataccttcataaagacctggaaggcaggttgaaatgtggaattcttggacttctttcagttctacgtagaagggtagcagtggagagctggctgcctgcccgcccctggcctttcctcctttccccacccctgctccttgtggcactgggcagggcctacgttcaaggctagcagtgtactcaacaagggacagtccctgtgtggcctgttcaggatcctatacacaggctcagggctctttgggcaggaaattccaggatccgggtactcaagtggtgttctaaacagtggttcttggccgggtgtggtggctcacacctgtaatcccagcactttgggaggccgaggctggcagatcacttgaggtcaggagttcgagaccagcctggccaacatggtgaaaccccatctctactaaaaatacaaaaacttagccaggcatggtgtgcacgcctgtagtcccagctactcgggaggctgaggcaggagaatcacttgaacccagcaggcggaggttgcagtgagctgagattgcaccactgcactccagcctggtgacagagtgagactccatatcaaaataaatacataaataaataaaaacagtgattcttaactgggagtgatttggcaacgtctggaattatttttggttatcccagcctggcagggagggacagggtattactggcatctagtgagtaggggctagggattctactgaacatcctacagtgtacaggacagcctccacagcaaagaactgtctggcccaaaatgtccatagtgcccacattcgatgccctgcattaggaagatataaatactcttaaatatcacagagttaaattccttacccctgttctagcagagatgatattcttgcggggggagcatcttcttggcttcaacacattcttttctccatgggagatgatgccagaagagggacagaacagggcagtaaagcatgagggaccccctttcaggtgtgacgaccatcctacgaaggcaccacccaggcatcattagaccgtctcaaaagaagagtaattcactgtcccaaagcagctctctcgtgtctgtgggcggatcccttggcaagtttacaatgaactgaaatctgccgaacttcctggaacccaaagaaactttagccttgggcaaaggccctttggccagcatttgcactgtttatgcaaccgtttagaatatacgaattatctggagactactaccaaatacaacaggcaaaactgcaaatatgtatacttcctagaggatgataaaaaaatgtgaattgtatttctctgatagaggatgcattagagtctgagggtctaaatagcgtaaataataaataagtaaataaatcgatagtagtgtactccaaacgaggctggaatagcttctattgttgtttcacactggacttcaattaagtctcagtattttgccatactcaatattaagtactaggctggacgtggtggctcatgtctgtaatcccagcactttgggaggccgaggtgggtagatggctggcttgagctcaggagtttgaaaccagcctgggcaacatggtaaaaccccatctgtacccaaaatacaaaaatcagccaggtgtggtggcacatgcctgtggtcccaggtacttgggaggctgaggcaggaggatggcttgaacccaggaggtggaggctgcagtgagctatgatggcgccactgcactccagcctgggtgacagagcgagaccctgtctcaaaaatcaaacaaacaaccccctcgccccggacaaaagtagtttgcactattttctcatttcacaatatgtttttgaaatatttcccttgaaaggtaagtcatatttatcattcctgttgtatggaggcatcataaattatttcaccattctaccctccttgagtgttgtggcctttaggccagacaaaaacgcaggtgatgcctagaagccaactagttgccgtttggttatctgtagggttgtggccttgccaaacaggaaaaatataaaaagaataccgaattctgccaaccaaataagaaactctatactaaggactaagaaaattgcaggggaagaaaaggtaagtcccgggattgaggtgtagcgactttctataccctcagaaaactaaaaaacaagacaaaaaaatgaaaactacaaaagcatccatcttggggcgtcccaattgctgagtaacaaatgagacgctgtggccaaactcagtcataactaatgacatttctagacaaagtgacttcagattttcaaagcgtaccctgtttacatcattttgccaatttcgcgtactgcaaccggcgggccacgcccccgtgaaaagaaggttgttttctccacatttcggggttctggacgtttcccggctgcggggcggggggagtctccggcgcacgcggccccttggccccgcccccagtcattcccggccactcgcgacccgaggctgccgcagggggcgggctgagcgcgtgcgaggcgattggtttggggccagagtgggcgaggcgcggaggtctggcctataaagtagtcgcggagacggggtgctggtttgcgtcgtagtctcctgcagcgtctggggtttccgttgcagtcctcggaaccaggacctcggcgtggcctagcgagttatggcgacgaagdycgtgkgcgwgcwgaagggcgacggcccagtgcagrscatcatcaatttcrrgcagaaggcaagggctgggacggaggcttgtttgcgaggccgctcccacccgctcgtccccccgcgcacctttgctaggagcgggtcgcccgccaggcctcggggccgccctggtccagcgcccggtcccggcccgtgccgcccggtcggtgccttcgcccccagcggtgcggtgcccaagtgctgagtcaccgggcgggcccgggcgcggggcgtgggaccgaggccgccgcggggctgggcctgcgcgtggcgggagcgcggggagggattgccgcgggccggggaggggcgggggcgggcgtgctgccctctgtggtccttgggccgccgccgcgggtctgtcgtggtgcctggagcggctgtgctcgtcccttgcttggccgtgttctcgttcctgagggtcccgcggacaccgagtggcgcagtgccaggcccagcccggggatggcgactgcgcctgggcccgcctggtgtcttcgcatccctctccgctttccggcttcagcgctctaggtcagggagtcttcgcttttgtacagctctaaggctaggaatggtttttatatttttaaaaggctttggaaaacaaaaatacgcaacagagaccgtttgtgtgacactttgcagggaagtttgctggcctctgttctaggtcatgattgggctgcaagggcagagaaggtagccttgaacagaggtccttttcctcctcctaagctccgggagccagaggtttaactgacccttttggggatttttgagggcagtgatcttaactttgggtgcacagttagcttatttgaagatcttactaaaaatacaccagagcccaacctccgaccaattacatsaaaacctgtcctagtgcagggtgagtattgctgttttttgaaagtttccaaaagtgattttgatgtgcacctacgattgagaactgtcgtttgaggacagtgggtggagtttcgtatttggaaattagaagacctggagtttccattacaccgaattggcacttaataactgttgtcggagcatttcttaagccacattttcgtaaagtggctttaaaattgctctgccagtaggcaggttgctaagatggtcagagacaaacttctgaacgactcttgtaaaatatacagaaatattttcagaacttttatcagtaaaattacaaaacgtgttgcaaggaaggtgcttgtgataacactgtccccagaaccttagtgaagttaccaactggtggaaaattttctcttgcactcggcttaaaaatcatgagggaatatttactatacgaatgagattcagtctttaaaggggtttacagaaacgtgagaggacaggaacagttagtctgtgtaaatgtctgaaatatatgtgagggagataatgagtttagcctttttctttaataggtctccagattttctggaaaaggttctttggcatttgactccattttgctgtttcatttgtcagacttctttttgtccctctttacttctccccacataattcaccagtactagtgttttgtttttcagaccaagtctcgctctgtcgcccaggctggagtgcagtggcgcgatctcagctcactgcaacctccgcctcccaggttcaagcaattctcctgcctcagcctcccgggtagctgggactacaggcgcgcgccgccacgcctggctaattttttatattttagtagagacggcgtttcaccatgttggccaggatggtctcgatctgttgacgtcgtgatccacccgcctcggcctcccaaagtgctgggattacaggcgtgagccaccccgcccggccaccagtgctattcttaagacgcctctgaggaatcccttctccctggccattgagaatccatgcatgaacccaggttttccaccttccctgagcagcttgcatagttccttcttttaagcgcctgacttcgttttgtttggtgcccgttgtacctgagaatgagccttggatagtggagcattccagctttccagatatgcagagataatacattggctatcagctacttggcttggcctattccgtgtttaaaatcttggactctttgctagtttttacagatcagaatttttcacgtattaatccagttttcctagcttctcttgaagaatttttggagatctcttcatactgagccttcattagcccaggacagtactgctgtagcagttcatatattttttcgcttcccaggcctgtgttattcacttaagttcatagcctggtccctgcagggttgtacccgagcacagctacttagatgtcctgaatgtattaccggttaaatggaggtttcaaagaacctgctgtttttggccctgtgctcttgataacagagtgtttgagggacaactttcacatttgagtttttccaaaattaaaggttgtagaagagtcacagtatctattgtcaaaaagaaaagaatttaaaaaggcagcaattgccaggatacttcatttgagcaatgatattttccagtggaaagtcacatcttaagggttaatgccccttaactgttggccgtatttgaaaacaaaccaagctaaaaacaagagacactgacatgttgtatgacggtgtggtgtggatgttgtgtttattttagtcctgagatctagttgtaacttccttgatttctgtatgtagccacggagcaccattacctgtcaccattacctgaatggctatactgcttrctttcattttggtagagtggaaaggttacctaggtttcagtgcttgaaaagatttcagaaagcagtagtacgtctggttagactagaatcagtcctctcctgggggcagtggaatataatattttctgactgctaattaaaaatacctgtgatagccgggcgtggtggcttacgcctgtaatcccagcactttgggaggccgagacgggtggatcacgaggtcagcagatggagaccatcctggctaacacggtgaaaccccgtctctactaaaaatgcaaaaaaattagccgggtgtggtggtgggcgcctgtagtcccagctactcaggaggctgaggcaggagaatggcatgaacctgggaggcggagcttgcagtgagccgagatcatgtcactgcactccagcctgggcgacagagcgagactcgtctcaaaaaaaaaaagaaaaaaacttatgatggacacttaaaaacactcactgagtggggagtggagagcaggggtcccagggtagcctgttggacatttccagggcgactttttctttttttttttttaaagtcaagtgagtatgccatatggaaaagggtgtgcgtggagaaaaagcaaggggctccagagtgtaggatgagacatacaccttttgggttaaaaaggctgaggcaggagaatggcgtgaacccgggaggcggagcttgcagtgagctgagatcatgccactgcactccagcctgggcgacagagcgagactcttgtctcaaaataaaaaacgtttacatgtacatgtatattcaacatgtacaaatataacctattcaaaagtatttactacataaataggtacttacattacctatttactgtaatagtcaaagcctatgaagtatctaacactgatgtgtaggtactcactttgcttgccactctattaggtgctttttatgttatttaatcatgaagcctggccacagggtgcttgtgcattgagtgtgggaacaagattaccatctcccttttgaggacacaggcctagagcagttaagcagcttgctggaggttcactggctagaaagtggtcagcctgggatttggacacagatttttccactcccaagtctggctgctttttacttcactgtgaggggtaaaggtaaatcagctgttttctttgttcagaaactctctccaactttgcacttttcttaaaggaaagtaatggaccagtgaaggtgtggggaagcattaaargaskgaytgaarrcctgcatggattccatgttcakragtttggagataatacagcaggtgggtgttgtgctgtgctggtgacccatacttgttcaccctagttagataaacagtagagtagcccctaaacgttaaaacccctcaacttgtttttgtttttgagaaagggtcttgctctgtcgctcaggctggagtgcagtggcgctgtgcgatcatggctgaccttagccttgacctcccaggctccattgatcctcatgccttggcccgtagctgggactacaggtacacaccaccacgcctggctaatttttgtatttttttctagaggtggggtttcatcatgttgcccaggctggtcttgaactgctgggctcaagtggtctatcctcctcgacctcccaaagtgctgggattacatgtgtgagccactgtgcctgggaaaaccctcaacttttcttttaaaaaagaggtcaactttattgtatataagcactgtgctaaaattgcaggaactgggaccatatcctgatttttgtaataatgccagcagagtacacacaagaaaagtaactgcactagattgtgaagactggggtggacctgcttctgaaggtccagtgccctttgtcttaagatttggtgtagtgtgtctttagaaaccaaaaaaagagaagaagatcaaccttaagattagccacaaaactgggctttgatacctaggtgtggaaaagaaagggaaagagttgatgttttgtcttacagcatcattgtagaagagggtgtttttttgtttgtttgttttttgagacggagtcttactctgtggcccaggctggagtgcagtggcgcgatctcggctcactgcaagctccgcctcccgggttcatgccattctcctgcctcagccccctgagtagctgggactacaggtgcccgccaccccgcctggctaattttttgtatttttagtagagacggggtttcactgtgttagccaagatggtctctctcctgacctcgtgatccgcctgtctcagcctcccaaagtgctgggattacaggcatgagccaccgcacccagccagaagagggtgttttttaaagaaggcaaataggaaataaaaacttgggctcttaacttttgtaatgatcccaggtgtttgagctgggggttgagggtgggtgcctcgagcaaaggggctgcatttatttgcataatgccatgtaagagtagctctacaccccaaacacaggcttcttagtgggaccaaagtatgatacaaactgaagatggaatgcagaggattattggtactttggaatatgcttaaaaaaawtttttttaaagtatttttaaaaaatcaggcaacccctgaaccagagtaggttcagagaaactgccaaattttattttcttartttgggattggaagcaagttaacagaagtttatgagttaagttgcatttagtgatcttttgccatatttgagtaataatctgatttttttgtttatagatttcttcttaaattaactttattcatcttgctaatttagtttcaaatagtgatttgtaatgatcagatttgatccatttctgtaattgctgaaattcccccgagttgctttttggctttaccgcctctggtctgggaggtgattgctctgctgcttcctgtaacttgcctgcctttctccctgtgtgggactcctgcgggtgagagcgtggctgaagacagccgtgttatgaaagggcctcctgtgctgtcgaggttgtgctctgtgaatgtcatcccctggtgcacagcagcaccttctacacaggatacagttggaatgccgccccctcgagttgtgtaaggcagcagccttggcccttgcacataagatgctgttgaatattctgcctgcaccaagtaaagggcacagatagaactgcttggcatatgttgctggggagatgagttttttgtaaagtatactacgttcttaagaatttggatcataaccatgggattttaataatagaaaaactgttgaagatcagtctggtcccttatttttacagtgaagaagccaaagcccagagaagggtgttaactttacaagtgtcagacagtagttagaacttggtggggtttttttttttttttttttgagatggagtcttgctctgttgcccaggctggagtgcagtggtgygatctcagctcactgcaacctctgcctcccaggttcaagcgattctcctgcctcagcctactaagtagctgggactataggtgcgcaccaccacgcctagctaatttttgtattttttcagtagagacagggttttgctatgctggccaggctggtctcaaactcctgacctcagatgatccagccacctcagcttcccaaagtgctggggttccaggtgttagccaccatgcctggccatagacttgtttctgttcccttctcactgtggctgtaccaaggtgttgcttatcccagaagtcgtgatgcaggtcagcactttctccatgggaagttttagcagtgtttctttttagaatgtatttgggaactttaattcataatttagcttttttttcttcttcttataaataggctgtaccagtgcaggtcctcactttaatcctctatccagaaaacacrgtgggccaaagkatgaagagaggtaacaagatgcttaactcttgtaataatggcgatagctttctggagttcatatggtatactacttgtaaatatgtgctaagataattccgtgtttcccccacctttgcttttgaacttgctgactcatctaaacccctgctcccaaatgctggaatgcttttacttcctgggcttaaaggaattgacaaatggggacacttaaaacgatttggttttgtagcatttattgaatatagaactaatacaagtgccaaaggggaactaatacaggaaatgtcatgaacagtactgtcaaccactagcaaaatcaatcatcattgtgaaacataggaagcttctgtagataaaaaaaaaaattgatactgaaaactagtcgagactccatttatatgtgtatgttttctgaaagcctttcagaaaaatattaaatttaaggacaagatttttatatcagaggccttgggacatagctttgttagctatgccrgtaattaacaggcataactcagtaactgagagtttaccctttggtacttctgaaatcaggtgcagccccatctttcttcccagagcattagtgtgtagacgtgaagccttgtttgaagagctgtatttagaatgcctagctacttgtttgcaaatttgtgtctactcagtcaagttttaatttagctcatgaactaccttgatgtttagtggcatcagccctaatccatctgatgctttttcattattaggcrtgttggagacktssgcartgtgactgctgacaaagatnntgtggccratrtgtctattrrarrttctgtgwtctcastctcaggagaccattgcaysaytggcsgcacactggtggtaagttttcataaaaggatatgcataaaacttcttctaacatacagtcatgtatcttttcactttgattgttagtcgcggtttctaaagatccagataaactgtacttgcagttcaaattaggaaaagcaattttattggacaattacggtgaaaatgaattattttatctaggtcagttaagaacactgttctgctaagatgcagtaaaaagcaggttacatttgaccatattagatctgagtttggaaaacagaagtagtctttagttttaaaatggccagattttcttgccaggattgggtttctcacttgttaaacagaacattttgttaagtttraaacctgggatggacttaagtattcatgttcattcatgttcattcaggactgcaggttatcatgacttgtttaacttgtgggaagctgttgtcccaagttatcctggggaactgcatctggttcttgcaaaayaccaagtagacaggctctcttttacctccccttgagggcattaacattcagtagtcacttccattcagttaaccctttatttttatggtttttcttgagccatagttgtaaagcagaaaaatcatttataaaggtttgttgaacaaaattcaaaatactgttgcttaaagtattaagattttttaggattataccttacttataggccygtcattcatttggcatgaaattttgagttttattcactttcactttcctttttttccaaagcaattaaaaaaactgccaaagtaagagtgactgcggaactaaggttactgtaacttaccatggaggattaagggtagcgtgtggtggtctacaacatagttatttgggttttagtatttcatttagacagcaacacttacctaatgtttaaaggtaatgtctttgcaacaccaagaaaaagctttgagtagtagtttctacttttaaactactaaatattagtatatctctctactaggattaatgttatttttctaatattatgaggttcttaaacatcttttgggtattgttgggaggaggtagtgattacttgacagcccaaagttatcttcttaaaattttttacaggtccatgaaaaagcagwtsacthgggcaaaggtggaaatgaagaaartacaaagacaggaaahgstggaagtcgttysrctygtggtrkaaytgggaycgcccaataaayattcccttggatgtagtctgaggccccttarctcatctgttatcctgctagctgtagaaatgtatcckgataaacattaaacmctgtaatcttaaaagtgwaattgtgtgactttttmagagttgctttaaagtacctgtagtgagaaactgatttatgatcacttggaagatttgtatagttttataaaactcagttaaaatgtctgtttcaatgacctgtattttgccagacttaaatcacagatgggtattaaacttgtcagaatttctttgtcattcaagcctgtgaataaaaaccctgtatggcacttattatgaggctattaaaagaatccaaattcaaactaaattagctctgatacttatttatataaacagcttcagtggaacagatttagtaatactaacagtgatagcattttattttgaaagtgttttgagaccatcaaaatgcatactttaaaacagcaggtcttttagctaaaactaacacaactctgcttagacaaataggctgtcctttgaaagctttagggaaatgttcctgcttagtcattttagcattttgattcataaagtacctcctcattttaaaaagacattatgatgtaagagagccatttgataactttttagtgagctttgaaaggcaagttacagcctcagctagctagtaagattatctacctgccagaatggcacaaattctacattcaagggtagacgctggcacaacctacttacagattagccctttaaagcaatctgtagcattagaagatggaaccaaggaaatgtttgactgtgggttctggctgttgagaaataatttacacaccgaattagtgaaatgagtcactttctcttaatgtatttatgtacctgagagaatgcttttcaatgttaacctaactcaggtttgactaaattattcaattggaaattgtagaatattatttctgataaaccagaaataagtgaaatgctgtttgttcataaatatgtactttatcaaatgtaggagagatcatttaggagaggaaaagctaaattggaagacaaatctgtagtgtttccaaagttttaaaattatggtaaacaacagtatgttcacagtaagtggttaaaacaaccattctttaaatctcagtagagaatttttaaaaagcagtatttaacacatttccctaatgtagtttgttgcctatgtggaataactcaattagagactcacttatgccttttgaaacttcaaatataattacactaccagtttttacatgtgcatataggatggtcccaatactttaaattggaaatacaggctgtaagtccttcaagtctggatgttgggtaatcacgttttcttccagaagccatttgttaggactttaaaacttctcagtgggccagtgtaaaattaaggacaagttttataatttaaatttacagataaatataaaacaattttctctcattttctaaaggcaggaatataaggacattgccctagatatattctccccatcaaaccaaaggtcttgctgctgagtattatttaaaaaccagagtaataaagcagcttcgcctgaggatgaaggcaaagacaaagttaactgctcagcatactgaaaccaggagtttgaaaaagtaattcaaaacaacttcaaggccataaatacttggatagtgtgacatcaggtcttggcactggatttcctgcaatttcagatgaaggcttgacttggctttagatgttttcatgtgataattcttggataacctacaacgatttttcctatttaacccaccaactttaagcaaaagaaagaacgtatatgtgggggaaaagttcgtttacctctgccccgcaggggaattaaaacgctggtgaagaaaggcaacaggcaaggcttatataaggaaacagtagtaggctgcactgaagtcctcaaacacaacaaaaagctcttaggttgcaaatgttaaccttgattcttttacccttttgaaaaattcaatgggatggttggaaaaaaaaaaaaccacagacacacacacacacacacgcaaccttctaacgtaatacccaggcagtccgataatttatagtacaacgtgtaacactgggatccaacttttcacccagcaaaatctccttacaaattagggcaacatataccacaaagccaatggaaaaaaaaagaaaacctcgattgaattgcaaacacagcttttcaattgacattaaaacaactaacctttaccttatgactgagcactaaaaatcaaaagtattacatatgaaagtgagaataactacataaaatgtctattttcatcaaataagtctaatttagactccaatacagtattaacagctcaaactttgacggtgaacaatccytttccaccttaatgcagtgtaggaagaatagcacacattaaagtttgttacgaaaatagagtttattaaaaacatccctattgttttgaggagctttcaccgttaccttgtcttaaattaaaaaaaaaaaaaaaaatagagagcacttctaattacgatttgtaaactttttaaagtcaaaacttttaaaaagttacagcaaaaagggtaatatttattcatattttcagtattttttgttattttgtggctatttttaaatagaagggaagcaatcaaattgcttacagttccccaccagctggcgcggggctgcagtacagcgggagcggatataatacagcatctgtacacctcaagctctacactccaggaagtgtcactgtcacattttcacaaattccagtctctaacgaggagcctctgctgctgagccagaatccttttcgggttcaacggatgaggtagcctcagcaggtaactcttcagaaggctttaggactgcagcctcagacacccccttctcaagttctgaagcagtgtctacatttcccacttggctaatgggaggttcaacggttttgttaccacctgccctgtctgtcacctcaggcttttcctttcctcgggcttcttccttctctctacgagactctctatctctagaatctctctctctgtctcgatgcccactagagcgtctatttctctcttccaagtctctgtgcctgtcccggtcagggctcctccttccccactctctcctgtcacggttactattatctctatcatcattacggttcccataccgttcccggtcattttccaccctatttccaaaagatcttcttccaaacctttcttggtctctacctgaattgaactgctgcctgttatcatttctaaactgctgtggctgctgctgtgttggtggaggctgttgtgatggtggtggctgctgctgctgctgctgctgtggttgctggggcgcctgcggctgtggctgctgctgtggctgctgcggcggctgttgccttccgtctctgtcttcaggaccccctgggcctggccctgggcccccgagccctggcattccaccaggcctaacaaaggggccatgcggtgggaagggacctttcattccatgaggtggaggcatcgcaaagccccctggtcctggcggtgggcctctgtgcatcatgtgcggtggcatgggacggggcggcatcaaagggaaccgctgtaagtgaggtgggggcattcctggagggcgctggagtgggatgagaccgggccgggcgccaagaagaccagtagatggtgcctgaagtccaattacaggaccaggggcaactccttgagtgcctaaaagacgacaaaaataaaaatgtaaacaccaccgaagatggcactccagtttcagctgtgttctgtggcgcttaaagcaaaataaaattcaacccacaatcttcaaatttcatagtttgccactctgtcacaaacccagtgtgaggcctagtaacaacctaaggcaagcaattgcaaagacatttttaaagtatctaatacaggtagaggccagaataaactgggaaataaaatagtaatggtaataccaattttcaaagagtatgtcaaaatctcctgtagctttcattagaagctgtcttcccactccaaatacatttgagaaacacagtgtgctaagtcctaatgagataaatacattcactatcagtaactattcaagctaactaagcatactgcaggtgcacacttagaaaatttacaccccgtcttattactagaaaaaaatgaggtcactgacctagaaaacccaggaaagaggaagatctctttgactccatgctacacttagtccatattattaaaatgcctcatgcagttactatgcaatgtgcatcaaataaacactaatgtctacaaaacaaagatccatacacaaatgtgaagtttactgttacagttcctttttcaaggcacagcatgatatttaacttgcgaggccatcacgacctgaataatgctcaatgttcagctgttcaccttctattcattatttctattcattcttccaaaggtggcaagtctggtaaggttggtgctgctgaaataacaatgacttcttggttttattttcctatctacatgagggtttgctcatactgatataagagtcacgcaagttcaacaacctgtcattttctgcttggggttcaccacttaggtacagaaaagcattggaatctctcaatttatccttttgcaaatataaataagacaaatactataatactatgattgaaaggagttattctgataatggaaaatgttccaggtactgttaagaacatgctatttacccatgtgctgcagaaaggtctttgagcaagttatgggttatgatcagttagcaatggtaagaaaaatacttgggtgacactgacagaaaaatgaccaattgggaaatgctgattaccacagcaaaagcgccagaaattgtgaaatggatgaggtgatggctctgtcccttcacaggctcttcagacactttgggaaaatcccaatgaacaagtacaggacaccagctacactgtatctcagatagaaataaaacactcttcacatcatttgggaaatatttaccgagtatataccatacactggggcaacagaagcacatgtccttgctttcactttgtaaagaaatagtgtagttccaacacctgtggactttaatccaaaacataaaatgtatatgcccaggcacagtctcttttaatagagggatcattatatagaaacacctgaaacaaactgaactttactttcccattaccttttatcagtaaagatttgttttccaggactaaaatgaccaatgtttactgttaacggaggtcagcatagcacattctggtgcctatctataggttcaagtggccaagccaaattataaaataacaccagaaaaacgggggaaacagtttcaaagcatcttattataacaagagaatttagttgagatgagtcttcaaaaggaaagtgattcctgaagggcaatgggaaggtcctactcctgatgccccattgacttggcttcctcaagtatctgacagtggccaaaggatgcaaagccacctcaactttgtacagaagagagaaaatgggccctgatgataaaatacaaaccccagactgaaggaccacatctcttaagtactttacagcattcatttgagggtataaattaacagggttaaaatttacaataatcatataaaccttatataaaagcacaatttttataaagaattgcctacttgtttgatacatgtggatatttgtgtgtgggatttgcttaaaacattatacactcaaatcctttcccttcttcgtaaataaagctaaaaagatgtggccagctgggtttccttttaaccctttgagagccaactaaatttatagattcctgatagaatatgcccatagccccagatggccttcagaccacaaaaaaaattttatctgtagttccttttattcccttttgcagtgaacatgtaatgcttttataaccagttatattaaaaacacattaggtggcagaagactggcaagcatgctagctaggaagtccttattaggaaagctggcattaggcataaaccatcagtatattgtgagttacccaggtgaaaagggcattcaaagcaattgttcatttcatttggaaatatgacgtgtgatatcactgatgagttttctaaagttataaatttttaaaaaacccaattcattcatattatgtattaaatatctgaattttctattaactcatttaatagtcctttccttcaaaagggacagtttggtagaaatagacaaatttcaattgctgtaggagatggcacaagctagcat

SEQ ID NO: 93754 - DNA, 26445 bp, Homo sapiens
  misc_feature (1)...(26445): n = A,T,C or G
aagcataaataattctctaaaaggcattagacagccactcacagtctgcacagaagagaacaaaagctacataagctagaatagggacctcatagcaacacagcttggaactctgagcaggggacagaacacctgagatcagatccttgggtctgcccttgagtaggcacttgaatctttctgaacctcggcttccccatctatctggtgggctatgctattgtagggttgatccttagcaaaactgatgaagtttgtctttcagagacccttcctgcctcaggtgaatttgtttgcactgtgttcttggagagcagtctaattcaatattctcatgattcatgctttccctcccagtggttttgtctttgatcatggaactctttaaaactgtaaagtcttaaagactcaaagggatgagcccagtgaaggttcaggaactgagacaactgagtaaggagggtgagattattttaggactgaggagtttgtttggaggcttctaaatccaccccttcccaggcattatatgcccaaaaagctggtcttggttgacagactagtgagactctgcatgaggaataagcctttacatacaaaaacacacaagcctcattgatgtagggacccaggacagtgggtgccttgagaatgatgaagcttggattcatcaaagcaattggtgatttcagaggtagtgaggccttaggaagcaatttatagtagcttcccttcaagaccaggatccaaaaatccacttccctccaatcttagactgtatttgcctttaagaaccatatcagcctaaacaaacccagaagacataggtttaaatctatagtctgcctgttgctcagacagctcacctaacctctccaagcattttccctcatcttcgaattagaggaaacaatagcgcctacctcacattagtgttttgccctctgcaatatgataatgaaggcaaaagaactttttgtgcacagaggactgtagaaaaaaacaatgactaattcattttcaatctttcatctctatttgactctgacaggtgccatccagattccaacagtgacttttagctctgagaagtccaatactacagccctggctgagttcggaaaatacattcrtaaaggtcagctgcaaatcaggggcaaggggtgggtggtagaaatagcaatggagacacagttcttttacaaagtgataaagaagtttattttgcgactgatcagaggacaatctaattcccataggcagagtagagactgtagatttgctcttggaaaaactaagccaccatatgtagggcaaagattgagagttcatccagccattgcattagagtataaactctctcaaattttgccctacatgtgtgtcattcaataaatgttaaatcatcaaaaagtagaactaggatttccttctacttgtgcaactgcccagaactatgttccatgnnnnnnnnnnnnnnnnnnnnnnnnnnnnnnnnnnnnnnnnnnnnnnnnnnnnnnnnnnnnnnnnnnnnnnnnnnnnnnnnnnnnnnnnnnnnnnnnnnnnnnnnnnnnnnnnnnnnnnnnnnnnnnnnnnnnnnnnnnnnnnnnnnnnnnnnnnnnnnnnnnnnnnnnnnnnnnnnnnnnnnnnnnnnnnnnnnnnnnnnnnnnnnnnnnnnnnnnnnnnnnnnnnnnnnnnnnnnnnnnnnnnnnnnnnnnnnnnnnnnnnnnnnnnnnnnnnnnnnnnnnnnnnnnnnnnnnnnnnnnnnnnnnnnnnnnnnnnnnnnnnnnnnnnnnnnnnnnnnnnnnnnnnnnnnnnnnnnnnnnnnnnnnnnnnnnnnnnnnnnnnnnnnnnnnnnnnnnnnnnnnnnnnnnnnnnnnnnnnnnnnnnnnnnnnnnnnnnnnnnnnnnnnnnnnnnnnnnnnnnnnnnnnnnnnnnnnnnnnnnnnnnnnnnnnnnnnnnnnnnnnnnnnnnnnnnnnnnnnnnnnnnnnnnnnnnnnnnnnnnnnnnnnnnnnnnnnnnnnnnnnnnnnnnnnnnnnnnnnnnnnnnnnnnnnnnnnnnnnnnnnnnnnnnnnnnnnnnnnnnnnnnnnnnnnnnnnnnnnnnnnnnnnnnnnnnnnnnnnnnnnnnnnnnnnnnnnnnnnnnnnnnnnnnnnnnnnnnnnnnnnnnnnnnnnnnnnnnnnnnnnnnnnnnnnnnnnnnnnnnnnnnnnnnnnnnnnnnnnnnnnnnnnnnnnnnnnnnnnnnnnnnnnnnnnnnnnnnnnnnnnnnnnnnnnnnnnnnnnnnnnnnnnnnnnnnnnnnnnnnnnnnnnnnnnnnnnnnnnnnnnnnnnnnnnnnnnnnnnnnnnnnnnnnnnnnnnnnnnnnnnnnnnnnnnnnnnnnnnnnnnnnnnnnnnnnnnnnnnnnnnnnnnnnnnnnnnnnnnnnnnnnnnnnnnnnnnnnnnnnnnnnnnnnnnnnnnnnnnnnnnnnnnnnnnnnnnnnnnnnnnnnnnnnnnnnnnnnnnnnnnnnnnnnnnnnnnnnnnnnnnnnnnnnnnnnnnnnnnnnnnnnnnnnnnnnnnnnnnnnnnnnnnnnnnnnnnnnnnnnnnnnnnnnnnnnnnnnnnnnnnnnnnnnnnnnnnnnnnnnnnnnnnnnnnnnnnnnnnnnnnnnnnnnnnnnnnnnnnnnnnnnnnnnnnnnnnnnnnnnnnnnnnnnnnnnnnnnnnnnnnnnnnnnnnnnnnnnnnnnnnnnnnnnnnnnnnnnnnnnnnnnnnnnnnnnnnnnnnnnnnnnnnnnnnnnnnnnnnnnnnnnnnnnnnnnnnnnnnnnnnnnnnnnnnnnnnnnnnnnnnnnnnnnnnnnnnnnnnnnnnnnnnnnnnnnnnnnnnnnnnnnnnnnnnnnnnnnnnnnnnnnnnnnnnnnnnnnnnnnnnnnnnnnnnnnnnnnnnnnnnnnnnnnnnnnnnnnnnnnnnnnnnnnnnnnnnnnnnnnnnnnnnnnnnnnnnnnnnnnnnnnnnnnnnnnnnnnnnnnnnnnnnnnnnnnnnnnnnnnnnnnnnnnnnnnnnnnnnnnnnnnnnnnnnnnnnnnnnnnnnnnnnnnnnnnnnnnnnnnnnnnnnnnnnnnnnnnnnnnnnnnnnnnnnnnnnnnnnnnnnnnnnnnnnnnnnnnnnnnnnnnnnnnnnnnnnnnnnnnnnnnnnnnnnnnnnnnnnnnnnnnnnnnnnnnnnnnnnnnnnnnnnnnnnnnnnnnnnnnnnnnnnnnnnnnnnnnnnnnnnnnnnnnnnnnnnnnnnnnnnnnnnnnnnnnnnnnnnnnnnnnnnnnnnnnnnnnnnnnnnnnnnnnnnnnnnnnnnnnnnnnnnnnnnnnnnnnnnnnnnnnnnnnnnnnnnnnnnnnnnnnnnnnnnnnnnnnnnnnnnnnnnnnnnnnnnnnnnnnnnnnnnnnnnnnnnnnnnnnnnnnnnnnnnnnnnnnnnnnnnnnnnnnnnnnnnnnnnnnnnnnnnnnnnnnnnnnnnnnnnnnnnnnnnnnnnnnnnnnnnnnnnnnnnnnnnnnnnnnnnnnnnnnnnnnnnnnnnnnnnnnnnnnnnnnnnnnnnnnnnnnnnnnnnnnnnnnnnnnnnnnnnnnnnnnnnnnnnnnnnnnnnnnnnnnnnnnnnnnnnnnnnnnnnnnnnnnnnnnnnnnnnnnnnnnnnnnnnnnnnnnnnnnnnnnnnnnnnnnnnnnnnnnnnnnnnnnnnnnnnnnnnnnnnnnnnnnnnnnnnnnnnnnnnnnnnnnnnnnnnnnnnnnnnnnnnnnnnnnnnnnnnnnnnnnnnnnnnnnnnnnnnnnnnnnnnnnnnnnnnnnnnnnnnnnnnnnnnnnnnnnnnnnnnnnnnnnnnnnnnnnnnnnnnnnnnnnnnnnnnnnnnnnnnnnnnnnnnnnnnnnnnnnnnnnnnnnnnnnnnnnnnnnnnnnnnnnnnnnnnnnnnnnnnnnnnnnnnnnnnnnnnnnnnnnnnnnnnnnnnnnnnnnnnnnnnnnnnnnnnnnnnnnnnnnnnnnnnnnnnnnnnnnnnnnnnnnnnnnnnnnnnnnnnnnnnnnnnnnnnnnnnnnnnnnnnnnnnnnnnnnnnnnnnnnnnnnnnnnnnnnnnnnnnnnnnnnnnnnnnnnnnnnnnnnnnnnnnnnnnnnnnnnnnnnnnnnnnnnnnnnnnnnnnnnnnnnnnnnnnnnnnnnnnnnnnnnnnnnnnnnnnnnnnnnnnnnnnnnnnnnnnnnnnnnnnnnnnnnnnnnnnnnnnnnnnnnnnnnnnnnnnnnnnnnnnnnnnnnnnnnnnnnnnnnnnnnnnnnnnnnnnnnnnnnnnnnnnnnnnnnnnnnnnnnnnnnnnnnnnnnnnnnnnnnnnnnnnnnnnnnnnnnnnnnnnnnnnnnnnnnnnnnnnnnnnnnnnnnnnnnnnnnnnnnnnnnnnnnnnnnnnnnnnnnnnnnnnnnnnnnnnnnnnnnnnnnnnnnnnnnnnnnnnnnnnnnnnnnnnnnnnnnnnnnnnnnnnnnnnnnnnnnnnnnnnnnnnnnnnnnnnnnnnnnnnnnnnnnnnnnnnnnnnnnnnnnnnnnnnnnnnnnnnnnnnnnnnnnnnnnnnnnnnnnnnnnnnnnnnnnnnnnnnnnnnnnnnnnnnnnnnnnnnnnnnnnnnnnnnnnnnnnnnnnnnnnnnnnnnnnnnnnnnnnnnnnnnnnnnnnnnnnnnnnnnnnnnnnnnnnnnnnnnnnnnnnnnnnnnnnnnnnnnnnnnnnnnnnnnnnnnnnnnnnnnnnnnnnnnnnnnnnnnnnnnnnnnnnnnnnnnnnnnnnnnnnnnnnnnnnnnnnnnnnnnnnnnnnnnnnnnnnnnnnnnnnnnnnnnnnnnnnnnnnnnnnnnnnnnnnnnnnnnnnnnnnnnnnnnnnnnnnnnnnnnnnnnnnnnnnnnnnnnnnnnnnnnnnnnnnnnnnnnnnnnnnnnnnnnnnnnnnnnnnnnnnnnnnnnnnnnnnnnnnnnnnnnnnnnnnnnnnnnnnnnnnnnnnnnnnnnnnnnnnnnnnnnnnnnnnnnnnnnnnnnnnnnnnnnnnnnnnnnnnnnnnnnnnnnnnnnnnnnnnnnnnnnnnnnnnnnnnnnnnnnnnnnnnnnnnnnnnnnnnnnnnnnnnnnnnnnnnnnnnnnnnnnnnnnnnnnnnnnnnnnnnnnnnnnnnnnnnnnnnnnnnnnnnnnnnnnnnnnnnnnnnnnnnnnnnnnnnnnnnnnnnnnnnnnnnnnnnnnnnnnnnnnnnnnnnnnnnnnnnnnnnnnnnnnnnnnnnnnnnnnnnnnnnnnnnnnnnnnnnnnnnnnnnnnnnnnnnnnnnnnnnnnnnnnnnnnnnnnnnnnnnnnnnnnnnnnnnnnnnnnnnnnnnnnnnnnnnnnnnnnnnnnnnnnnnnnnnnnnnnnnnnnnnnnnnnnnnnnnnnnnnnnnnnnnnnnnnnnnnnnnnnnnnnnnnnnnnnnnnnnnnnnnnnnnnnnnnnnnnnnnnnnnnnnnnnnnnnnnnnnnnnnnnnnnnnnnnnnnnnnnnnnnnnnnnnnnnnnnnnnnnnnnnnnnnnnnnnnnnnnnnnnnnnnnnnnnnnnnnnnnnnnnnnnnnnnnnnnnnnnnnnnnnnnnnnnnnnnnnnnnnnnnnnnnnnnnnnnnnnnnnnnnnnnnnnnnnnnnnnnnnnnnnnnnnnnnnnnnnnnnnnnnnnnnnnnnnnnnnnnnnnnnnnnnnnnnnnnnnnnnnnnnnnnnnnnnnnnnnnnnnnnnnnnnnnnnnnnnnnnnnnnnnnnnnnnnnnnnnnncacaggattctagagaacagcagagggaggaaagaaggaccctaatgcagacttggtagacagggaaagctcctggggatgttttgagatcttcagaatgttgagttggtggaggtgggagggaggtgaatgagagacctcttggccaggagcgttgaaacttcctcctatctcccttcttctcctcttcaagccactgatctttggctggggttcgctaagtcttgaggactctgtttctcttccagattggagcagacaccaatgcctatcatatttggaagcgggacagtggtgacwgtattgcagcaactggcaaatgaggtatgggaagaagtatcacatactcctaatcagctaggaacaaaagacggacagaaaagtaacctttagagtaagaaaaggaccctagtactgtccagcactctgcctattctcacctattcccagccagtggctgagccaagacacagggatctggcttgttctctacggctgttagtgtgtttctgagaccctaagacctaatctaccctttgggagctggttcccacttatccttgaggttgctaagcaattgttctaaccaaccagataagcccagccagacagtaattgcctccctattcctgatcctctagcagggattgagctaactgaatttagcagcactcctgactgctaagggcccctgaggcagctctaaagtagagasagactcaggtctcagagacccaggctaaactagaggtgaccctgtggtgctgaccttgttctttcccagtttcccttccctgtcaatataatcctgagcaacccatggctatttgaaccacttataagcaggtaaagtattatctttccttttttcacatccctcacctcaaacctacccaccccccaggcccctctccttggcttaactgggcctgactaatcatccctcagccaccagatactgcatctctaagtgtgtatatttaagacatctctaagaygtctctctcagtcttaaagatccccaaggttcaggaaagtgggtaatgtttccgccctttccttcaccccattgrttctttctaacatctgaccttggtccttttgttttaggtttatggagagaaatcccttaaccaatgcaataatcaggaccaccacggcactcaccatattcaaagcargggtcaaggtaacatccctggttcctccccatatagcttttccctaccgccctccactcctcccttccttgaatctatctactggctcttccttccttctgtgtgtgtcagctggatccaagcctagccacgcaaagacataggcctttctgaaatcttgaagggagttagaccattcttgtaactgccagtaccaccagcacaacttcagggggcaccattcacctagagtacaatgtgaccttgaagcactctagtaatcgggtatataagtgaatgatgcctctgaattaattcctggcataactcactggacygtccagtgtgtcagctgtagtgttcatcagaataatagcactgtgtcctgacatttgaatggtgttttcatctccccaggatactttgttactccatctgagccttctaagagtcctatgagtattgccccaatacccagttgagaaaacagaggcacaaagaggttgcaacagctaatttgcaacagcccagctctgtccctgaccacttagtgcttttttgcaccatacgagttcaaagaaagatatgcacttggggagtctcccggcctccaaggaacaatccctccatagcctaactcttttctccagttagtcctggattcctcctggtcaggcaaaaaagtcagattttacaactggacctgggaaaccaccaatccctgctagaaggtcgggaatggggaggcaattactgcctgactggcttatctgattggttagaacaattgctcagcagcctcaaggataagagggaaccagctcccaaaggttatgttaggtcttagggtctcagaaacatactaacagccctagagaacaagccagatccctctgtcttggctcagtcactggctgggaataggtgagaacaggcagagcactggccagcactagggtccttttcttactctgaaggttacttttctgtcactcttttgttcctgcctgaccaggaatatgtgaggagtatgtgttcttctcatccccctcaaggatcaaacctgatgtgagccccgtgctatgccatgatgggggtcaacagaggctctggctgccccatcgtgagtaagcactaatgttaacagctgcagaaatgtcctgggtgtgctgggaaagaaagtgcacacagaaggcttctaatagcacagcatggggccaaaacagagatatctgggtgatcagagaaagcagccttgctctgaacatctctgtgaycccctgcagcaccaagaagcaggaaggtctggcttaaagcagagacacsccttcagctctgaatataacatgtcacttagttcagagaagacaagaggcagactagaaaagctaagccttgggtccttaagtcaaatcagccaactctgcctgagctgaggaaattagcatttcctgggcaggcagatgtagaagatttgaggttgactcaagccagggttttgtgcttctctctctagttcaatgtcatccccccagtggcccaggccacagtcaacttccggattcaccctggacagacagtccaagaggtatgtaccatatgttccagacaacaactcatgcagcatcagggagatgtggccctcagggcccgggtttaactacagtcctagggctggtccagtgtcccatttattcaaccaacatttttcaaagacaacctatgcaccggatacttcattaggattggagatcctgggtttgggtaaacatggggtctgaaatggaagatgagtatgaataaatgatagcaatacctatagtaacaaacattatatataacattatatatatgtagtagtgtagtaggcttgctgtgtatttggcacctttcttcctttcttttttttttttttttttttttttttttgagtcagagtcttgctctgtcgcccaggctggagtgcagtggcacgatcttggctcactacaacctccgcctcccgggttcaagcgattctcctgcctcagattcccaagtagctgggactataggcacgtgccactatgcccggctaatttttagtattttcagtattttgtattttttgtattttttgtactttgtatttttgtaattttttgtattttgtatttttagtagagacggtgtttcaccgtgttagccagagtggtcttgatctcctgaccttgtgagccacccgcctcggccttccaaagggttgggattacagacatgagccaccacacccagccatatttggcacctttctaaggtatacccatacattttaatcctcacaactacccaccctaaatctgcatttaactggtgaaaattgaggtacagagtaccagagcaatcaaacagcatacccaagattatatatctagcagtctagttccagagtttgtgcttttagccacaaccctaaactatgattataaaaattagaggtgaacaaattgccataggaccactgcaaagaaagaaattcatgctacttcttagggtcaaaaaagtcttttctgactactaaaatgttgaactgggccttagaggaaaaacagaacttggctagaagtaagacattcattgtggcttaacgaatagaataaactggggacaagtaataggagatgaaaactgataggaaatggagttgtagtttagggatctaggccttgtatgctatgctgaggagtttgggccctaatctgtgaaatctgtgrcaggagagaacttttagaggtcttcaaccaaatactcagatttgcttttagagaggtcatgctagcagcattgcagagggagtgctggaagagaaggagacagagagctatttcagcatcttaggtagtgcatgtgaaggtctggactgaggccatgctcgtggggtggagaagagagcaaccaccagaggtgggagagagktgggttcaataggatgtggtatgtatatgggtatggagcgagagaaaagcaggatggctccaaggtttttaacctgggtagttgaccaagtagttaatgcctttgactaagattgggaattcagaaattaaaacaagttcaagaatatcataatttggaagtttgagaagcttataacatatgaaataggcaattataaatacctcaggtctggagagagatatgaactagagatataggctggagtgtcattaacatcatgggaacctctagattcaataaaagcccatgggaagaaggtgcagagagctaggagagaaaagagttgaggccagagccttgcaatggtctgctacaaacatcagtttaaaaatgaatgtataattgcaaaccacgatgagtgctataatgaagaggaacctggtgcttgttagagaatataacaaggaaccagaccccatctgggaatcaggcagggcttcctaaggcagtaatgtttaagctgaaarctgaagggtgagtagaagttacacagaatgtctgacatccacagtaaatgccagcttatttaaacatcaggctgagctaaaaggaattcaaawggtaaacccaatgcttcaaaaacaaaaaaaagatccaaaaagacaacccagtgactatcagatgagtaatacattccagaatataccagggttaggggcagttctgtgccacagatcatcaagggtcagtggcacttggacttctatggtcctttctcctaagttcttccccagagaggactttaattgtcctcatgcaaggagagaggcacactcctcattgtagagcggggagaaggttgacatcctgcccagagccacccagcattgagggggttgggggagtggggggtagttaggaccaatgtgagccctgggttctcctgcctttcatcaggtgccaacctttgtcctctccctggggtctcatggggccaggaaatcactgaattcccctcattgagcttctttccactagtttttttccagcctcattccaactccatgccctttccaagggctgttttccacccagctggggctttcatctccccaggtcctggcactcttccctcctctctactcccttgccacagtgaccttccttccggtctctctgatgaaacccctggaatccctaggtccatcctgcccacgtgccgcagtgaggaatggaaagcctccatattcagaaagcttgtgggcgcatttgtcctggttactcctctccctccagccccagttccatgcgtcaggaacactccctgctgcactccctgtgcacagagcctcgggctggatccagcaggaacacaggccgcccccagagttctcttgctccatattcaacttcagttgtagataggtctccagcacctatctgtgaggaacagaaccttcagaaatccaagaggctgccatgtggaaaggaaggtgtgtcctgaatgggcctgaaggagtagagagaaggccagtgggagatgtttgagggagtctccacttgagggagagttttggaatgtgctatcttggacaatgattgtgctcctcatcactaaaagggctcaataagagtgttgtagagaagattctttcctttcttccttcatttattcattcaagtgtctattggtagctactgtggactagacattcttctaagcatttgggagaatggtgaacaagacagacaagattcccattctaatggtgtttacattctagcgaagagacagcagtaagcaaggaaattttttttaagtggtaaataccacaaagaaagtaataggatgctgtgtcacagagtaattgtggggcagaagtacagcagtgaggtcctttaaatgtgatggtcactgaagccctctctgaggaggagcaaagacctggcaatagcatccaggcagcaagagcacaaagtgggaagcagtacagatgccctctaattttgacaggtaagattctgctgagtgtttatgatgcgtctagtactatattacatcctgtggagtatattcattgtcaaaaaaaggagaggcagggccaggcatagtggctcatacctataatcccagtgctttgggaggctgaggccagaggattgcttgaggccaggagttcaagaccagcctggacaacacagtgagaccctatctctacaaataaaaataaatattaagcaggcacactcctatactcccagctactcacaggaggctgaggcaggaggatctcttgatcccagaagttggaagttacagtgagctatgatcacaccactgcactccagcctgggtgacagagcaagacactgtctcaaaaaaggagagggattagatattacgggacaccatatctgagttataagcaagatatttataactgaactactcaaaaatggaatggtatatagcatgcagtgacgagctttctgccactggaaatattgcagcagatgggatgacaacctgtcttgagttttctgatgagcagccttacagcaggacagaagctggacttgctaactctaaagaccttacctgtttttaagtatccattgtccttgccttcaacagctgtaccgttcacttagaggaaaatatctctacacataaaacagagaacaacataaggttgtgagaatgcactgaaagaactacaggagatctgggcccagtgcagtggctcacgcctgtaatcccagcactttgggaggccaagctgggcagatcacaaggtcaggagttcaagaccaggctgaccaacatggtgaaaccccgtctccactaaaaatacaaaaattagctgggcatggtggtgggcacctgtaatcccagctactcaggaggctgaggcaggagaatcactcgaacccaggaggcagaggttgcagtgagccaagatcacaccattgcactccagtctgggtgacagagcgagactccgtctcaaaaaaaaaaagaacaggagatcagagaaatgagagattcgtgtgctctaaagtcacctttgaggtctctcaccattgacaagtctctcctcctagttccattcttgtacctccgattcttgcccaaggtggtccctctattctaaataagcaaataacagctagcattttttgagtgcttaccatgtgccaggcactgccctacgcacattacaccttttttttttttttttttttttttttgagtcggagtcttgctctgtcacccaggctggagtgcagtggcacgatcttggcccactgcaagctccgcctcccgggttcatgccattctcctgcctcagcctcccgagcagccgggactccaggcgcccgccaccacgcccagctaattttttgtatttttagtagagacggggtttcactgtgttagccaggatggtctcgatctcctgacctcagcacattacacatattaactccagtaatggtcaccaccacttatgaggtaggtgctaccatcatctacatgttaacagataggcaggctgaggcacagagaggttaagaagcttgtccaaggtcatacaactgtgagtgactgaggcacaaagttggttgtcacatctcaatttttgtgcctgcccttctccatgctcagacgatctgttaccttgtctctgtcagtttcatatccttccttgaaacttgggctaaacattcataccactaaggagtccatctcagatgaacacctcctctcaggttatactccacaccacctctaactgtacgtacttaggaagcagtaaagcattattcctgtaaagtcagacagatacccgacctgacaatactgactgtataacccatggcaagttatttaatgaatcaacacctattcttatttttattggttcacatcttttaaattttatgtatccaagatttattgcatgacttttatgtgcttgctactggaaatgcggaaatgagatagacacagtccctgcccttgagtcagacacagtccctgcctggcccagcagctagtgggaaacctgagctcctgcagcctcttactgaagggatccattctgcatgccttcttcgatttctggagggacttctaaggaatttggggcagtgggcacagtcccaacccacctcatggaggctgacttcagaaacttgccaatgggctgagaatatgtcaagaccgtgcattaattcttgtattaggatatttgtattataagtgctagagtgaaaatatgctctgagaagtgagaatacactttgatgacccctttgcccatccaatagcaggatatttgttttgattcaaatggtggtttctaagccagaagtgggaaccttcacttcctctccagactcaactcctaacattcttctggcataaaagaggtactcttggggccgggcacggtggctcacgcctgtagtcctagcactttgggagggcaaggcagacagatcacctgaggtcaagagtttcaagactagcctagccaacatggcaaaaccccgtctctactaaaaatacaaaaattagccacacatggtggtgcatgcctgtagtcccagctacttgggaggctaaggcaggagaattgcttgaatccaggaggcagagatcgcagtgagccgagatggtgccactgcactccagcctgggcgacacagcgagattctgtctcaaaaaaaaaaaaaaaaaggtactcttggccaggcatgatggctcacacctgtaatcccaacagtttgggaggccaaggcgggcagatcacttgaggtcaggagtttgagaccagcctgaccaacatggtgaaacccagtctctactaaaaatacaaaaattagtcaggcatagtggtgcatgcctgtaatcccagctactcgggaggctgaggcaggagaattgcttgaacctgggaggcagaggttgcagtaagccgagatcgcaccactgcactccagcctgggcgacagagtgagattctgtctcaaaaaaaaaaaaagaggtactcttaagataatgacccccattcaggtgatctgcagctatgggacaaccccccctttctagagcagaggcagttttaaagcaactactgaacaaatgggttgggactagtgctggagctttggagagcaagggtccctctaagccagtctcctggtccattcccacgtggctctatgtgacctaatcctcagggtctggtctacttcctgactgcagccaggaatttttctggattcactctagtcgtttcagacagaattttctaggagtttccttaggttctttcccaaggaaacgaagcaaagagagaaaacttgaatacaagtatcataacttctgactttttgtctgtgttgagctcatcttcctggctccagtgcagctggttacaaacaggaagcagaaatgcccagagagggggaaaaaagtgtgtgacccttttattacctgtctgaggttctccgaggctgaagccaggtcatcacatctattccccagcctcgagatgattgacattctgctgtgtcttcgacactttcatccagcctgtggctcaccacccaaggggaaagatacataacttcctgattttccaattcccatccaactttccatcgaagggatatctcaccaatgcccttggaaggagattccatgttcctggctgaaatggtgcttttcgtaagaatagctataggctttcaagagagcccaggcattgctctgtagtgacccagtagtcaattttccagccaggccatccccttgccacttcgttggtttgattgctcatgtaaatttgttccaattcaagatctgattcatgactgtaagacaagtctcccaaaacatttaacctaaatctatcatgctgtaggttgctttccaggaagacccagctcttacatcacctatagccagtcagctgaaattgaagtcccagtgcttaaaaaaaataagtcctgtctgtaaaccctgaggctctgccttgctggaaagaaatcaggatatttaagcccatattgtacatgtatagaaatcaataagaaatcgaaccccctttgtttctaccctggaggtcctagaactcacgaaraacaytgtggctgataacagagtccagttccatgtgttgagtgcctttgaccccctccccgtcagcccttctgatgacaaggccttgggctaccagctgctccgccagaccgtacagtccgtcttcccggaagtcaatattactgccccaggtaatgacttcatcagctgtggctggagggaggagggggctggaactgtttcctatccaatgtctacttccccacccccaccctagatgttcagcctgtaaacagctggctgcttcccctcctgatgagactagaactgtattttcccttcagagtggaagtgagaacgcaaacaggaaaggaacagaaataataaattaggtcagtcaagcctgggtccttgcttaacctaggccagccactctggcatagaggggagaattggcttagactactccctcctctctaggagccacagaaggggccaagatcttcccagagtctggttctgatccattctaggataacagctcagcaggagagctcagaatcctcagctcagaaaagcctcccagcccataccatttgccttaacctaatttacgtttcccagcccagaccaatcccagcagcacccctctgttccccttctgcagccttctagcaccccatccaaatctgtgctttgcagacagtggttctccaatctaagagtggaataggtctccccagtgaactattaaaatgcagattacctggacccactacaaagatttgggttaaccaaatctggaagggaccctggaatttgcctttttcacaaatacccccaggagattctgacacaaggtgatgactaactatagtttgagaatctctggtcaatggttattgctctaatattaagacattgctcagccgggcacggtggctcacacctgtaatcccagcactttgggaggcagaggcgggtggatcatgaggtcaggagttcaagaccagcctgaccaatatggtgaaacctcgtctctactaaaaatacaaaaattagctgggcgtggtagctcacgcctgtagtcccagctactcgggaggatgaggcaggagaatcgcttgaacccaggaggcagaggttgcagtaagccgagacagccccactgcagtccagcctgggtgacagagcaagactctgtcaaaaaaaaaaaaaaaaaggagagagacgttgctcaataataatgatattgctcaattattaatgctctaatattaaggcctgtgtctagttttcttttctcttggtttaatcagagattcctccaaacatccaggaacccggccctcacaatcccagattctcctctcttggccctcaaaggctacctactctattctctttcttctggagcacttactgtaatccaccaatggggccaggcttttgcagaaaaaagataggcagcaatcaaccacaaagcaaggaacttgaagggcctggatgtccatttgaaaccaggagtggaagatggaacaaaacacaaattaccatctcaaatcaccgcacacacttgaattgatcctccagggtgtcttttcccaaagaacacacctatgggcacaagtcccagcctctgctaggtgacctgctaccaccttcaggagagtgggaaactggaaagagagtatcctggcactttccagacctaaggtttgactctaggaagacttcagaggatgagaataacaggaaattttgttccaattcaagacggtgatattttatagtagtaaagttctcccagagggtatttatttctgacctagagtgatacagaataaaggtcaggtgataaagaagtgctatctagattctggtttcttaaatagcaaatggccatggccttgggtatgaaatgaagatwctggccaccctgggcgtcatggggaacagcaaacagccatggccttgggtatgaaatgaagatactggccaccctgggcgtcatggggaacagcaaacggccatggccttgggtatgaaatgaagatactggccaccctgggcgtcatggggaatagcaaatggccatggccttgggtatgaaatgaagatattggcctccctggtcgtcatggggagaggacacttccaagggcatttgcctggctaattttttgtatttttagtagagacagggtttcaccatgttagcaaggctggcctccaactcctgacctcaggtgatctgcccgccttggcctcccaaagtgctgggattacaggtgtgagccactgtgcctggccttttttttttttttttttaacctaggttgaacttgaactcttgagctcaagccatcctcctgcctcagcctctcaagtagccaggatgacaggtacacaccaccatgcccagcctatgtttaactttttgaagaaacactaaactgctttcgatagctgctgcaccattttacattcccgccagcaaggtacaagggttccagtttctccacatcctcaccaacatttattattttacattttggattatggccaacctagtggatgtgaagtggtatcccactgtgattttgatttgcatttcccaaatgactaacctaagtaaccttctaatttgnnnnnnnnnnnnnnnnnnnntttgattgctcatgtaaagcccctttcctgttgatcttccctctctagttacttctatggcaacacagacagccgattctttacaaacctcaccactggcatctacaggttctaccccatctacatacagcctgaagacttcaaacggtgagtggaacaggtttgagcagcaggtgggagaaaagaaatacacttgatgtgtccttttcctaccccatgctcctggcagtccacagaatcagggggaaagccaggatttggcaaaatgaaatggagacattgtagaacctaacccatctactgtccttattgccagagtctcattgtcaccccctagaatttatggaaattggcccctcttttacaaagatggagataattgggtgattggggagaacctggtggaatcggtacccttgggtgctaatcccagctcttcctctctttgggagagggcttatcctctggaccccgttttctccacttacaaaatggggagactcctcagcattttctgaaatgcagacacatatgaggtcaaaggtggatgcgtgttttgacttctcagaagaaagcactatggaaatccaagatgtgagcaccaattttaactgctctgtgtgaattactatttttgtgggttcttcagcacattttcaatcctggggtttgggaggatgatttccatttacctctctgctacttatcacgtccagacttgatttccccatcctaaatcctctgtagacagagtgaaaatatttgaataggagcttaagaacagctttcatgtttttgttttttaaatgggagatgggtaggtactctgtttcctttcatctttgagattacatatgtagtttggttgttgtttgttttgttttgctctgttttgtttcactgtggggaggcaggttggtggatgtgaggtctgatagtaaagtttctaggtgccacagaaaactgggtaggcaccctgggcagttgccttccctaccctctcttagccctagtaagtgggasagtaggagactggcttagagatagtctagctaggcattctgtcctaagagaaagacaattggaaagatagttcttggccaagtgtggtgactcacacctataatcccaatactttgggaggctgaggcaggaggctcacttgagcccagaagtttgagaccagcctgggcaacataatgagactccatctcttcaaaaaaaaatttaaaaataaaaaamttagccacacacctggggtcccagcaactcaggagctgaggtgggaggatcactgaaacccagaaggttgaggctgcagtgagctgtgattgtaccactgcagtctagcctgggctacagagtgagaacctatctcaagaaaaaagataattctcccggaggacaaattattgaatggatttcagagcaggagattattttggactccccaggagtttattccacactgttctttgtcacgagcatagatggatccctgagaaacgaccaatgtgcatcygaaatctcagatggcccctcccttgcccctctctttcctagccctggagggccagtagtttccgggttggtgagggaagtaagggaagtgctctgtgataacacttgtgctgtggcacttggccctcccctccttccctaaatgcaccttactttcctcagcatccatggagtcaacgagaaaatctcagtccaagcctatgagacccaagtgaaattcatctttgagttgattcagaatgctgacacagaccaggagccagtttctcacctgcacaaactgtgaggtcaaggggcctgctgggttaggcatgcccgaccccgggacaggactaacccaagggggaaagctagtgttgatgaaacttttgatcaaaaccacattgtaaaacattgcccatctgtcttgctcactcttaaactctcccaagaacaaggccggggtaaggtaaagtcagcagaaatctggcttctcccttcctcccgacatctgcatcccttgatccactggcatttgctgccctcttgtcccttatctgtcttatgctggttatttcactgcttcaccttccaggcttgacttaacaaatgtagatttgagaaatctcaaccagttgttacctgataggagtctttaatttagggcactcttgctgggatgctttctccagagcttatatatttcttcttactagaactttcttcccccttttattcccctctcttcttggactcatgagctgtctcttcatctctcctctctctcctgcatctctccccttactcttcaatttattctacttctggacctggacttacccaaactgtgatactaccataattgtcaccataatcagtcaaataaagtgatctgtgcatcaccagctggtcactgagaggtgaaactgaggcaggggctttggaggaaccccaaacctcctggttctggaggccagagactggaaaagaaagcctctgtccttgggctcctcccaagggctccctgggctttgttccctccctgccctgttcctgacacctgctgctactgtctcaccacaggaggcactaatctgtggaaacatttccctggcacatctgatgggctgagctcccaagggaagggctctcggagctcaggaccagcaggtccatggccctggcatcatgtcctggttcaggcagatcaagggaaagtggaggaggagggggaggctggcttgaggggctctgccctgtctggtggggtatgaggaggacaaaccagcctccactggggacagcagaattcctgtcttttttctctgggctccaaccctgagcatatttgaatctgctcagtagctgccaggtggggggcactggaaggcagcatttcttggctcaaagctggaagctgtgctttgtggatcacaagagagtctggatcacgaaggaagacgcagcaggagctgggactcgagagacaccctcttcttctcctcaccaggcaaggaccttccatgtcctcctgggctttgacagcagtgggctccttttccctctcctcctaacccccttccccctcaagtccccagtttctcacctccctccctggatgtgtactgtttcttggagctcgggcttcatgaaaagtgttggaaacacagtgtggggattattccagcttttttgctactccccctaagattcacattccttcctttgccctcccttttttggccaattcagtacttattcagcctttgttagagggcgagctgaagaacaaaaataatccttcacatttctacagagctgtacagagtgctttcatacatcttatctcagcagagacccacaagaaccctgcgaagaaggcattgttactccttcttacaggggaggaattggttctcagagaggctacacatctagctgcaggcagttggctcaagcccatgtcacctggctccaaactcactgttattctacaatcctacgtaccaatagaatctacttcccatcaattatcttatttactcatcgcaacaactctaaggtgttactgttcattttacagatgaggcaactgagtctcttaggttaagtaacttgtccaaggtcatgcaggtgccaggagctgagtctatctgaatccaaagcctgtgctaaaagtactgaaactgagactcagagaagccatttgacagcattcttaaggggcagccccagaattgaaatgcaggtcaaaaatccccaagtccagtacttcttcaattgcaccgtgctgcctgccccaagaacctgtggtgtgtggctcattcattctgacccagagagatgtcaaggacaaaggctgttctattgttggacttggttcttagctctagctatctgtattcctctggctgaactctccctattcacacctctcccgctgtctgccagcatttctttccagccccacccccagcttctgggttcagcttttttcccttttctctgagtttgggaacaaccaggtctctaatgatcatagagcaactgggagaagagtgaacagcagaccctctcctcctctagtctcactacactcttccagctgtagaaaaaaagctccagagggggtaggaagcccatgagagggaactgctacaaatcctggctccgagaacgcatgaattacagcccagtggtccctgaaggcttctcgagagagcagttcaaagtccccagcctggctggaacaacagcagcctcaagactggctggggcttggcgcagtagctctcgcctttaatcccagcactttgggaggtggaggcaggaggatcgcttgagggcaggagtttgagactagcctgagtgatacagtgagaccatcatctcaaaaaacaaaagactctggatgggatgaggcaacaaatcggtgactttccgccactccgtccccatccatctagaccacttcccaaatcccccaatgaaagagctccaacagataaccacaggtacatcctacacccctatcaaggacttagctcaagctttttacacctcactacctaaggcgagaaggaagacaaaatattcataagcaaagagaatgggaacagaaagtttggctggaatcccttgattgtgaatctgggttgctaaaaacatggccatcctaaacccagtattccttttatccaagggagataataggagacaaagttcctacttgagagctgaacatttcattaaatttttttttgaaaattcaaatctaatcaaagacggttggtttttgttgttgttgtttcttgagagggggtcttgctctgtcacccaggatggagtgcagtggcaagatcatgactcactgcagcctcaacttccgaggcttaagagatcctcccatttcagcctcctgaatagctaggaccacaggtgcacgtcaccacacctggctatttttttttctatttttttgtagagatagggtctcactgtgttgctaagactggtcttaaactcctgggctcaagtgatcctcccactttgggcctcccaaagtgctgagattacaggtgttagccactgcacctggcctaatgaaatatttttataaaaacaaacctacttgcaattctagcattcagtgtccatctaatgtcaataaaaagaaccagtatcatgtttaacatgttgtatctagaggtacaaatataaaaatttaaggataatataaattatttattactacaaaatgttccttagctcccacgtgcaatgttgcaaacactacactaattcatgggtacctccagaaccagaaactggaacataaaacagagcaagaaaatggacactgagcactactggtagatartatttcatgcaagaattcactacacagctgagcgcagtggctcacgcctataatcccagcactttgggaggctgaggcaggtggatcacctgtggtcagagtttgagaccagcctcgccaacatggcaagaccgtctctactaaaaatacaaaaattagctgggcttggtggcaggcacctgtaattccagcaacttgggaggctgaggcaggagaatcgcttgaacccaggaggcagaggttgcagtgagctgagatgaccactgcactccagcctgggcggcagagcaagactccgtctcaaaaaaaaaaaaaaatccactacagacagggcgcagtggctcatgcttgtaatcccagcactttgggaggttgaggcgggtgaatcacttgaggtcaggaatttgagaccagcctgaccaacatggtgaaaccccgtctctactaaaaatacaaaaattagctgggtgtggtggcatgcgcctgtaatcccagctactcaggaggctgaggcacgggaattgcttgaaccggggaggcagaggttcaagcagtgtgcagtgtgcagtgtgctgagatcgcaccactgcgccccagcctgggcaatagagggagactctgtctcagaaaaaaggaatccactacagccatgctacctaagaggaagcatttgacaagttaattttcttttctcttagctaagcactttgacagctcaactcctgcctatactccaaaaccacagtggcctccaaagttcacactgatacaacccacaaaccttcagggcatccagacacagttacctttttcttttttaaagacataaagtgtgtttgcttaggtagcacatacactaaaattggaacaatacaaatttccaattaaaacaacacaatcgcacaaggataacacaaaaatatgtgaagcactccatatttttaatgtatacatatttcaaaacatcatgtacacaataaatgcatacagtgtttatctatcaacttaaataaatgagacagaacaagatatataaagaagtgacctccggagcctgaactgtattagactcagtaatgtgtgttcagtgttactggttgttctgtgccagtgctgagcacagaatcccaagggacagaagcatctctgtgtttttaatggatttatttcctttgtggttatattatatgatgccttctaaagcattaagttcgaggcagggggctttcttgcctgggtctgagagataaggtgttattttatataccacatggtgcctggtctggaaaatcaggaaagcctctggtgaggaagtcatgactgaagctgagacttcaaagttgagtaagagttagctaggcaaagcacagaatgggaaaaaatatttgcaaactttgcatccaacaaaggtctaatattcagaatctataaggaactgaaacaattgaaaaagcaaaaaacaaataacccgattaaaaaatgtgcaaaagacataaacagacactctccaaaagaagacatacaagcagccaacaaacttatgaaaaaaatgctccacatcactaatcatcagagaaatgcaaatcaaaaccacagtgtgataccatcacacaccaaccagaatggcagttattaaaaagtcaaaaaacaacagatgttgacgaggctacagagaagggaagacttacacattctttgtgggaatgtaaattagttcagccactgtggaaagcagtttggagatttctcaaagaacttaaaacagaactaccatttgacccagcaatcccactactggatatgcatccaaaagaaaacaaatcattctgccaaaaagacgcgtgcactcacatgttcatcacaccactattcacaatagcaaagacatggaatcaacctaggtgcccatcagtggtggtttggataaagaaaatgtacatatacaccatgtaatattatgcagccataaaaaaaaaaaacaaaatcgtgtcctttgtagcaacatggatgcagccagaggccattgtcctaagcaagttaacacaggaacagaaaaccaaatagcacatgtgctcacttacaagtttgggtagtcatggacataaagatggcaacaatagacactggggactgttggaggggagcaaggaaaggggaacaaggtcgaaaaactaactgttgagtactatgctcagtacctgggtaacaagatcattcatacctcaaacgtcagcatcacacagtatacccagttaacaaacctgcacaggtacccctgagtctaaaacaaaacttgaaaaacaaaaacaaatgaaaatatatacccctaaaaaggcttgcacacattgcatatagcagccttatttgtaatagccccaaactggaaacaactgaaatgtccatcaacaggtgaatgaataaac

SEQ ID NO: 93755 - DNA, 13155 bp, Homo sapiens
atgttaaagagaccttttgggaaatgatattgattgtgtgacaaaatatatttctgaatggaatgaaattccttcagtttctagtaaaattattaatgcactattatttattaagtattaagattaaaattagcatcaagaggaggatcccatttttacgaaatattttgaatcttctatttgcatccgtgtcttgaaggatgtgcacccgttgttactgttgttcgtttctggagggctggacgacagtgattttctttacacacatttgtgtacttttctgcactgtttcaatgcatttgtaacaagcatgtgtgatttttacaaaaatatgtgtgtccaggtttttgccatcaaaaaatatatatatttttttcttttaaaaaagcaaatataaaaaggcctcatacagtgaatgctgaagggggcaatctccatggattaatattctcatccgagtgcttactgtattttatttttttcagtaaaaaaataaagacatacggagtaggaggagggcctgactgatagcatgagcttagtttgataatttttcctcccaacgatgcttcttcagacaaacagaactcatgaggctgggtttccgcagccagtgagtggggacgggggaaaggaaagggctgtagtgagacctctccagggggacagagcagccctaagctgttgggggcccccctggctgccatccctgctgcagcgtccagcagtgggcgctgaccstggctttgctctccatcagcagccagtgggagctgtcaggagcgggggtcagaccttgccctgcttctgcgtggccctatcccacggtgccaacaagcgtggtggcctgccatggctggaccacatccattgcacccctaggccctggcccactctgggcacaggagacccatgtgcttagaccctccctcccctagagaggatgacacrtgccaggctcaccgctggccccacacccgctcaggcctccacccctccagccgccttgctgaccactctctttccttattgccattcactcattcattcactcacacattcactgcagggcggcgtgtaaagtgccagaaacacgaaaaggagcagaatgtatggagtctctgccttcgtggtcctcagcccgacaggtgagtgggaagatgggggtaagagagggcatgggtggagccgcatcccctccccttctgctgggagctgggtggcgaggggcagctggctgaccccacccgggctctggctgtctgtaaagagcttgtaagagaccctggagaaggtggactcaggctggcagctcctgagcttgtcttcaccacggcttcttttatgatttgcgcaactcttcccctcctgcccttccatctgtccctgcatctccaaaactatggtctatcaggaaaacagttccaattaagcaagaagaaactgatgctgcacagcaggggccacccaactggtgttgccacactggactgctgaaaccctgaccccaaacagaaggatctgtcctcttggttcatgagaatcaccttcttacttaggtcagtgtggggtttctgctgggcttccggaaatacataacaaagctactagctccagtatctattaagttctgctgctacaaggtagtttaggcacccagaaacgaggcccgcaggctgacttcaggagactggaatcaggtcccagagacagcccccgaagtgggatcctggggctctcctctcctccatgccagccttgtccttaggcctccgtggcgctgagatggctgctgcagctcaccaaggcctgagtccagagaaatggtgccgcttcagcctgagtcctcggggtcactctgatttgaccagtttgggccctgagccctcccagatcccattgctgcggctgtgggcattggatgtcctgatcggctagcactgggtcacacgccccatgcctgccatcggaactccccagaacacatgtatgggagggtccccaaacgggggctggacaccaggtgaccctccagtgcagccctcacagacgctggctgggtcccacagtcctgcccygccatgtttctgtgaggactgtggaaccagcagccatcaccacagagaagcagggaggggacgccctgggctaccccccgggaagcagcagatcccccgcgcgcctyccatctgagggacaggcagggacggtcactgcagctctggtttctggccttcgtgacatcttcccttgcaggctctgggcatgtctcacccgtctctgtcccctctgccatggggtccctgcccagagctcacctatttcgaatgtgtgcgctgctccttttgccaccttgtgatgtcaccaagcctgtgtgggtcctgcatgctgttggtgacaacctgcaaatctctaacttctgtacctcaagtggtcctgaaatcctatttgacttccccaaaacacttacattcctgggagtgtgacacagcttggaggtaggactcaggcaagggacaggagagaagacaaatgaaggcatcaggctctggtgtcctcaaagaccctcccctcccgatctcccactcaggggtgagctccttcccctccagtgggctgccgggaaggttgggggactcttcctagactgcttgggagtctatgaaatgagatcatcctgcccactgctctctctcccatgaggcccacagaccctcttgcaaacggaatgcactggcttgctcagtcagacacacttacactcgcaacaggcacgcggctgtcctcggttcagggccctcactcacggcagccctcccctcctccaagaacacacacagcatgacgctggggcccacaaacccctacacctcatgccccaaataaagaattaaagcccggattttggcaaatcaattttattgtttaaaaaaataaacgttacatttgacatagaaaaagacattttaaaaatgttcttaaaaggtttaaaaaggcatttgttctggccaggcatggtggctcccgcctgtaatcccagcactttgggaggccaaggcggatggatcacctgaggtcaggagttcgagaccagcctggccaacatggtgaaactccgtctctactaaaaacacaaaaatttgctgggcatggtggtgtaatcccagctactcgggaggctgaggtaggagaatcacttgaacctgggaggcaaagtttgcagtgagccgagatcgcgccactgcactccagcctgggcgtcagagcgagactctgtctcaaaaaaaaaaaagcatttgttctgaatgtgcctcatcatcccaggcaggcatctgtaagtttccattgtttccacaaaaaccagtggggttcccctctctggaaaaaagcacgaacattcttgctgcttggcaatgggtggctctcatgcccacacctctccacccaagggaacagtctctctgctcctcacctggcagaagcccagaccctgagtccctagcgcggggcagagcacagaaacatgatccagatgcagcaggccccgcccgtctagttctcctgcaacagcctcttagcactgctccactctgacctgcccggctggaatcacagttcccactccggcacaggtaaagatgagctcccaggatccagcaggggctctgcccctggggatctgccgccagccggctcttcccggtggacagaactaggaggggcaggctgtacccagcacatctcagagagatggaggcaagctgggttcctgatgatttccagctaatacaggtccttcctcctgcatgcaggcgccccgtaacgctttataacagacgcctctagacttctgtgggggtaaagtgaaggacccaaagcgacacaagtagtgtctgttcacacttccactttcaaagctaactactagctgttcaaatatactccatacagctttcagcaaatcaaagtgtttacctctcccacaccaagggaagaaaagatgcagactgcctttaaagcacctgtcagcaaggcgagggttttaaagatcagccttgagaatcaaagcagcagcagaagtgtcattactccagtgctctcccttcccgttcgtgggtcacacagagacaggcacatccccagcgctttgcaaacagaagcgctcccaaaagttggctagagggtacacttcggcaaagggatcatcttccccctggcttgctggactcttggaaatgcgtctgaaagcccttgccatcccgtcttgtgctgatgacagcatgagcccggttgcaccttgctcagcaacaagctgcgagatcctcagcttctcactcataccccaccttgagctgctgacggcggcctggagaaccgtgtgtggctgttcctggatgacatctgctgtcactagccttcccagaacacccgctgcccagggttcctgctgccttccccggtggacagattttgcagggaagactgaggaaatgggagggggagctctgctctaaagcagaaggcacagaaggtggggtttttgttttatagggagactgcccagtgtgctgcaaaaggaaaaccaacaacagggagtgcccaactcaccccctctgcatgagcaaatgcagatggacactggactgtgccgactgacaccgggactcacacttgctggtcagtggacgagaggtaaaagcaggcaggattattacaggaataaatctgcacttccaaagaggcagctcccatgactgagttacaatgcttggagcccccgagggcagagtggcaccagctgggaggttgacactgcatcactgcttcggatgccctcacaggctctgactcgctgccaggtgctggtgaggctggaagaacttccttccttcctatgtacaatgcaaacagtgccgcttccagtgctacccacacgggtgcagcctcacgggagagttgcggagagagggaatgcgttcagttcagccagcggacggccaggggtaagcggcccctagtgggtcacatggcctatgatgtctggagaccgcagatcttcaccctctggagtctcatttgcagagtctcatttgtcgtccggtcactgtggccacctcaccctcgtcaccacgggcctttcctgtgccgtgctcactctgacactgagatgctgccaggcagttttttttttttaaatcagtggagtaagttctaagggagccccatgtgcttaagataaaaacgtagctggtaaagtggaggcagaggctgcttctgtgaggctgcatatatcttacaggacaaaaagttttgtacttgaaaaccaaattctgggaaatagccctgcaggtttttgggaagcgtctccctccctgtcgtgagttccacctgggccctccgggagaacagggacaggagaaacacaagcaaagcagacaggcccggaattgggagcctgagccctgcatattttggaagggaacccctcgagggactagtctggaatagtaggccaaacggtaggaagctttgattactctgctaacttgggggcccaagagtagggctaaagcattgtctgcagagaaacaaacagggaaattcagtaagaagggcctattttaacttgcagttagcaggagaatttgtccccagattttgatctagcttaaagtcccttgattccttcccctctacaaatggcaatcacggttgccctagagatgctgactgacaaggtctcccaaaggaggggcccttctgccatttatgggcccctaagtgcacacgtgggcttccatgcggatggaatcattggtccccaccagggaacctggactgtgggagctgccgccaccataggacccaagggcttccagaccaggaagaggcaaacagcctgcctgggaacacagtgctggaacttgggacttgggttctgagcggggctgctccctgggctgttgtcatcactctttcctttttttttttttttttttttgagatagggtctcactctgttttccaggctagagagcaatagtgcaatcacaccyyactgcagcctcagtctcctgggctcaggygrtcctcccacctcagactcccgagtagctgggaccacaggagggcaccaccatacctggttttaaaactttttgtagagatggggtctcacyatgttgcccaggcyggtytcaaccttctgggctcaagtgatcctctcacctcagcctcccatagtgctgggattacaggcatgagccacacctagcccaatttagtgaattttaagaagcattttaaaaaaatgaaaactaaaacatagaggatatccgaggttctaaggktaagaatttctttatgaaacctgcttggaacacagttgtaaacaaatggactgatttatgatggaaggcacgtttcttgctgcagatcatggtctgaagtttgaaagccaccagcytagagggttctgaaaacttctccttcctaacacagctgaaggaaaaggggtgggtaggggcggaggcacagggacatctccaggtttggacttttccaacatgatttgcagaaggcacttgattctggaaagtagacctttggcatttcgaccctcacccacactcccacacccactctgcacagatcggtggtgcatccgaggcagggctgagttagaacaggacatcctagactcggcggcagtgactattattcagaaatggcacatcaagggccggcctgcccttcatcctgcaggggtacttgggcatgtggaggcccctttctccctggtgttgcaactggagaggagtcggttcctgaagaacagatgggagagtgctggggccaggtaccckgggagagaggagggaaatgmaatccggcacaggggctgcggggatmggggcagtcaggaggcggcagtgyggtgcaagggcccccccamgcrgccagctgtggaacttccaccacgactccctgtcctctcctgagcccgcccatcacgtgtagaagctcagatgctgggcgccaggagggcggcttcctggctctgggcaccgtggttctgtcctaacgaggggcgctctctgggtgtaaaaacagatgttctggctgggcgcggtggctcacgcctgtaatcccagcactttgggaggctgaggtgggtagactgcctgagctcaggagttcgagaccagcctgggcaacatggtgaaaccctgtctctactaaaatacaaaaattagacaggcatgctggccggcgcctgtagtcgcagctactcgggaggcttaggcacgagaattgcctgaacccgggaggtggaggttgtagtgagccaagatctcgccactgggctccagcctgggcgacagagactctgtctcaaaaaaaaaaaaagagatgctctgtctggcctgggttgttgttggtggccagagtaagtggtgtgaacaagagccccggcttgggaacatgtctcagactggcattgaaaatgaaagccaggattcctctaaatccaccgccttgaagtgtaaacagtccagagagaaaccgactttgccatgctccctcacccaagaaagccctctctcaaaatgcgctagaaagtttatatctgcctgatccagagagcaagtggaaggtgcggagaagccagacagaaaaatcgaccttaaccaagagttccatctcccagccttaagttgtgggatactgaacaaacaaaactacacatgtcctgggaattttgctttgtggtgtttttaaaaagaatgtcagagccctccttgggggcttcagaaaagcaggtattgctggcccatggcttctcaagatcacagtccccaacctatgctcactgagaagatacccgcttacttccccagtctcaggcagagagttcgtggtgaagtgataagtagcaggagaggccagcagacaggaagccacggggtcaccaaggggcagggagagaaggcctggctgcggccccgtcacccgccaagcgagcccctgaaaaggctgtgggcagcccccctgccagtgaggcctagctcctgtctggtgggagcagagccgcctggatggcccagtgtcactcgatgctccatctctctccccgctaatgagctgtcacctcagtgggtgatttaactggatctttcctggtaaaacaagaggggctattgagagcggaaacacccatccgggagtcccctgagatggaaatgaccctcttaaattggggatctctggaatgtcctgattatctgcacccagtgtgcttcctggaggaaggctagcaggacagaggagcagcggagggcaggggtcctccctgaggaagttgggggaatgagaccccacctccccacgcagagcaagtcatcaaatgagaaatggagctccaaacagcactgagatttctggggctgggcgcagtagctcacacctgtaatcccagcactctgggaggctgagatgggaggatcgcttgagcccaggagtttgagaccagcctgggcaacatagcaagagctcatctctgcaaatattttttttaattaaaaaagaaaaaagatttctggaaccctttccacagtctagtctttgccactgtattcctgttatcagccctcattctctataaatggagtctgaagaacagcaaagacacagggaggagcctggaattcctactgcacagccaggatggaggagacagggatggcaagcgggagcaggtggaggcagtgaagaggagggccagaggctagatgtgcagaggttctagaaggaggggcagctggggaaggaggggcttgaccccctcagggtctcaagacagtccccaatgcccctgctttgcacggggcaatgtactcccctgggcgcctctgcacccttctgtctaccaatcatgctctgaatgttccccgggagccagttcaaggatcacctcccccaggaaaccttccctgattaacctcagcccaccacgtcacgtctcctcttgtgaacgccggagtttgggcgccatcccgtgttgtgctggttgatatgaatgtgtaactgctggaggtcttttcttaagacttctctcctggcctgaatttgaagcttctcaggagcagactccatttcttccttgtttctgcatctatccaccaatacacagagctgccggtcaaaggcatcgggacaaggcttgtcctgccctctctggggcctgactgtgggatagaaggttctggagagccagggcacgctgggcaggtggcggggccgagaagggagggaagacacgggcgaaggaaagcacaggagcgaagcgggcaaggggcacaggcgccctcatcccaggaaggcgtcgtagtccatgtaccacaccagctggccggagtgcggcaggacacccgagatgggccacttcttgggctcatggcccacccggctcaccagcgtggtgatctcacgcttcatcctgcccatgaccaggactgccaccttcttggcrcggttgatgagaggcaggctaaggctcatgcggcggtgtggctgggaggggctcgtggtcagcacgaccagctgctcgccatccaggccagtgggygactgtgggaagagggaggctgtgtgcccgtcggcacccatgcccagcagcaccaggtcgaagctgctgttggccaccagggctgagatctccctggcrtagatctgggcgccctggtcctcctcggcgcagagccgctgctgcaggtgcacaggcatggggtggatgttgtagtaggggatccggacgtgctgcagcaggtgggcctgcaggccctggaagttggactccgggtctgagagtgggacgcagcgctcgtcaaccagccacaggtgcgtgtgggcccaggggaagccatagtgcgccgtggccagctgctggaacagggccacggggctcgagccccccgacagtgccaggtggaactggccaaagcgccgcacggctcgcacagcggtggcctcgatgtcattagccagcttagagatcagctcctcggaccaggcggagaccagcrggctctctcggtacttggccctgaggacctggaagtcactgggcattggggccggccctggccctggcaccagctgctccggctgctgctgggaaaagaacaaccrgccgctactgaactcaaagtccaacagacggccattctcagctcctccagggtagaggcgtggggccttatgggccaggctctccagcagaggggtccagaagtyccaggaggccagcaagttctctgtggtgatgaagaaattcttccggccatgraagatatgggataagaggacggagtgggcgtcccgctccygcacagggctgtaggygtagtaatcggacagagggctgcygaaaaggcggagcccaggtggtccctccatttccttccagctggagggcagggagggcctgaacaggttcctgctgaccagcacggcagggctgcccaggtcgccatggccgatgtggaagacgagctgcyggggcaggcactggctctgcgccgcggcccagtgcttttcgctctgcacacagcaggcctggttcttgaacaagatccgagcgtagcccactctctcgtccaaggctttgccagacatcaggatgaaaggcacrccctcccagcgaaggttgtcaatgtgcactaggacggctggggtgagggaacagcagagggtgactctctggcacagaccaggactctccggccagccctctcctctccttgccggctcctctgggcgtccccctgcctcagggaagsccctcgccttgccatgctcacccctcgcctggcatctcttccatgaccttctcttcccagtccatgcttgaaaaccggcctctggggctatctctatggctttgacacctgccttcattgaggcccctcttagagttatggtcccccaggaaaggagaaccgggctgagagcatccaacctggagactctaaaggacgccccacagtgggggcaagtggggtgggggaccctgactcttaggtatttgaggggtcagggggtcctacagagaaacgtgcttccctcctgcttgtgaagcattcaggatgcacccgacgcagggtcagaggtgcggggtgaggagagagtcaccaagcagaggcccgtgggtggggtgttggcaaggagggacaaggcctggtggcaagagccaggggctgacagtattccatgcccaagttccaagcctggttcattctgacgacttcaccgagccttacgtttcctcacctgtaaaacggggctaatggcccctgcctcgtggttggtgcgtgaggcttgtatgagaggcatctataaagcacctggcatacggcgcgtgctcaacaggcagctgtggctcttactgcctggctgctacctggtgaggagccagcctctcccagaaagccctgggtctctggaactgcccagaggacagccctggcatggcacttggccgctggaagtgtctccagctgtggccaggcaaaaggcttgcggcctcactggggagaccctatgaggcaggaaccaggtctgtctgagcctcgcacgacaaacccttgggaagcatctgggactgaactggggctgacacgaggccatggccattgggatgtccttcgccctgagggcaccaccagctggcctgccactttaggctggtaggaggccagggagacaggggaatgccatccttgcctccgagcaccctgggggaaatcccacctcaagtcccctccactccacccaagggcgtctgcatttggaaagctgctcccggcgaagtgggcagcccagtgccccatgcccagccccagggcccacctgcgaaggtcggcgtcaggctgtggaagctgtctggcttctgcagctctctgcgcacctgctcactgtaagactggtactggcccacracggcactgcccctctgcaggccccgcagcgcctggaagacctgaagcttgtgccgcagcacagcctccgcactgctgacattgtggggcagctccatggccacgagggtgaggacctccgtcagatggttctggaggacgtcgcgaatgacaccgtactcctcatagaagctggtgcggcctggtggagggaggtggagaagtggggaggatctaaagagaggccagaacatcagatctccccgaggtgcaccaaaaccccagcccgcacattcatcctgcatcctcttcccccagtccacagggcctataaaaatggtgcacaccaaagccaacctcaccacgagaagggagggaggaagtcttgaagccacctctgtcaatgagaactactgtaagagaaggcgtcaaatccgtgagcctctacagaaatccacatgaagaaagctctattcccagcaaaggccagattgcctctgtagatactggccagcccctcgccccgccctgcctggccactgccagtaggaggctcggcactgtgggggctatggcaccatggcgggggctgcagcaccccagagtatgactgccacttactagcatgtgatcttgggtaagttacttgacttttgttcctgcatcctgcccttggatgagactaacaagtgccacctcactaccgggcgcacacctgtgccaggcaatgtgcaggggagtgggagggagggaaagtgggaagaagagaaaaggaagtaaacaaaattacagagcagttgtgacagagggtaatgaaaaggcccctccgagacctgaagagccagcctcgcaaaaagccagggagaaagcatctcagctgcagggaccctcaggtgccaaagccccgaggcaggaaggaacttggtgtgctgggggccagatggaggtgagcaaagagtggggacagcggtgaggctggagaggagatcaggggtcttgcaggataaggcgaagaggctggacttttttctaagatcagttgtaggggggacactggaggatctgaggcaggagaagacgagacctgacctatattggggatcgacccctggtcttggggggagaatgggtgcagatgcagggaaggcaaggaagaggctgcacagctgcccagcag

SEQ ID NO: 93756 - DNA, 13522 bp, Homo sapiens
tatagtgcgattacaattcaagatgagatttgggtggggacaaacagccagaccatatcactgggcatcttcacatgccgccaatagcaaaatccactatgggttctgggaaggaaagtgtgactgggccatgccgctagtagatcccagagctgctagtctccactgccccaggtgagtgggccctgccttccccagtgaaaggcctgcagcacaggtgctctgctcctacctgaccatttcagcagtggtctggagcccttctgagagcctagccccataggcctgtgatcttttctggggttcccaccacctgagcattctgctgctgcctgagcattcttcttgcccctgcctgagagttctgctggtgacccaggaaccatcccattcctctctgtcacagccagcatgtgaattctgtggtttccaagaacaagtctacaggcctattcctgtttcagtgcccttaggactcatacatgccatttagtgggccatctgggggccttgggatcagaggtttgcctagcccagttcaccaccgttggcctctgactactccctctatgtgactcaaagcaatctacagattcaatgaaattcttatcacatcaccaacatcatttttcacagaacaataacaaaaaaaaattaaaattaatacaaaccccaaaaaagagcccaaatagccaaaggaatcctaagcaaaaagaataaatctggaggaatcaaattacctgacttcaaattatactacaaggctaaagtaactaaaacagtattgtactggtacaaaaataaacacatagaccaatggaacagaatagagaacccgaaagtaaagccacatatctacaaccacctgatctttgacaaaggtgacaaaagtaaacactgtggaaaggacgtccttttcaataaatagtgctgggaaatttttctagccatttgtagaagaatgaaactggacccctatctctcaccatatacaaacatcaactaaagatgaattaaaaatgtaaattacaaaacataacttaaacaattctagaagaaaatctaggaaatactcttgtggacattggcctaggcaaaaaatttatgacaaagaccccaaaagcaaatgcgacaaaaacaaaatatacaaatgggacttaattaaactaaaaagcttcttacagcaaaagaaataatcagaagagcaaacagacaacctacagaataggataaaatatttgaaaattatggttccaacaaaggactaatatctaaaatctataagaaactcaattcaacaagaagtaagcaaacaacctcattaacagtggacaaagtacatgaacagtcatgtcctcttaaaggaaaatatacaagtggccaataaacacatgaaaaaatgctcaacattactaatcatcacagaaataaaaattaaaaccataatgagatatcatcttacaccagtcaggatggctattattgaaaatcaattctacataacaatcagcttacaatacaatggcaggatcaaacctgtgcatatcaatattaaccttgaaacaggttaaacacctttatttaaaaggcacagagtggcaagttgaataaagaagcaagacccaattgtacactgtcttccagagacccatctcacatgcaaggatacctgtaggctcaaagtaaagacatgcagaaagatctatcaaacaaatggaaaacaaaaaaagagcaggagttgttattcttattccagaaaacagtgggctttaaaccaacagtgataaaaagtcacagagccgggcatggtggctcatgcttgtaattccagcactttgggaggccggggtgggtgtattacttgagtccaggagtttgagaacagcctgggcaacatggtgagacccctgtttctacaaaaaatacaaaattagccaggcatggtgacatacacctgcagtccaagatactcaggaggctgaggtgcaataattgcttaaggaggttgaggcttcagtgagctgtgattgcaccatttcactccagtttgaatgacatagcaagaacctgttttaaaaaagagacaaaaaagggcctcatataataataaaaggatcaattcaacaagaagacttaactatcctgaatatatgtacccaaaactggaagtgagttcttagagacttatgaagatacttagataaccacataataatagtaggagacttcaacactccacttacagtactggacagatcaccagggcagaatactaacaaagatattcaggacataaatttggcacttgaccaatggacctaacagatatccacagaacactccactcaacaaaaatagaatatacattcttctcatctgcacgtgacacatactctaaaattgaccacatgcttgaccataaagcaattatcaacaaattcaaaaaaacaaaaatcataccaatcacacttttggaacacagtgcaattaaaatagaaatcaataccaagaagatctctcaaaatcatataattaaatgggaattaaacaatctgctcctgaatgacttctgggtaaataatgaaataaaggcagaaattgaaaagttcttagaaatgaataaaaacaaagatacaacataccagactctctggaacacaggtaaagcagtgtcaagagaggagtttacagcgctaaatgaccacatcagaaagttagaaagatctcaaattttaaaaaacactaatatcacacctaaaggaactagataaataagagcaaagaaaacacaaagctaacagggaaaaagaatacaaatcacagctgaacttaatgaaatggagacgagaaaaaccgtacaaaagataaacaaaaccaaaagttggttctttgaagcaataaataagatagaccactagctatactaataaagaataaagggcaaagatccaaataaacaaagtagtaatgacgaaggggacattacaactgactgcatagaaatacagtaaaccctctgagactattatgaatacctctatgcacaccaactagaaaacctacaagaaatggataaattcctggaaacatacaacctcccaagatggaaccaggaagaaattgataccctgaacagaccaatcaccacttctgaaattcaatcagtggttaaagacctaccaaccaaagccctggacgaggcagattcacagctgaattctaccagacatataaagaggagctggtaccaatcctactgaaactattccaaaaaattgaggaagagggattcctctcaaactcattctatgagatcagcatcattctgataccaaaacctggcagagacacaacaacaaaaaagaaaacttcaggcccatatccctgatgaacattggtctaaaaatcctcagcaaaatactagcaaatcaaatccagcagcacatcaaaaagtgaatacaccatgatcaagtaggctttattcctgggatgcaaggttggttcagcatttgcaaatcaatacatgtaatttgtcacataaatggaattaaaaacaaaagcacatgatcatcttagtagacacagaaaaggcttttgataaaattcaacatcccatcatgttaaaaactatcaacaaactaggcattggaggtacaaacttcaaaataataggagccacatatgtcaaacccacagtcaacatcacactgaatgggcaaaagctagaagcattcccctttagatctggaacaagacaaatatgcaaactctcttcattcctattcagcgtagtattggaaatcatagccaaagcaatcaggcaagagggagaaataaaaggcatccaactatgaagagaggaagtcaaactttctcttttttttagataacatgatactataaaaaaagcatcacgatactagaaaacctcatagtctctgcccaaagttttctaaatatgataaacacctgcagcaaagtgtcagtgtgcaaaatcaacatataataatcagtagcatttctatatgccaataacatccaagctgagagccaagtaaaagttgcaatcccattcatggtagctacaaaacgaataaaatacctaggaatacagacaaccagggaagtgagagatctctataatgagaattacaaaaaactgctacaagaaatcagagatgacagaaacaaatggaaaaacattccatgctcatggataggaagaatcaatcttgttaaaatggctatatgatccaaagtaattcacagattcaatgctatacctatcaaacaaccaacaacctttttcacagaattggaacaaaaggattctcaaatccatatggaactaaaagagagcctgaatagtcaaagcaatcttaagcaaaaagaacaaagctggaggtatcacactactcaacttcaaatcatactacaagtctacagtaactaaaatagcatggtactggtataaaaacaaacacatagaccaatggaacaggttccagaaataaggctgcacacctacagccatctgatctttgacaaaggtgacaaaaacaagcaatggggaataggctctctattcaataaatggtggtgagataactggctagccatatgcagaagattgaagctggacccctacatttcactgtatacaaaaaccaactcaaaatggattaaagacttaaacataaaatgtaaaactataaagaccctagaagaaaatctaggaaataccattctgtatattggcccaggtaaaaacttaatgatgaagactccaaaagcaattgaaaaacaaataaacaaaaattgaaaagtgggttataactaaacagcttctgcacagccaaaaaaaaaaaattaagagtaaacagacaacctacagaatgtgataaaatatttgcaaactatgcatgcaacaaaggtttaatatcctgaatctataaggaacccaaacaaatcaacaagcaaaaaataaccccattacaaaatgggcaaaggatatgagcagacacttctcaaaagaagacatacacacgaccaacaagcatatgtaaaaatagtcaacatcactaattattgtgggattggaaatcaaaaccacaatgagataccatctcacacaagtcagaatatctattattaaaatgtcaaaaaataacaaatgctggcatgtttgcaaagtaaaggaaacacatacactactgctgggaaaataaattagttcagccattgtggtaagtctggagatttctcaaagaacttaaaatagaactaccactggacccaacaattccattactgggtatatacccaaaggaatataaattattctaccataaagatacatgcacacatatattcattgtagcactattcataatagcagagacatggaatcaacctagatgtccatcaatagtaaactggattcagaaaatgtggtacatatataccatgaaatactacgcagctataaaaaatgagttcatggcctttgcagcaacatggatggaactggaggccataatcctacgtgaattaatggaggaacagaaaaccaactgtcatatgttctcacttatacataggagcaatatgttgactatgcatggacacaaagaagggaacaatacacactggtgcctatctgagggtgaagcgtgggaggagggtaaggatttaaaaacaacctattgggtattatgctgattacctgggtgacaaaattatctttacaccaaatccccacaacatgcaacttacccaggtaaaaaacttgaaaacttgcacatgtactccttgaacctgaaataaaagttggaaagaaaaaaaaacaagtcaaaaaagaacagcccccgcccccggcccgcccggcccgaggctgcagcgtgtccgccgcgcggcctcagcagcagcagcagtggcggcggcggcggctgcagcggctggcggccgcgcgggtgtttatgtcggggtcttgcggcagcatggcggactacctgatcagcggcagcacccgctacgtgtccgaggccggcctcaccgcgcagcagctcttcgccagcgccgatggcctcacctacaacgacttcctgattctcccaggattcataggcttcataactgatgaggtggacctgacctcagccctgacccggaagatcacgctgaagactccgctgacctcctcctccatgggcactgtgacagatgccgacatggccatcgtgatggctctgatgggagggctctgataggaggtattagtttcattcaccacaactgcaccccagagtttcaggccaataaggtgcagaaggtcaagaagtttgaacagggcttcatcacggaccccgtggtgctgagcccctcgcacaccgtgggtgatgtactggaggccaagatgcggcatggcttctctggcatccccatcactgagacgggcaccatcggcagcaagctggtgggtatcatcgcctcccgagacatcgactttcttgctgagaaggacaccatcctcctcagtgagatgatgacgccaaggaccgagctggtggtggctccagcaggcgtgacattgaaagagcaaatgagatcctgcagcgtagcaagaaagggaagctgcctatcgtcaatgatcacaatgagctggtggccatcatcacccgcaccgacctgaagaagaaccgagactacctctggcctccaaggatttccacaagcagctgctgtgcggggcagttgtgggcacccgtgaagatgacaaattctgcctggacctgctcactcaggcgggcgtcgatgtcatagtcttggactcgtcccaagggaactcggtgtatcagatcgccacggtgcattacatcaaacagaagtacctccacctccaggtgattgcggggaacgtggtgacagcagcccagcgtgggcatgggctgcggctccatctgcatcaccggggaagtgatggcctgtggtcagacccacggcactgctgtgtacaaggtggccgagtatgtctggcgctttggtgtgcccgtcatagccgatggcagcatccagaccgtggggtacatggtcaaggccctggcccttggagcctccacagtgctggcccttggagcctccacagtgatgacgggctccttgctggccgctaccacggaggcctctggygagtacttcttctcagacagggtgtggctcaggaagtaccggggcatgggctcgctggatgccatggagaagagcagcagcacccagaaatgatacttcagcgagggggataaggtgaagatcacacagggtatctcgggctccatccaggacaaagggtccattcagaagtttgtgccctacctcatagcgggcatccagcatggctaccaggatatcggggtccacagcctgtctgtctttgggtccatgatgtactcaggagagctcaagtttgagaagcggaccatgttggctcagatcaagcgtggtgtccatggcctgcactcttaggagaagtggctgtactgaggacagtggtggaggccgaggtggttgagggggcacaccccagtgtccaccttcgggcacagcctccctccataactgagtggtccgcagatttgcactacgggttccccagctcctttccagggagacaggaggggaggtcctgaggggtctggggtccctcactgggcatcccctgcagagtcattactgctccctgggccaggctgccctgggagccccctccttccccgcccctccgccgcccgccccagtcagccggactctcaggccctgagcctgcctcaggtctttcttgctgcagcctgctccagcccagcccccaccccaggggcagacgtcccatcctggcttctcctgtagggcacctctttgtccccagccccccaggaaattgtgctgtcctggtcctgcctctggcccttcccaagccccttccccctcagccacgtggcacttctgaactcctgacctaggccaaggggaggtctctgcccccttctccggccctgggctacccttgggtcctgctcctcaggccactcccctgtccctggccttggggaggaggctgccctggtcatggctgcctgcccgtcgttcctgactcaccactgtccccaggtgtaccattcctaccctctcctcagctgcagttgaagactttaactttgcacactttgggatcatagttgcgtcattgtgtattaatggaagaaatcaagcaggtctcaatgcctccaaaaaaaaaaaaaaagaacagatgtcagcatggatgtggagaaaggggaatgcttatacactgttggtgggaatataaattagttcaacttgtacacaaaacagtatggagttttctcggagaactgaaaatagaactaccattcaacccagcaatcccactactgggtatacactgaatggaaaataaatatttttttcaaaaagatatctgcactcatgtctttttttttttttgttttttgagacagagtctcactctgtcatccgggctggagtgcagtggtgtgatcttggctcactgcaacctcctcctcccaggttcaagcaattctcctgcctcagcctcctgagtagctgggactacaggcatgtgccaccatgctcggctaagtttttgtatttttagtagagatgaagtttcaccatgttggccaggctggtctcgaactcctgacctcaattgatctgcccacctcagcctcccaaagtgctgggattacaggcaagagccaccacgcccagcctgcactcatatctttatcacagcactattcacagtagaaaagtcatgtaatcaacctaagtttccatcaacagtgaattggataaaaaaaaatgtgggtatatatacaccatgaaatattaagcagtcatagaaaagaatgaaattatgttatttgtagcaacatgggtggagctggagaccattatcctaattgacataactcagaaacaaattatcaaatatcacatgttttcacttataaatgggaactaaacaatgggtacacatggacataaagatggaaatcatagacacaggggactccaaaattagaaatgttggaaaaagggtgagagttcaaaaattacccattgggtacaatgttcactacttgggtaatgagtacactagaaacccaatctcgattattacacaatatacctatgtaacaaacctgcacatgtatccactgaatgtaaaataatagaaaattttaaaaaattaaaatgtgtagataattttatattgtttattaatgattgcacatatccttttgcaaattgcttttttctctctagttattataagtttttttcaggttgatgcatatggattagcccaagttcactgattgtattgatgttttatattccatggtataaatatactataaattattcatcaattccttagttgatgagcatttatgttgttttcaatttttcactataaaaataaatcctgacataaatattttatatgtctccttgtgctaatgtgtttctctaagatatagccccaaaataatatttaggttaaaggctatgcatattgtcagtcttctagttattgccaaattgtatcaatttgcattccgccaccagcatatgagagtcttcatttttctgcatcctagtccaaactaggtaatgtcaaactaatgatagatataaaaccatatcttattatttaaattagtatttccctgattactagtgagggtggttattttttcatatgttaattgacctttcagagttctccttctatgaaatgcttatttaaattcttaactttagatattttatgtttttatgacaatgggactttaattaattgttcacatcttctcctaatccttaggatacctttttctaatttttatttttttaaaaattgataatatattaatttggcttaggtttatgtaaaaatgtattcatgagaaatctcattcctattccagccccattaaccccactgccttgcaaacccttcattgataatcatttttcaatttgcccttttggtgtttatttattctttattaaagaataaaatgaagagacatgcactcaccactcaactaaagaaatacaccattaccacaacttaataagttccttctttgttcttcctaggttaattgcatcttctttcccatcgctagagataaccgctattattagttagcttttctttctagcttaccttcatttatgtatttattctaccttcaaatttcattgatggtttgtatgagtatgggattccaggttggaaatatttctccttcagtactttgaaaatattaatccattttattctagctttaagtcttgctaatgaaacacctgaaacctcgttgactcatggttcttcagtgtcaaatgactttcccctcatttctggaatccatacgtaggcatattttcacctattgtgctgggcgcttggtgggttctttcaaaatgaaaacttgtttccttctgttctgatcaattttgttgaattatttcattcatgatttcctcccctccattttctctctactatctttccataattcctattattctgcttataaaataaatgcctggactgtgctcagtttttttctttttcactccaactttccatttcctttttattattctaattttggggagattagctaaaggaacttgaattctagacccaacaatatcccaatgattatcttggtcactctctaaatttcagtttcatcaggtttaaaagaaatcagttggctgtaagtacatgagtttatatctaggttatcatttctgttccattggtctatgtgtctgtttttaagccagtaccatgctgttttggttactgttgctttgtagtatgttttaaagtcaggtagtatgatacctccaactttttttgttcatgattgccttggctattcaatgtcttttatggttgcatacaaattttaggattgtttttctatttctgtgaaaaatgtcttgctaagagcacacattggagaaaagacagtcccttcaataagtggtgctgggaaaactaaatatctacatgcagaagaataaaactagatccttatctctcatcactgacaaaaataaactcaaaataaattaaaaactttaatgtaacaccccaaactatgaaattactagaaaacataggagaaatactttattacattgttctgggcaaggatgttttttaataacacctcaaaatcataggcaataaaagcaaaaacagacaaataggattacatcaaacataaaatattctgcccagcaaaggcaacagtcaacagagtgaagagacaacctatataatgggagaaaatatttgtatactatgcatctaacaaggggttaatatccagaatatgtaaggaactcgattcaatagcaaaaaaaaaaaaggggggttaatatccagaatatgtaaggaactcgactcaatggtctgatttaaaaatggtcaaaagatctaagtaaacatttatcaaaagaagatatacaaattgtcaacaggtatatgaaaaaaacactcaacatcactaatcatcagggaaatgcaaatcaaaaccacaatgagatatcacttcacatctgttagaatggctactattaaaaaaaaaaatgccagcaacgatgtggagaaaggggaagtaatacactgttgatgggaatgtaaattagtacagccattatggaaaacaatatggaagtttcccccaaattaaaaatagatctaccatatgatccaacaatcccactatgtgtctatcaataaatgaatggatataaagggctggtatatagtcacaatggaatactattaggccaaaaaaaagaggcaaaatcctgttatttgcaacaacatgggtgaatgtggaggacattatattaagtgaaataaactaagcatagtaggacaaatatcgcatgatcacactcataagtgtaatctaaaaatgttgatctcatagaagtagagagtaaaatactgcttaccagaggctgggtagagtaggcgggagagaaggaatggggagaggttggttgatatgcacagtagtagtcagataagaggaataagttctagtgttccattgcacaggagaatgattatagtcgacaataatgtgtacttcaaaatagaagagaggttttcaaatgttatcatcacaaatgacaaatgtttgaggtgatggatataccctgattgaatcattacacagtgtatatatgtagcaaaacatcacagtgggccctgtgtggtggctcacacctgtaatcgcagtattttgagagctgaagcaggaggattgcttgaggccatgagttcaagaccagcctgggcaacatagcaaaaccccatctctacaaaaaaaaaaaaaaaaaaaaaaaagttggctgggtgtgttggtgcacatttgtagtcctagctacttgggaggctgaggcaagaggaatgcttgagcacaggagtttgaggcagcagtgaaccatgattgtgccaaagcactccagcctgggtgacaaagcaagacattgtctcaaaacaaagaaacaaattacactgtaccccataaatatgtacaattatgtgtcaattaaaaacaaaataaaacttatttttaaaaggaataagttgaattatataatgcttaacttgccttccacctctcacttattatgaggttcacattgaaccatcaggcaggcagacaggcatactgttacctatgtgtacagatgaaggaattacatctcagagagtttaagtaaaataagaatcagaacacatccttctgattcctgttttagtctgccttccattaggttatgttatctaggacaataatcataataatgtggtcatgaacagagactagtttgactaaaatcatgaacagagactagtttgactaaaataatagtttgtttttgggctagccttcctgtactatacacatatgtagatgatctctaaagactctacctattctaaatttatctttctatgataataattcttactcaaggagatagtagtaacagtaggtataatatactgctaatgaaggataattagttttcacactacaaaattaaattaacacttttaacactcaactttttccttgaataaaatacattacaagttttaatgtaattggagctcttaagtttagttttaaagctgtggttctgaatcgaaactatatctttgtcctaattatgtaatacagatttctgttctcaggcctctagttatgattatttttatttacttaaatgcctatcttcacatctttctcttcctttctttttctccatatttaaatggtgaaaaataccatatacacaagatgaaatataaaatatatttgaagttaaaataataaaaatttgaaaacttctacatgcccat

SEQ ID NO: 93757 - DNA, 37749 bp, Homo sapiens
ggggccagtgatttagctgtcctgaaaatcagttccctcagctaacagttacaatatgcacctcatgcggctactgcgagggctccacaggacgcaaactcgtgcattcaatggttatctcttgatcatctgctctgttaggtcctgtgctagggacacagctaggaatgacacgacctcgtccctgccctcagggaactcaccccacagtgtgtactgggtatacgaggccaaacccagtaaagcacccagtaaatatctatgacttccaggcaaacatacccgggaaccccaccaggatagccaggatagcagcctggtccccagtgcatcatctgacccaactctggaactgaggatcctcctcccccattagatagggcgagtgggggaatggtagtgggggcacagttggtgtgcaggccacctccctctccatcttaggggtcctcaataggtttgctctgtcagggcacatggcaggcagggcttaggtcctattcctgacccaactcactcaccgattcgctcaatccttgttacatcacggatctccgggactttggttgtggctgtctgggggtgcaagaagatgtgtcagaggactagtgtggtcccagctttcaccaacccctcctctgtccctcccatgagatggtcctttccactccttcccctcacaggcaggcgatgggacaggcaccagtcacccccacccctcttgcctgtcactgcctaatggctggttggttgagccccaggaagacaaggactgtctgtctcatcgacagcttggtcctcagggtccagcacatatttggttatttggtgaatgaatgaaatcctccctgtttctttttttttttttgagatgaagtctcgctctgtcacccaggctggagtgcagtggcccaatctcggctcactgcaacctccgcctcctgggttcaagaaattctctgcctcagcctcctgactagctgggattacaggcgcgcatcaacacacccggctaatttttgtatttttagtagagatggggttttgccatgttggccaggctggtctcaaactcctggcctcaagtgatacaccagccttggcctcccagagtgctgggattatgggcgtgagccactgtgcccggctaagtcctccccatttcttttttttttttcttattttttgagacggagtctgctctgtcgcccaggttggagtgcagtggcccgatctcagctcattgcaacctccgcctcctgggtttaaccgattctcccgcctcagcctcctgagtagctgggactacaggcgcacaccaccacacttggctaattttttttgtatttttaatagagatggggtttcgcccatctctactggggttggccaggctggtctcgaactcctgacctcaagtgatctgcccaccaaggcctcccaaagtgctgggattacaggtgtgaaccaccgtgcccagacaagtcctccccatttctaataactgtgagctccataaggacagacaccaatgaggagcaggcatggagctggacatgctctggcccctgctaatttcccagcatcccttgtaccaggcggccccagttctcaaccaccaggccttgcacatgctggcccctgagtccagactgctctccctgccctctcactgaattagatcaagtgctgccccctaggggaggccctttctgtccaacagccctgccaggctagttctaggacctctagacattcagacagatgaaaggcctccctgggagcccgatctccctgtgtgatctcacattcccgagggagatggatggatcaatattctctgctccagtggacatgagtcccatgaagggcacggcctgttctctcttgttcacctcgggactcaatgtctgtggtttgctaagtgatactctaaagtgctgagctcattcaacaagaatataccgaggcttcccatgttgacagttctccacagagaggagccagctaccaccccttctcacatgggggagggaggtgagtaaacaccacccgggacaattcaggacccccccagaggtccacacaaaacatggacacgagtgttcacggcagcactattcacaacagccaaaagatagaaacaacccacatgtccatcagctgatgaatggcaaaataaaacagggtctatttgtgcaaaggaatattattcagtcataaaaaggaatggagttcttttttcttttctttttttttttttttgagacatagtctcactctgtcacctaggctggagtgcaatggcgcaatcttggctcactacaacctctgcttcctgggttcaagtgattcttctgcctcagcctcccgagtagctgggattacaggtgtccgccaccacacctggctaatatttttttgtattttttagtagagatggggtttcaccatgttggccaggctggtcttgaactcctgacctcaggtgatccacctgccttggcaccccaaagcgttggggttataggcgtgagccaccgcgcccggccaggaatggagttctgatacatgctacaacgtggatgaactttgaaaacattatactgactgaaagaagccacacacgaaagacacatatggtatgattccatctatatgaagtagccacaataggcaaatccatatacagagaaagattagtggctgcctagaactgaagatgggaggtatggaaggattagcggtgacaggtaagaggcatggggtttctttttggggtgacgacaatgttctaaaattgactgtggaaatggctgcacaagtctgtgaatatactagaaaacactgagctgtatactttaaatgggtgaattatgtagtacgtgaattctatctcaataaagctattaagaaaaaaaaaaaacaacaggctgggcgtagtggctcccacctgtaataccagcactttgggaggctgaagcaggcaaatcacttgaggtcaggggttcgagaccagcctggccaacatggtgaaaccctgtctctactaaaaatacaaaaattaggtcaggcacggtggctcacgcccgtaatcccagcactttgggaggtcaaggcaggtggatcacttgaggtcaggagtttgagactagcctggccaacatggtgaaacccagtctacactaaaaatacaaaaaattagccaggcgtggtggcaggtgcctgtaatcccaggtacttgggaggctgaggcaggagaattgcttgaacccaggaggcggaggttgtagcgagcagagatcgcgccactgcactccagcctgggcatcagagcaagactctatcactaacacacacacacacacacacacacacacacacacacacagatacaaaaattagctgggcgtggtgacgcgcacctgtagtcccagctactcaggaggctgaggcaggaggatcatttgaacatgggagagaggcagaggctgcagggagccaagatcacaccactgcactccagcctgggagacagagtgagactctgtcttgaaaaaaagaaaaaacaaaaaaacaatcctggatggtggatctttgcatgtctgttacattattttctgacactttggaatagttcataatttctaataaggaaaaggaagcctaagaagctagcatgctaaccgaggccacccatccccaggtctccttccttcccacaggtttgtgtttttttttttgagataagatctcattttgtcccccaggctggactgctgtggcctccacctcccaggctcaagcaatcctcccaccttagtctcccaagtagttgggactacaggtgtgtcccaccacacttggctaattttcttctcttttcttttcttttttttttttttttgagacacagccttactctgtcacccaggctggagtgcagtggcgcgatctcggctcactgcaaccttcgcctcccgggttcaagcaattctcctgcctcagcctccagagtagttgggactacaggcatgtgccaccacgcccggctaattttttttgtatttttaataaagacggggtttcaccatattagccaggctgctctcaaactcctgacctcatgacctgcccgcctcgaccccccaaagtgctgggattacaggtgtgagccaccgcacccggcctaattttcttatttttttgtagagacagggtttcgctatgttgccagggctagtcttaaattcctgggctcaagcaatccttctacctcggactcccaaagtgtgggattacaggcgtgagccactgtgcccagcccacaggtctttcttctcttcttcccctagagaggacatgcagttatccagcccagaggaagcctcctccctctggagccaatcgtttagactttctggccatcaatggtcacaagctttccctgtcactgtgtgaaccttcccacctaccgtctcctataggaagctggaacccaggagcatagaacattacccccagactacaagcagaagactaggcatccccaccccacaaaaaagacatgaatccaggaatcccaaatgtagctctctcaacataaacaggccccttaccaaggactgtctcctataaagactttctctttcatcataagtctctccaaaaccttgctgcccgctgttcccatgaaaaccaaggtcatttcaaaactcagcacacaccgtcccctcatacttccaatactttctccacggtagttctggtcatagccttcctcttctacttccctatccacctcctcctcctccttgccctggtgacagcaacagactcaaatctcatccccagctaccaacaactttctccccctcccttcctccatcttgactgggctcatcatggaaattgaggcacctgtaagcccagcccagtccctaagttcaggtcacattacctttttttttttggagacagagtctcgctttgtcgcccaggctggaatgcagtggcgcgatcttggctcactgcaacttctgcctcccaggttcaagcgattctcctgcctcagccttctgagtagctgggattacaggcctgcaccaccacacctggctaatttttgtatttttaatagagacggggtttcgcaatgttggccacgaactcctgacctgaagtgatccgcccgcctcggcctcccaaagtgctgggattacaggcatgagccaccacgccaggccaaaatcgcttctttattcaggtaattgagcaggtgccaggccaagtttcctggcctctccttcattcacatgtattcattcattcaaatattcaagtgataatttattgagcatttacactgagacgtagcccgtgtgaaatactggaaatatgaaaatggccaaaacggtagcatgacaagatcccgatttctgggtccctaatccttcagtcctctccactaagactctcttgttcctcgacaatttcttcccactaaaggctcactaggcgccctcgcgctctcagacacactgaacaggtacctgcctgtgcttccagcttggaactcaagtgccattggcaccactaacaatccaaggctcccaaatggctcgaagcgcaaggtcctacaaccctcctcatcacacactggcgccaaggactgcggaaccggccgttgcgccaagatgattttgaaagttggagttcctatagcatgatggggccagacccgagattctgggatcccagccccctccccgcctcagatccagaagtccagcccccatgtccccttctcccccagatctgggtggccgagcttcctcctctttcagacccaggagtctgaacccccagatcccccctccctcagacccaggagtcagggcctccagcatcctcctctctcaaactcgagactgctagctcgctcctcaccctccatgcacccacacttacaacggttgccatgatgctcaccaactgccagagtcctagcggaaacggaaacgcgcgrggagcgagatgttctggctcctctaggctagctggttcttcaaagatctcgatggttcctcataaatatgtaaatattgtgggggcgtggcgggactttakgccccgccctcccaccgaggctgcgctggaagacgggcgtccggaactcctgggtccattcccaatgtctcctggctcctcctccttttgctcagccccaccaccgccccgctcaggccgattgcaaaattcttagctgttctttgagtaaccacacgtcctccacgctcctttcctctttatcccaccctcctcctcctccccactttgaggcctccagctccagattgacagarctgaaggccactcgtttccgtaaagcgcagcggcaagctccgccccctggaggtctcacggccgaggcggggccgggacacagcgactccaacccgttccaccaatgrggacacgcggaaatccccgcccccgggcgtgggccaatggcgctggctggkgggggcggccaccgcctcctggcggctgcgaggtttcactgcaggggcgccagtgggctcagtgacgctgcggcckccttctgcctaggtcccaacgcttcggggcaggggtgcggtcttgcaataggaagcygagcgtcttgcaagcttcccgtcgggcaccagctactcggccccgcaccctacctggtgcattccctagacacctccggggtccctacctggagatccccggagcmccccttcctgcgccagccatgcctttaaaccgcactttgtccatgtcctcactgccaggactggaggactgggaggatgaattcgacctggagaacgcagtgctcttcgaagtggcctgggaggtggctaacaagggtgagcacgccaggcgtcggggcccttgacgagaaggacagtagtggatgggggcccggaactctgagttgtaggaggacggggctactaggggaacccttgtgacctgggcaaggaggctgtgtccttgaggaggggctgggaagccggaggtgggtgggagagggatggttcgtttgacttaagatgaaaggaggctggaagcccgggttctgggtcctagggaagagggcgctaaaatgagactcctaggtcctggaggcaggcttccgagagactagatacctgggtcctgaacagggaaggggatggggggatgggatttctgcgtgcaaacctgggaagctgccggggtttcagacctatgaccctaacagcatggtctaggggataaaactccagatttgagagagagctgactgggagataggaggcctgagcggcggtgggaggacctgaggatctggctgcttaagaataaagatgggacgggctggagactgtaatgaatgcctgggctttgaaggagctgagggcctgagctattagttcctaggagtagaggagcccatggcctgggacacatgcgtactggaataggggaaggctgggaagtcctaagttagtcagaggctgggccctaggatgggaggggctaggagcctgcatttctgtgtcttgggcttcagaaagctgaggttctggccttggagaaggctggggctgaaatccccaggaacaagccaatctcacacctcaaagagcagggtctggggggttgctttgctgggtcttggaggagaaagggactgtgtctcccaggaggagagggggcccgtgaacacccagccgggtatcgccagggcctgggctccaggatgggaggaggctgggggctggggctcctgggtctgggatagggtcatgggagaggcagagccctgcatgctggtgtccctagtcagggagaggaaattgggaggcaggtcagcaaggtccctgggggcagggaatgaccatgcaggcttctcttgggcaatggtgagaagctggattggccatgagggggtctccctcactgggttttggagcctggctgcgatttaaacccagctcctgtgagctgggaactcgggaacctgagtccgggtagtcagtcctcagctctgccatccttagagccccagtgcctaattccttcagaccaaggggtcccggcacccagccccttctctctcagacccagaagtctagcctgagccccctcctccttcagggtcctgaccccagcccccttctcccttagacccaggaggactgccctccagccctcgtgttcccctcatccaagcttccaacccctactccaaactatgggctcccagtcccctcttccccctgagctagaggtctggggcctgagtgccccctacatccccrgcccaccccaccccaggccccagaactatggacctcggccggggcctgccctcacacgcttgggcccacagtgggtggcatctacacggtgctgcagacgaaggcgaaggtgacaggggacgaatggggcgacaactacttcctggtggggccgtacacggagcagggcgtsaggacccaggtggaactgctggaggcccccaccccggccctgaagaggacactggattccatgaacagcaagggctgcaaggtgggacrtggcccagcccagggcagaagcgggtggacagcctgccatcggggtgggagccacagacggagagggtgcagggtggacagccccagccagagagcgaggcaggcttggacacaggaaggaggcgtgataggacacccagacagatgcagggcctggaagtgggtgggtggatcccagacatgggcgaatggacagacagatggcaagtatgagacagactgagacggagatccaagaggccaaggtcctcagacccagagagaaagagagcaagatcgaaagacagcctggtcaacatggcgaaaccccgtctctaccaaaaatacaaaaattagctgggtgtggtggcgggtgcctgtaatcccagctactcgggaggctgaggcaggagaatcgcttgaacccgggaggcggaggttgcagtgagctgcgattgggccactgcactccagcctgggcgacggagcgagactctgtctcagaaaagaatgccagccagccaggcagagctggggagaagtgggcctgaggtcaggaaggagcaggattctggagcttgaagttcaagttcaccctccacttgctgcctgtgtgtccttggctaatggacatgctaatagcgtctaccttctagcggtgctgggaggaggaaacagttaataaggacaaagtggttagtagagttcttggcatgaaggtagcacattgtgtgggcggtgattgtcattgttatgatcatcgtcattattgttactaacagccaagcttggagagtgagggggacaggcagaccaagggagaagggtggatggagccacaggcaagagtaatagactggggacagaagagaggccaccagatgtttcagaaagccagtcctagaaggagagagaagcatggaatatcggggaagagaggagaggtcagtggacagacccacaggacagagtctgagatgggcagatcagggattagagaggagggggagttccagggccccagggtgaagacggaaagagacacgctgttgtccaaggagaaagccatcaggcggcacgctgttgtccaaggagaaagccatcaggcggcagggctaagggacagacaggtccaggctggggatggagaggcactgtggttcctttactcattcacagcctctggtttggggtggggtctggaatccattcaggtccgactgtgtccctaagggaacccagaacagcccagtcgcttcctgagggcagctgcttcccacgtgctgggggcctaagaatagcccccccccccccccagcaaaagggcagacaacagctgggagggggagggacctcagagcgaggctccaggcagcaaaaagccaggtcggcgaggagcggggctgcttctccactgctgtggcagcaggcccagaaccaaagccatggtctcagggaggaaaacagccaactggagaaatgtggcagaggcagaagtgagacagcaagtcttagaaacacggcagtggctagaaaaatgcagccctggggcacggacagaggatgggctatgttagaaatgtgtggcgtggccgagggcggtggctcatgcctggaatcccagcactttgggaggccgaggtgagaggatagcttgagcccaggagttcctgacccacctgggcaacatggcgaaactctgtctctactaaaaatacaaaaaattagccaggcatgatggtgcgtgctcgtgatcccagttactcaggaggctgaggtgggaggatgggatgtggaggctgtagtgagccataattttttttttttttttttcagatagaatctcactctgtcgctgagtctggagtgcagtggtacaatctcgactcactgcaacctccgcctcccgcgttcaagcaattctcctgcctcggcctcccaagtagctgggacctcaggcacatgctgccacgcccggctaattttttgtattttagtagagacagggtttcaccatgttgcccaggctggtctcaaactcctgagctcaggcaatccgcccgcctcggccccccaaagagctaggattacaggcgtgagccaccgcgcccagcccagtgagccatgattgcaccactgcactccagcctgggtgaccggagtgagaccctgtcaaaaacaaaaacaaacaaaaaaaaatggaagaaagaaagaaaaaggagagagggagggaaggagggagagagggaaggaaggaaggaaggaagcaaggaaggaaggaaggaggctgtggactacaaaatgggcctatggatagaggaaagaggtcgcaggtgacagatatgtgatgaaaggaacagaaacaaggcatcatggggaagaaaagtggcagcatgaacagtaagagaatcattacaggctgggtgcagtagctcacgcctgtaatcccagcactttggtaggctgaggccaggagtttgagaccagcctgggcaacatggtgaaaccctgtccttacaaaaaagttaaaaattagccgggatgtgataccttgtgcctgtggtcccagctacgtgggaagctgcggtggaaggattgcttgagcctgggagatcgaagcttcagtgaaccgtaattgcaccactcccttccaggctggaggacagagcaagaccccgtctctgaaaataaaaaagggcctgctttaggtggctcacacttctaatctcaacactttgggaggctaagcaagaaaactgcttgaacgcaggagttcacgatcagcctgggcaacatagtgagaccccatctccacaaaaaattaaaaaatcagcctggcatggtggcccacgcctgtaggaggtgaggtgggaggattgactgagccagggaggttgaggctatagtgaaccatgttcacaccactgcactccagcctgggcaacagagcgagaccctgtctgaaaacaaaaaagaagcatcccgtggaaggaattagcatcataaagaaaagacagtgggagatgcagatggttggtaagagaaatgtggcagcaagtacagaaacaaggcagcaggtaggggaaatgatttgcagagtggccagacagggcagtgggggcatagacacaggacatgtgacatatgtggttataagcagagaaaggaggcagcgagtgggagaagggtagcagttacaggaattaaacaggaggctgggtgcggtggctcacgcctgtaatcccagcactttgggacgccgaggcgggcggatcacaaggtcgggaaatggagatcatcctggctaacacagtgaaacctcgtctctactgaaaatacaaaaaaaagtagccgggcgtggtggcgggccgctgtagtcccagctactcgggaggctgaggcaggagaatggtgtgaacccaggaggcagaggttgcagtgagccgagatcatgccacggcactccagcctgggcaacagagccagactccgtctcaagaaaaaaaaaaaattagccaggtgtgggagcgggtgccygtaatcccagctacttgggaggctgaggcaggagaattgcttgaacccgggagacagaggttgcagtgagctgagatcgcaccactgcactccagcctgggccacagagtgagactccatctcaaaaaaaagaaagaaagaaagtaagcagggggcacggaaaatattgcaacagagatggaaaaaatgtgtagcaggaataaatcatgcaaatagagaagtaaggctaaggcagcaggtgagaaattagcagcagatatggaaacagaagataagagagctgaggcttaagtctatagacatctgcctgcaaatgggagaaccacggatgagtgaagatatgaggctgaagcccagagcctccctatggtgcctccccaaccccatcccaggtgtatttcgggcgctggctgatsgagggaggccctctggtggtgctcctggacgtgggtgcctcagcttgggccctggagcgctggragggagagctctgggayayctgcaacatcggrgtgccgtggtacgaccgcgaggccaacgacgctgtcctctttggctttctgaccacctggttcctgggtgaggtaggccccgtctgacacattccacccatacctgaaactacaatgaccatcagcccctgggccagaggatgggcttctccctgggcattctgggagtcatagggtcctttaatccaaggattagctctggcctttgaggacatgaacatccaagggcccaggctctactctcgatgccaacttcatttactctagtcttccaagcatagggattcttggaatcagcctcaaagtgaggctggcgggcttgcccgaggaattctaggagttgtagttctctagtgtgatattgctggactcagctctcagatgctgccctggatgctcatgaatccccagcctgacctggttttgacccccttctaggttttaagaggctcaagaagcttagtttccaggctgggcacggtggctcatgcctgtaatcccagcactttgggaggccgatgggggaagatcacgtgaggccaggagttcaagatggccaaacctcgtctttactaaacatacaaaaaaattagctgggtgtggtggtgggcacctgtaatcccaaatcccagctacttgggaggctgagacaggagaattgcttgaacctgggaggcgggaattgcagtgagctgagattgcatcacggcactccagcctgggccacagagtgagacactgtctcaaaaaaaaaaagaaaaagaaaaaaaaaaaaagaagcttaatttctcatgccctgggacaaataattgaggaactggctgctcctatggcattctgggagttgtagtccctttgccaatgttgggtgcagacagcgtacccttgagacaaggggtctttggaaactatgtccaggacctgggaacatgaaaacttcagtctgtccaatctaaccctgccaggacttagatggttggccaaaaaatcctcagttcctgtcaacccctgaggaggcagtcacttgagcccaggagttcaagaccagcctgggctgcctcagggatttacaggtccctgtccggttgggattgctgcagtgggccgctgcccactctgtgcagtagtggtgacagattgacctctccccgagtccttgtccctactggggattgccgattcttttcccaacactcgtggagacagtgkccctgtcyctgttgcccacagttcctggcacagagtgaggagaagccacatgtggttgctcacttccatgagtggttggcaggygttggactctgcctgtgtcgtgcccggcgactgcctgtagcaaccatcttcaccacccatgccacgctgctggggcgctacctgtgtgccggtgccgtggacttctacaacaacctggagaacgtgagctgggaccgtggcagatgggggactgcgagtatgccaggaaaacccaaagctctggggggcccaaggggatrgcaccccctcttctcccaggatccaggagtccaagtccccagacccctcctacctcagacccaggaatccagcccccagcaccaatttctcttgggaccccagtgtctggacctccagagtcttctccccaatccttctaaccggactgctgtcccctcccacccagttcaacgtggacaargaagcaggggagaggcagatctaccaccgatactgcatggaaagggcrgcagcccactgcgctcacgtcttcactactgtgtcccagatcaccgccatcgaggcacagcacttgctcaagaggaaaccaggtaggggctgggctgaagtccccagacgtgaatgaggtaggcagctgtctatgccaaagccagttgctcctcagcccaagaagcccactgtaagttgaaatagcataaaccgaaaacgtatttcggctgggcatggtggctcacacctgtaatctcagcactttgagaggccaaggcaggagaaccacttgagcccgggaatttgagaccagcctgggcaacatggcgaatccctgtctaaaatattcgccagacatggtgtgtgcctgtatccctagctactcaggaggctgaggtgggaggattgctcgagcctaggaggtcaagggtgcagtgagctgtgatcgtgccattgcatgatttgggtggcctggagagaccctgtcacagcctgggtgacacagtgagaccctgtctcaaaaaataaaaaaatgcatttaatacacctaacctactgaacatcatagcttaggctagtataccttaaatgtgcccagaacactttatgttagcctacgactgggcaaaatcatccaatacaaatctgttttattttatttttatttatttatttatttttgagacggagtctcgctctgtcgcccaggctggagtgcagtggcgctatcttggctcactgtaagctccgcctcccaggttcatgccattctcctgcctcagcctcccaagtagctgggactatacgcgcctgccaccacgcctggctaattttaatacaaacctattttataataaagtgttgaataggctgggcgcagtggctcacacctgtaatcccaacactttgggaggccaaggcgggcagatcacgaggtcaggagatcgagaccagcctggccaacatggcgaaactccatctctactaaaaatacaaaaattagccgggcgtggtggtgggtgcctgtaatcccagctactcgggaggctgaggcaggagaatcacttgaacccaggaggcggaggttgcagtgggccgagatcacaccactgcactccagcctggacaacagagcgagactccatctcaaaaaattaaaaaaaaaaagtgttgaatatctcatcaaaatccaaaattggactcatgtggatgtatgtaactttcacaccatcataaggttgaaaaatcataacttggctgggcacggtggcttacacctgtaatcccagcactttggaaggctgaggtgggcagatcacctgaggtcatgtgctcaagaccagcctggccaacattgtgagaccccctctctgccaaaaatacaaaaattaggtgggcatggtggcaggcgcctgtaatcccagccacccagctactcgggaggctgaggcaggagaatctcttgaacccaggaggcagaggttgtcgtgagccaagattgtgccattgcactccagcctgggcaacaagagcgaaactctgtctcgaaaagaaaaatcataacttggaccatcctaagtcctaagctggggaccatcagttaccatttttttacctaaagaatagagaactacagctcccagaaggctgtgggggtggtgacctgtatttgaggctctctgactatatactctggaggctaatgggaggtataatttctttcatattaatttcagatatgataaaattctgtaattggctaatgtagattggtcttatgaaagggaatggaagatcagtggactttgcttttgagaaaggttaggtcagaactgggcattcttcccagcccttagtatccgttctcagtgagtataaggtgagaactacaactcccagaaggcctttgactggttagctctatatgttccagaactttgccctaggcgctgatgggggttgtagtttttcgttgatatactttaatttctatgaggagaagaaatgattgggtccctgtaagaagcttggaagtagaggatatatcctaggagaagcaggactttggggatgtttaatcatttccatctcagggtgggctaagaggaaacaaaagaagtacaactttcccagaatcaccagtgtggatcagatccctgttagccatttgcagtagctgaggagacttatacttgtgcttgtgaacctaagcaagtaatattaggcaagaaggcatcttggagtcagggtaggtgtgtcaccaagggaactggccaggcatggtggctcacacctgtaatcccagcactttaggaggccagggcaggaagactgcttgaagccaggagtttgagatcagcttgggtaacatgacaagaccccatcactacaaaagtaaaataaataaattagccgggtgtggtagtgcacgcctgtagtgccagctactcgggaggctgaggagggaggattgcttgagcccaggaggtcagggatgcaatgagctgtgattgtgccactgctctccagcctgagcgacagagagaaaccctgtctccaaaaacaaacaaacaaacaaaaaaggtgggaggggggacctcataggaacgctcttgaaacaaaaaaattgcaaaaggcaaagggtgttttcttcatttattcattcaaccacaacattgatctgaatgaacaaataaaacatgggaccctcacccccaatcccagatattgtgacccccaatgggctgartgtgaagaagttttctgccatgcatgagttccagaacctccatgctcagagcaaggctcgaatccaggagtttgtgcggggccatttttatgggtacgtggggcatatacctaggtcttaagagaggagggcgttgggagcctaaccatctaggtctgggggagggggcagctgggggcccagactcctgggtctgagggagggggcacctgggtattcggcytccttaattcttgagcgctggaacaatgggctcrggattaaaggaaatctccatctaaagagaagaactacaactcccaggaggccccrtgatgcctctgtattacctaagacatcctctgccccccmacccatagcttctgggatttgtagttttgaggccagggctagcgggtgagggctttgggctttaccgtgcctkstgggttctttaggcatctggacttcaacttggacaagaccttatacttctttatcgccggccgctatgagttctccaacaagggtgctgacgtcttyctggaggcattggctcggctcaactatctgctcagagtgaggcctgggctatgaggggacagggagggcaagcaaagcagtttataactagggagaacagccaggcacagtggctcacacctgtaatcccaacacttttggaggccaaggcgggaggatcacttgagcccaggagatggagaccagcctgggcaacatggtgaaaccccatctctacaaaaartacaaaaattagccaggcatggtggctcacacgtgtagtcccagctactcgggagggtgaacggggaggatcacgcgagcccgggaggtggaggttgcagtgagccaagatcatatcactgcactccagcctgggcgacagaaaaagacgctgtctcaaaaacaaaacaaaacaaaacaaaamaaaaaattacagaacagaaacccaagaagccaggaagatgggggtaggaaagcccctgagtatggtggggggccgtgaggggagtatagagacccagaaagaaggtcagagtccaggtggggactgtcctataattctccttgacaggaatgggtatggcaggatcccagtggtcttgacagaaaggctggctggttccaggcttcccccacatgatcctggcctccccctcctttctttctgcgcaggtgaacggcagcgrgcagacagtggttgccttcttcatcatgccagcgcggaccaacaatttcaacgtggaaaccctcaaaggccaagctgtgcgcaaacagctttggttagcagccctcgctccggcccctggcgcagcccactcccagatgcatgctttgggtcctgtgtttctcctagagtctcagttttttgttttgtttgtttgtttgtttgtttgtttttgagacagtctcactctgtcgcccaggctggagtgtagtggtgcgatcttggctcactgcaacctccacctcctgggttcaagcaagtcatctgcctcagcctctcgagtagctgggactacaggtgcacaccaccatgcctggctaatttttgtattttcagtagagatggggtttcaccacattggccagactagtctcaaactcctgatctcgtgatctgcccgcctcagcctcccaaagtgctggaattacaggcatgagccaccgcacccggccctcttttttttttttattttgagatggagttttgctctgtcgcccaagctggagtgcaatggcatgatctcggctcactgcaacctctgcctcctgggttcaagcgattttcctgcctcagcctctgagtagctgggactacaggggtgtgccaccacacctggctaactttttatttttattagagacaggttttcactatattggccaggctggtcttkaactcctgacctcaggtgttccgcctgcctcagcctcccaaagtgctgggattccaggcgtgagccaccacacctagcctttttttgtatttttagtagagatggggtttcaccatgttggccaggctgatcttgaacacctgacctcaggtgatccagccgccttggcatcccaaagtgctgggattacaggggtgagccactgcgcctggcttagtttctttttcttttctctgattttttttttttttgaaacagagtctcactgttgcccaggctggagtgcagtggcgtaatctcagctcactgtaacctccgcctcccagcaaagctcagtttcttcatctgtaaaaccgttcattcattagcagagatactcactgagcatctactatgtgctagctaatttttatatttttagcaccgatgggatttcaccacgttgaccaggctggtcttgaactcctgacctcaagtgacctgccctcctcatgtattccaggtcctgggaatacagctgtgaaccagaaagataagatccctttcctcatggagcttgtattctagaaaatcctgtagacggaatttacttttgggcaaaaataaagcagaactggaatatgagacggggttgtcaggacaggccacactgagaaagtgttattgggcagagacgaggaaaggtgacgagggagcaagccctgtgggtatctgaggaacagcaaactcgaaggccccgaggcatgattgagacgcggtggggagtcccatggggctggagtgacatgtctcatagagaaggggtagaaagtgaggcaagatggagggcacctgtagtgccagctacaggaggcaggaggatcattttggccctggaggttgaggctgtagtgaggcatgattgcgccactgcactccagcctaggcaacagagtgagactctgtctcaaaaaaataaaaaagaagtcgggcgtggtggctcacacctgtaatcccggcactttgggaggccgaggcgggtggatcacctgaggtcgggagtttgagaccagcttgaccaacatggtgaaaccccgtctttmctaaaaataaaaaaaatyagcagggcgtggtgacacacatctgtagtcctagctactcgagaggctaagcaggagaatcgctcgaacccgggaggcagagattgcagtgagccaagatcgcgccaatgcactccagcatgggtgacagtgagactcggtctcaaaaaaaaaaaaaaaaaaaagaaagaaagaggctgggcgcggtggctcacacctgtaatcccagcactttgggaggctgaggagggcagatcacttgaggtcaggagttcgagatcagcctggtcaacgtggtgaaatcccatcggtactaaaaatataaaaattagccagatgtggtggcgcacgcttgtaattgcagctactcaggaggctgaggcaggagaatttcttgaacctagaaagtggcygagattgcgccatcctgggcgacagagcaagactctgtctcaaaaaaaaaaaaaaagaaaaaagaaaagagaaaagaaaaagagacaaagaaagaaaaataaatgaggccagagctatgggaggattttaagtgraggagtgaccgtggggctgttgtgtgacactgctagctttacttgtgtgcctaagtggtcctttctcagaatcttactttcttttcgtataaaatggggcttagcattgccatctgcaggacaagtacaagtcctaataatagctgacatttctggaaggcttgccaygtgtactttttggcatgacatcattgggtcctcatcgcaaacctctgaggttgattctattttcatcctcctctgaaaaatgagtcactgcagtcagagagggaaggccacctgtccctgaccacacagctgatgtcaggcacgtgggtcctaagccttccagggcctgccccctgggtccccatcctccagcctggaggccccagggcacggcttccctgctcacacctcagtttccttgctatcctagaaacctaagggtagctgggcgcggcagctcatgcctgtaattccagcactttgggaggccgaggtggccaattaccagccagaggtcaggagttcgagaccagcctggccaacgtggtgaaaccccgtctctactaaagttacaaaaattagccgggcatggtggcaggtgcctgtaatcccggctactcaggaggctgaggcaggagaattgcttgaacctgagaggcagaggttgcagtgagccaagatcgcaccactgcgctccagcctggacgacagagtaactctgtcaataataataataataataataaataaactgctgggcacagtggctcaagcctctaatcccagtactttgggaggccgaggtgggcagattacctgaggttgggagtttgagaccagcctgaccaacatggagaaaccccgtctctactaaaaatagaaaattagccgggcgcggtggcgcatgcctgtaatcccagctactcgggaggctgaggcaggagaattgcttgaacctgggaggcagaggttgcagtgagccgagatcacgccattgcattccagcctgggcaacaagagccaaactccgtctcaaaataaacaaacaaactaactaaagaagcctaacagtaaatggcagctggtgtgtatgtgaccctgttgctctgcttcctccagggacacggccaacacggtgaaggaaaagttcgggaggaagctttatgaatccttactggtgtgagtgccccaccctcagccctgtgccctcctaggccctgactaacccctctcattactcygttctcacatgcatgcccctgcttgccttgcagtgggagccttcccgacrtgaacaagatgctggataaggaagacttcactatgatgaagagagccatctttgcaacgcaggtatggattggacctctgtgcagagagatagcagttcctggcagccccagaggcagcttgccaggccagstcagaccccagagattgctgggagtcctgctttctcctgcagccctttatgaagggatctattctgaggtccacagaagggcacgtgctgactcgtgcaacttcagttgctggaggcgaggcacttagggtgggctgttttctgtggcttattctgccacgagggttgctgggacgtgtggtttctctgggattctggggtcaatgagcaaaaggaagcttatttgtttatttatttttattatatttatttatttattttgagatggagtctcgctctgtcgcccaggctggagtgcagtggcacgatctcggctcactgcaacctctgcctcctgggttcaagcaatactcctgccttggcctcccaagtacctgggattacaggcacatgccaccacacccagctaatttatatatttttagtagaaacgagatttcaccatgttggccaggccagtctcaagctcctgacctcaagtgttctgtctgcctcagcctcccaaagtgctgagtttacaagcgtgagtccctgttcccagcccaaagggaagtttaaaaggaagtgtagaaatgtaataaagggccaggtgtggtggctcatgcctgtaatctcagcactttgagaggccaaagcaggaagatcacttgagaccaggaggctgaggctgcagtgagccatgactgtgccactgtacaccagcctgggggacagagccagatcccacactagccccccacccacccccaaaagaaagtcaaggcccagcttggtagctcayacctgtcagtattcccagcactttgggaggctgaggtgggaggatcgcttgagcccaggagtttgagaccagcctgggcaacatgatgaaaccctgtctctaccaaaaatacaaaaatgagctgggcatagtggcatacacctgttatcccagctacctgggaggctgaggccagaggatgccttgagctcaggaggtcaaggctgcagtgagctatgattatgccgctgcagtgagctatgattatgccactgcactccagactgggcaacagagcgaggcggacacatacacacacacacgaaagaaggaaaagaaagaaaagaaaaggtcaagacagccataaaagaattacaactctcagctctccttgggccttgctgcacacggctccacctctacccctaaaactgctgggagtggtagttttatcgggccactttagggacgcagtcaggaggtgagcaaaagcacccagcattctccagaaaacattgcaaactctcagcagctgcggtttcttatttccagaggctgtgtgttggtccccagacacccctgggaattgtagctgctttagatccctaacttcagagagaattggcatttataaaatgagaacttaccgtcattctattgagtctaggggcccaaaaaactacaactcccagcagcccctgctggctttctggggcattgacgcttcccttgtccagaggcttctgggagttagagttctttcattctctggggtccagggacttcagtacttgtggtctacattggggagccatttcctggggaatggaaacccagacagctaagttgtagaaacaaaacgtgaactgcttttggctaacctataatttccaatagtccctaaagcagcccacctcattatgaatgtttctgccatcgggatgctgggagttgtagtttctcgggcccctagactcagtagagtggtggtaagtaaaatctttaatgagctatgatggaacagttgctaagaactatacaccccagcagtcctcaggacttcctatcacactagctctgtcttgctccagagactcttggaaattgtggtttctttgggcctttgttagggttggaggtgaattttcttttttcttcttttttttttttttttttttttttgagacggagtctcgctctgtcgcccaggctggagtgcagtggcgcgatcttggctcacttcaacctccgcctcccggattcatgccgttctcctgccccagcctcctgaggcacccaccaccacgcctggctaattttttgtatttttagtagagacggggtttcaccgtgttagccaggatggtctcgatctcctgacctcgtcatcctcctgcctcggcctcccagagtgctgggattacaggcgtgagccaccacgcctggtggttggaagtgaattttcataaggaaactacaactcccagcagtctccaaagcttgctgccatattggcacagtctccacccccattgactggggatagttatatttcctttgggtttctttaataatagagcccagagtacagaacaaggtagctgcaactcctcatagtccttggaggtaagggagttgctaacacggctttgcctcaaagacagctgggaattctagttctttgaagctcatggtggttaagggaaggaaaacatttccaggccaggtgtggtggctcatgtctgtaatcccagcacttcgggaggccaaaacggatgcatcgcttgagcccatgagttcgagaccaacttggccaacatagtgaaaccccatctctattaaaaaaaaaaaaaaaaaaaattaggctgagcgcaatggctcacgcctgtaatcccagcactttgggaggccaaggcgggtggatcacgaggtcaggagatctagaccatcctgatttaacacagtgaaacctcatctctactaaaaatacaaaaaattaaccgggcgtggtggtaggcgcctgtagttccagctactcgggaggctgaggcaggagaatggcatgatcctgggaggtggagcttgcagtgagccgagattgtgccactgcattccagcctgggcgacagagcgagactccgcctcaaaaataaataataataatttaaaagaaaagaaagaaaacctttacaggttgtactagtgggaatccacaactcctggtgatcacttgggtttgttgccccacgtccggtgcatttgtggtctccttggctcccccagggtccgcatggctcatgaggaagtagggagttctctgtcccttccatgaccccttacccttcttgtggctcctgcagcggcagtctttcccccctgtgtgcacccacaatatgctggatgactcctcagaccccatcctgaccaccatccgccgaatcggcctcttcaatagcagtgccgacagggtgaaggtgagggcatttggtcagggctgggttgggcacggcagagggaaggggttgggtcctgggcctcacacactccattcccctataagttttatcaaaggtattgctgtggttagaaagaaccctggcttctgaggcaggcagacctgggtttgaacattggtcctgccaaacacatgctgtgtgatgctagacaagctttttaccctctctgggccaccttgggatctcagggcttagctaaataaggcacttgggctgagtccttctttttcactaccaggtgattttccacccggagttcctctcctccacaagccccctgctccctgtggactatgaggagtttgtccgtggctgtcaccttggagtcttcccctcctactatgagccttggggctacacrccgggtgagtrtagtgggcaggggacagygtggtcatggcrtcctagtcagagctagcatgtcttggggcgaggcactggccttctctgagcctgttgccttctttgcaaaacrggaacaatggtaatcacctgttctgctacagcgcgtgcttttgtgatacaatagctcatgtattgagaaactagaagactgggttttgaggactagtgaactggatgtcacagttcacactgctttctcccagaaagcagtggccccccaaatagtggcaatgaaatgcacaattcacaaatacagccgagtgtggccaagtctcctcgtaagacgttcccagtgcccatcaactccaccttcctcttgttggttcacattagccagtgtttttaaagctaaataaggctgggcgtggtggctcatgcctgtaatcccagcacttggggaggccaagatgggcagatcatgaggtcaggagtttgagaccagcctggccaatatagtgaaaccctgtctctactaaaaatacaaaaattagccaggtgtggtggtacgcacctgtagtctcagctacttgggaggctgaggcagagaattgcttgaacttgggaggcggaggttgcagtgagctgagatcatgccactgcactccggcagtgctgtgctctgggtgacagagcgagactccgtctcaaaaaaaaaaaaaaaaaaaaattaaagctaaattagtgccatttcctaatttattagtaatttaacaagtcctgcaaactgtgcttgcatgataattaggagtcgcggtcagccccaattccctttttccataggccttgttttatagatagattgatagatagtactagtctgttttcacaccgctataaaaaaaaaaatccargactgggtaatttataacggaaagaggtgtaattgactcaccgttccacatgtctggagaggcctcagaaaactcagtcatggcagaaggggaagaaagaagcttcttctcatggcggcaggagggagaagtatgtgagggtgcaggaaaaacgaacatttataaaaccatgagatctcgtgagaattcactcactatcatgagaacagcggcgggggaaccacccccgtaatccaatcatttccctccctcgacacgtggggactacattttgagatgaaatttgggggggaacacagagtcaaactatatcacaaatatatatttaatacattttactatttgtttcttttttgagatggggttattactctgttgccaaggctcacctggaactcctaggttcaggtgcttctgcctcagcctcttgagtatctgtcattataggtgcatcccaccatgcctgacagatgtattatatttagtgcctatttttgcagtttacagatgtttttaggaaaacttacataagaattatagatcaggccaggcatggtggctcacgcctataatccccacactttgggaggccgaggtgggaggatcacttgaggacatgagtttgagaccagcctggccaacatggtgaaaccctatctctactaaaaatacaaaaattagctgggggtggtggcaggcacctgtaatcccagcccttcgggaagttgaggtgggagaatcgtttgaaccccagaggcagagattgcagtgagctgagatcgcgccactgcactccagcctgggcgacagagtcagaccctgtctaaaataataataataataattataggtcaggggcagtggctcacacctataatcctagcatcttggaaggctgaggtgggaggatagcttgagctcaggagttcaagaccagcctggacaacatggtgagaccctgtctctataaaagatttttttttttttttgagacagagtcttgctctattgccaggctggagtgcagtggcacagtcttggctcactgcaaccgcctcccgggttcaagtgattctcctgcctcagcctccagagtagctgggactataggcgcctgccaccacacccagctaatttttgtatttttattagacacagggtttcaccatgttggccaggatggtttttttttttttctcttcttgacctcgtgatccacccgccttggcctcccaaagtgctgggattacagacatgagccaccgtgcccggccttttttttttttatttttaattagccatgcgtagtgttgtgtgctcgtagtcccagcctcttgggtggctgaggtgggaggattgcttgagcctaggaggtcaaggctgcagtgagctatgatcaagccactgtcctccaggttgggtgataaagtgagaccttgtctcgagaaaaaaaaaaaaaaagcattgggccaggcgcagtggctcacacctataatttgaccactttgggaagccaagacggatggatcacctgaggtcaggagttcaagacctgcctggccaacatggtgaaaccctgtctatactaaaaaatacaataattaactgggcatggtggtgtgtgcctgtagtcccagctactcgggtggctaaggcacgaaaatcgcttgaacccgggaggtgaaggttgcagtgagccgagattgtgccactgcactacagcttgggtgacagagtgagaccctgtctcgaaagaaaaaaaaaaaagcataaaaatccatcaaaaaattataatacattccttgaactatttctcaaggttgttaaaggtattaaacaagacgtactagatgctctgtacacagggatactaataatgagagaccttatcttaccccccatcaaaatagactaagtccgtacaagatactggcacaagaaaggatcttacaggttgtgacaattaagtagaatgatggaccttggcccgatcctacaggttgtgagagttaagtcaaatggatattgggatgctcaataaattagcatccttatctcccaactatggactttcccgcatcttggagcaagagcaagtaattctcttttctgagcctcttagcgtcccctctgagaaatagggaaatgcacagcctggttgtgggggctcagcgacgctccgcacagcgcctggcacttggtacaggcgccagtagagggcggtgttgaggcgtctattgcgattaagacggtaggcgatgagggaagctaagtgggtctctctcctgccttcccgcagctgagtgcacggttatgggaatccccagtatctccaccaatctctccggcttcggctgcttcatggaggaacacatcgcagacccctcagcttacggtcagcgcccaggcccctgaggattctggaagggggcttgagaacagtgactcctggatcctgggaaggaggagcttgcacccttggagaccaggggcaccaggaaatgggggggctctcgggccgctgggagaggaggggtyctggtgccacagagwcctggagaccatgaagatctccccaggatgttttctgaacctgggtcctggcctccacaggtatctacattcttgaccggcggttccgcagcctggatgattcctgctcgcagctcacctccttcctctacagtttctgtcagcagagccggcggcagcgtatcatccagcggaaccgcacggagcgcctctccgaccttctggactggaaatacctaggccgggtaggacccccactttcctatcctctcctggcaaatcagcagctcctggctaggggtctttggtgcagggtgcagggtctcatcctacttgtaacagttgctgtccctttaagcaatgaaccaggccgatcgcgatggtggctcatggttgtaatcccagcactttgggaggcctaacaggaaggatcgcatgagctcaggagttaagagaccagcctgggcaacattttatttttactaaaaataaaaaaaaatcagccgagcgtgatggtgcgtgcctgtagtcccagctactggggaggctgaggtggtagggtcgcttgagccccggaggttgaggctgcagtgagccttgttcaaacccactgcactccatcctagagtaacagaacaagaccgtgtttaaaaagaaaaaaagaacattggtcaggcgttctcatttgcataagggtgtggccaaagaggagactcacttgagaattcggcccctgtttgaggggtatggctcagaaactgtccattcacaggtctgcttatctacataaggggtggagtcagatagatggattatttgtatggggtgcagcagtgtgctcatctgcataaagggtgtggccaagacccccatcatctgcctgggggtggggcctggctctcacatcctctgccccctctcctcctttcccctagtactatatgtctgcgcgccacatggcgctgtccaaggcctttccasagcacttcacctacgagcccaacgaggcggatgcggtgagtggaccctggatttctgcttagccaggagctaaagggctgggcttcggtggggtgggggtccctcctggagtgggaaggcctagaggtggctggatgcctgggtgggactgtgaggtcctcagctcaccctggtttgcacccacatcgccgtatgcaggcccaggggtaccgctacccacggccagcctcggtrccaccgtcgccctcgctgtcacgacactccagcccgcaccagagtgaggacgaggaggatccccggaacgggccgctggaggaagayggcgagcgctacgatgaggacgaggaggccgccaaggaccggcgcaacatccgtgcascagagtggccgcgccgagcgtcctgcacctcctccaccagcggcmgcaagcgcaactctgtggacacggccacctccagctcactcagcaccccgagcgagcccctcagccccaccagctccctgggcgaggagcgtaactaagtccgccccaccacactccccgcctgtcctgcctctctgctccagagagaggatgcagaggggtgctgctcctaaacccccgmtccagatctgcackgggtgyggccccgcagtgcccccacccagtccgccaaacactccaccccctccagctccagtttccaagttcctgcactccagaatccacaaagccgtgcctttctctggctccagaatatgcataatcagcgccctggagtcccctgggcctggaccgcttcccagaggccaggaatctgccattactctgcggtggtgccagaggttttaggaaacctggcatggtgctttcaggtctggggcttttagagccccccgtgtggcttacaaattctacagcatacagagcaggccacgctcaggcccggcatgcgggccaccaagttctggaaaccacgtggtgtccctgcraatggggcgatcaagtccagagccggggcactttcagagtttgaaggtaactgagagcagatggtcctccatttcaactccagaagtggggctctgggagggatgttctagccctccctggcatgtcagagccaggctctgcctggaggatccctccatccggctcctgtcatcccctacactttggccaagcaagaggtggtagaaccacttggctgctcattccttctggaggacacacagtctcagtccagatgccttcctgtctttctggycctttctggaccagatcctactcttcctttctaaatctgagatctccctccagggaatccgcctgcagaggacagagctggctgtcttcccccacccctaacctggcttattcccaactgctctgcccactgtgaaaccactaggttctaggtcctggcttctagatctggaaccttaccacgttactgcatactgatccctttcccatgatccagaactgaggtcactgggttctagaacccccacatttacctcgaggctcttccatccccaaactgtgccctgccttcagctttggtgaaagggagggcccctcatgtgtgctgtgctgtgtctgcaccgcttggtttgcagttgagaggggagggcagraggggtgtgattggagtgtgtccggagatgagatgaaaaaaatacatctatatttaagaatcccaggtgtggtcagacatgacacttggtgggcctggctgtgacgtccccccagtgccaccccttccctggtctgagctcatcctcttattctagagagacttggggggtctccctatgttgcttaggctggtctcaacctcctgggctcaagtgatcgtcctgccttggcctcccaaagtgctgggattacaggcttgaaccaccctgccccagacccaggggaaggagaaggggaagagtcagagctgacacagcagttttgcagcttggacacagcaagtgctttttaaggcctgttttaagcttcttcagttcccatttggagaatccggcccaaggtttcacatcccatttctgtgatgaaccctaaaccccttgtccagcattgcttgggcatcacgtgttcctggctgctcagctccactggccagttcctctcagtgtgcgcctcacattgggatcactcaagctcgggccataatctcttaaactctggagcaaagacctcagtgagccccccggttgccatgcaagttgcatagcaatagcgtcaatgtgcccatataaagggcctaataattccaactgcctcccagaattgaggcttttttcttttttgagacagagtcttactctgttgcccaagctggagcacagtggcgccatctcagctcaccgcaacttccgtgaggcagacatgttttttgtttgagatgggagttccactctttttgcccaggctggagtgcaatgacgccatctcagctcactgcaacctccgcctcccagattcaagcgattctcctacctcaacctcctgactagctgggattacaggtatgagccaccacacccagctaattttgtattttagtagagacggggtttcttcatgttggtcaggctggtctcgaactcctgacatcaggtgagcgacccacctggccccataatcactcgttaaatagggctgtttctggctgagacctaacatctgtttctagataccaacctaggtcttaattcaactccctggagtctatctctaccatctgggagggacagttaacagccaggcaagcagagaaccctcaggttcaacactacccagatagcctcttgtcttaggacagttaagaaaatgggagatggggccaactcctctttcactggcatcccaacccagccagaagctttatgagaacagatcccacctcatcttccacaccacacacaaaaccaccagctgcatcaaaaagctttatttccatttggtccaaggcttgttaggatagttaagaaagctgcctattggctggagggagaggcttaggcagaagccctattactttgcaaggggcccttcagaagtcgctgggctcagaaggctcttagtcgtgcttgagagtgagcctttcgaagagatactcgcccagcccagcctccgggccacccagcctgtggaggttggtcaggtggtcacccatcttcttgataagcttcacttcctcatctaggaagtgagtctccaggaagtcacagagctgagagagaagagggagaaattagaaacccaatccctggaaaagagggggagagagcagccagttgcagattaaaatgtgacaggtgtgaaatgaggctctgaaggaaatttgcccaaagggagcagaggcttgaggggtatggttgggtagccatggatgcagcgggtacgtacatgggggtccgtgcgggcagaacccagggcatgaagatccaaaagggcctggttcagctttttctccagggccatggcagctttcatggcgtctggggttttaccccactcatcttcagctggcttctatatagaagggagaaatggctcagaatacacacactcggcacatagaactaaacctacatttcccaagagtcgttgggggtcagaggcccaggccacaaagacatgtgacagcttgtatttatcactctccgcaccctgtcctagctcttacagctatacgtccctaagaccacgcagcggtgtggactgccgcgtgttgtgggcactgcacgaggtgcgcctctatttccagcggttaagagggctcacaagaccgaactcaatctcccagaagcccacgcgacacctacgccctcaaatcaaggctcctcgcgcgcacggcctgctgggagatgtagtccattacccacacactagttaccttgatgtcctggaagagagcgcggccgccacgctggttttgcatcttcaggagacgctcgtagccctcgcgcttctcctcggccagttcgcggaagaagtggctcacgccttccagagccacatcatcgcggtcgaaatagaagccctacgggaagagatggaggcaacaatggttagcgggaggcgaggccaaggggactccgccctctgtttacccgaccgcacaaagaaggctggcgcgtgcagtgagggccggaggtgcgcagctggaggaaattagggccaggggcgtcctggggactcaccagagagaggtaggtgtaggaggcctgcaggtacaaattgaccaggctgttgacggctgcctccacgtcggtggaataattctgacgaatctgggagctcatggttggttggcaagaaggagctaaccacaaaaacggtgctggcaggtcccagaagcaggagatggccgagaagatggtcccggaggttgcaagcggagaggaaatcggagggcggtcggaggctggaagagagtccccggatctgttccgtccaaacactgttgaagcaagagacagacccgcgggaccgccgaactgcgaggggacgtggctagggcggcttcttttatggtgcgccggccctcggaggcagggcgctcggggagggctagcggccaatctgcggtggcaggaggcggggccgaaggccgtgcctgaccaatccggagcacataggagtctcagccccccgccccaaagcaaggggaagtcacgcgcctgtagcgccagcgtgttgtgaaatgggggcttgggggggttggggccctggggctgattctggaaatgcaggggttcgtgggcgggagggtgggggctggggtccctctgggaggctagagttttatgggagcactaacagccctgtgaactgatgaccctggggtcctggggtgcctcgggaaagtaagattctggggtttccgagggcatggatttttctggaaccttgagtggggggaggggcacctcaaaggtgcagggaggacctgtagttgcctgaggtttgcgctgcgagataaggagtctccggatccttgggaagcttggaaggctgtgaggtgttatttctggacccctggagatctctggaagatggagtgttgcggggactggagtcctgggatttacaggggtgggggttcacgatgcaaactctctatattttggagccctccccggggaaatctttaggttcttgaggtgctctgcaagttggaaagggcagttattctggagccgtgggtttcacccagtgcgggaagcccaggaggagcattgtatgaggtagggtgacttctggaaccctggacagccctctggaaccctccaaagatgggctgggactttggggataccttggagctctttcaggggcccaggctttttctgggagtggaaatggggaggaatgaaaagtctgttttgagctttgcggtgtctctgggattgcatttcctggaggctgttttggagacaactcacagacttcgagaattctccgtggccctgaacagtgtctctgaagttgccctcgtgtcttgcctgacgtgtgctccttcaggcccacaaagagaagccctgcgttgtggacaaacagtctggggacctatggacgagacgtctgtcttcgactaatgcatattttttaagtgggcctggtccacgttgatttctgggagacggagtcggcgcaaaccttgactctacttaagtgccctgatggaggcagcccgtgcgctgggcagggagctgaagccactggggtgtggggtgaggtcaggccctgccctacagaggagctgctccgaacagcccaggcggggcagcccctgaccgaggggatctgcagatgccccgccaggccggtatctggggtccttgttgcaggcagcgactgctgagtcatgctgagctcagcgcgggaaggggcccccgcggggacggatgggggtggggccactcgctgacctcatccccttggcactccccgacttttttggtgggaccctcagaactagacctggctcagacccaaatcgggccccctaccccaaggtccccccttgttggaagccggctgtgtgctttgtctccgtgtctttttggttcccataatttttttttttctgggatcctgcctgtggccatattgtcccctcactctgggtggtggctcagtgtacactcattgatcctctgcccctctctctcccctgacttggggtctctgggaagagtccatggaggaggggcagccgtccaaagcaccccgttgactgtggggcccgagttactcatttaccaaatgtcatacctcagcccagagacctttagtcggccgagaggggccttggggcccataggtggagggagaggaggggctgagagagacaggatctgaagaccatagagaacgtggggtggggagacagaggcccagagaaaaagagactcagacagagaccctgagagagagggggacagagacccagagagaggggaaaacagacccggagacagaggggtacagagaccctgagagagaggggagggggacagacctagagagaggggggcagagacccagagggaggggaaaagagacccagagagagggggggacagaggtggggggggacagaggcagggaggtacagagacccaggggtgggggggatagagacccagagggacccggcgggaggggacagaaatccagagtgggggacagagatccagagagaggtggggacagagatccagagaagggggtacagagacccagagagaggggggacagggactcagaaggggacagagactagggaggactgagacctgggggggcggggacagggacccgggggcgggggacagagaccggggagagggaaagagacccagagagaggggaggtacagagacccaagagagagtgacagccagagagaggacagagacccagagagagggagacagaaactcagggtcgggggacagacccagagagagatggggggccagagatccagagggggggacagagacccagagagagggggccagaggtctgggtgccaggggtggaaagaggcccagagaaagagggccaaaggtggggtgggaacagaggctcggaaagcaaagacccagagcatggggacagagacccagagatgggagggggtaaagacccagaggggggtgccagagaccctgtgactgagaacccacatcctctagcccccttgtcttcgctccgcctgtgtctaaggtcactgggcctctgagctcagcaccttcttccggcagttcctctccaggggggccccacccagctgtggggccagaccaggttcctcctcctctgccctgccctccagcctctcagtcgccagccaggtcccttcctctctgtcctcagcccagctcaggaggcctctcccgtgggccctcgccctggtgtcctcagcctgccaccctccagcgacctcaccaccaggctccagagcccttcctgctcctctggtcctcccatccctcctccccccactcccattctccagctcggtaaaggtatggcctcctgaggtcccacgtgtgacacgccaggctgtggtccccgggccgaggaggcttgctctgcagccggccgtgctgttcttcccttacccacacgcctgcttgggcctcacaggccgctgcctctgtcccgcacaga

SEQ ID NO: 93758 - DNA, 43484 bp, Homo sapiens
tttattttaacttatttttattttactttaagttctgggatacatgtgctgaacgtgcaggtttgttacataggtatacatgtgccatggtggtttgctgcacctatcaacccataatctagtttttaagccctgcatgcattaggtatttgtcctcatgctctccctccccttgcctgccaccccccaacaggccccagtgtgtgatgttcccctccctgtgcccatgtgttctcattgttcaactcccacttatgagtgagaacatgcagtgtttggttttctgttcctgtgttagtttgctgaggatgatggtttccagcttcatccatgtccctgcaaaggacatgaactcattcttttttatgactgcatactattccatggtatatatgtgccacattttctttatccagtctattattaatgggcatttgggttggttccaagtctttgctattgtaaatagtgctgcagtaaacacacacgtgcatgtgtctttatagtagaatgatttctaatcctttgggtatatacccagtaatgggattgctgggtcaaatggtatttctggttctagatccttgaggaatcaccgcactgtctttcacaatggttgaactaatttacactcccaccaacagtgtaaaagcattcctatttctccacatcctcgccagcatctgttgtttccagactttttaatgatcaccattgtaactggcgtgagatggcatctcattgtggttttgatttgcatttctctaatgaccagtgatgatgagctttttttcgtatgtttgttggccacataaatgtcttgatggtgagaagtttttagtgtgtccggcattgcccaagagagggaggtttcagatttggggcatggatattttagttgaatttgctggtgtaatcttaccttgaaaagggccaagtgagtttgctgctgcagcttaatagtaatattccgttaagatcatctgactatcttagctcagattctgtgatcaccagcttatcaaaagacttcctagtactctgatattgggaatgggggtcctacctcacagacataagggtccaatcagcatggcatatataattctttagataatacataaattgtcatccagattatagatcattcttttatgaatcacaggatctcaatgttggagtatatttaagggacatttagttaaccatctacctggtgctgatattccccttataaaaagctgacaaggggttgtccatttttccttgagagtctcaagtaataggaaactcattacctctttacttctctgaatacccgtgttggaaaattctgctttatattgaaaaaaaattgtgttactttatttatttttatttttattttttgacacagaatcttattctttcgcccagtctggagtgcagtggcgtgaccttggctcaccacaaccctcgcctcctggattcaagcgattcaagtgcctcagcctcccgagtagctgggactacaggcatgcaccaccatgccaggctaatttttgtatttttggtagagatgggggtttgccatgttggccagccaggcttgtctcaaactcctgaccccaggtgatctgcccgcctcagcctcccaaagtgctgggattataggcgtgagccaccatgcccaacctaaagtgtgttactttagagcctctattccttggttgactccttgggtcacatacaaaacaatctaaatcttcttaaaaaaaatgtagataaactcatgtccccgataaacctctttccaggccaaattccctacactctttaaatcctcctaatataggatgctttcaactcattacatcatcttggtcacccttccatggacaggctttagtttctcttttaatgtgtggtcttgggcacgggcaagtgtttttgtaaaatttacaaatgtaaaatattttcattgctagtgattgactgtctcttaccactccaacttccctctgtcacacttcccctcaggtcaagtgatgctggagtggccatgagcatttctggaatacagataagaggttgttgtgttggtggtatatttagtttggatttaggagaatatatattatgtggttcactgacacttctatatctagttaactgattgatarctgccttagtgtagaaatggcttccagraaaactcctaccacccactgtgccaatttcacctggcattatgatactaaattgcaggtgtgttcagcagctaatgaaaatgttgtttttatgggttttgtgatgttgaagagatttttcagctttttacaataaatataaaatgtgctgtgcattgcgctatactccttataatgggaacatttcatggcatataaattatacctcaataaatctgttaattgtgctgtgctttcttttctgttttaaataaatatttgcttttgtgcctaaagtaaagtaaaataaaaatatgtagcaggatatctacaaaacctatacaaaacattctacttaagggtgaaatggaagaatcccctttgagattgggaattaggcaaggggatcactacttctacctttgtgcagcattgtactagaagttctagtgagtgcagtaagcgaagaaaaagaaataaaagttataagaattagaaaaaagaaggctgggcacggtggctcacgcctgtaatcccagcattttgggaggccgaggcaggcgtatcacctgaggtcaggtgtttcagacctacctggccaacatggtaaaacccagtctctactaaaaatagaaaaattagccgagcatggtggtgggcgcctgtagtcccagctactcgggaggctgaggcaggagaatcgcttgaacccgggaggcagacgttgcagtaagccattgcactccagcctgggcaacaagagggaaactccgtctcaaaaaaaaaaaaaagaattagaaaaaagaaataaaactgtgtttagagcgaaaaatgtgactgtgtttatagacaatgtaagacaaaatacagaaatattattacaattaataagtgagtttagcaatgttgctgggcataaaaatcaatatgtaaaaacaaattgtatctttaacagccatcattaaaaattaaaattaaaatatataatttacaacctcatgaaaacatataaagttcttagaagtggatataacaggctgggcacggtggctcatgcctgtaatcccagcactttgggaggccgaggcaggcggatcacgaggtgaggaggtcgagaccatcctggctagcacagtgaaaccccgtctctactaaaaaatagaaaaaattagccaggcgtggtggcgggcgcctgtggtcccagctactcgggaggctgaggcaggagaatggcgtgaacccgggaggtggagcttgcagtgagccgagattgcaccactgcactccagcctgggcgacagagcgagactccgtctcaaagaaaaaaaaaaaagaagaagaagtgaatataacaaaggagacgcaagaatttgattataaaatttacatgaaaatgaaaaaggccaagaataaaaacaaaacacagaaccccccctccccccaaaacaaagaaacaaacaaacaaaaagtcaagaatagccaaagcactcttgaagaacaaggtggggaaacttgtcttatcagatgtcaagacttagtaattaaggcagtggcatggaagaactgaatggagagctccggaacaaactcgtgtatatagacatttcatatataatagaactgacattttagatcagcgaagaaagtatatttttgaaagtacttttcaaaaatggctgagcgcagtggctcatgcctgtaatcccagcactttgagaggcccacgtgggtggatcacatgaggccaggaggtcaagaccagactggccagcacagcaaaaccctgtctctactaaaaatacaaaaattagccaggcatgatggcgcttgcctgtaatcccagctactcgggtggctaaggcatgagaatcacttgaacccaggaggtgaaggttgcagtgaagggagatcacaccactgtactccaacctgggtgacagagtgagaccctgtctcaaaaaaataaaaataaaaataaaaagtacttttcaaaaatgatgctggggcaattcgttttccatatttaaaagtagtaaattggataccatacatgaaaatcagctccaggtggattcaaaacataaatgtaaaatgcaaaaatataaaatttctagaagaaaatataaaagagtatcttgatatctgggtagtgatggatttctaaaacaagacataaaatgcataaatcataaaagaaatgactggtaatcagagtgcattaaaattaagaacttccatttatcagaaaacactattaagagactgaaaagacaagccataaacataagcaataaaagattagtataagattataaacagaaccctaagaatctaaaagcaaaagaaaaaccaatagaaagatagaccaaaaagtagaataggctcagaataggctcttttaaaaagagaaaactcaaatggccagcagttgaattaaaagatgctcaaactcattagtaatcagggaaatgcaaattaaaatcataatacgatagttttccacacttacttgaattataaaaacaaaaaagtctggaaaataccaagggttggtaagcatgtagaggaagtagaactctcattcataactctctgtagtatacatttaggtggtcacttcggaacgggtttggaattacacagcaaagtagaatatgtgcaaatctcaggaccctggaattttactcctgggtatataccttagagaaactgtagcatatgtgtgacatttgatcaacattgttccatcatcatatccatcagtagtaggatgaatgaatacattaatgtatattcattcatgcaatggcatattagatagcagtgtaagtgaaccgcaattacatgtacatgtatgaatctcaaaaacccaatgttgaaagaagcaaaccacagaagcatacatacacactgccaggtttcatttacaaaaagttcaaaaacaggaaaaactaaacaatatattgcttagggatgcaattatagttagtaaaaatataaagaaaaataacagaatgattaccccaaatttcaggatagtgattacatccggtggggtagaggaggggaagaagatagatgtgatcagggagggaaatacaaagagctttaagatactggagaaaaatagtctattttctttaatctgagtagtgaacacatagatacttattccttaaaattattctttaagttacatatgtatgttttatatactcttctgtgtatatttcaccattttagaaaagggaaaaaaaatcagtgcccagagctgaacacacaactctagtaaatctatcatactagaagacaatcatctccattcttttgagtgctctgcctctgtttattttgaaccaaagtgcacttttatacttgttaaattttctcttgctctatttggcccttcttttcacttgtccttccagccagtcaagttctccccaaagccatcatcatatatgtcaaccacagatcatcctccaggggaactggtatgctaaagtttctgagctagccaggctgaaatccaaatggcagccggcagatgtggcaacagtttgaaaagtgcactttgaaacagcttccttaccacacacgcttccctccctacttctcctgaagtaatctgtttacagacccagactaataatcttttttatgagaaactttagcaaatcttttatctaggaaggcaatgcttcacattaggtcatgttgataagatgatgagagagaatattttcatccaagaatgttgctatttcctgaagcagtaaaatccccacaggtaaaacccttgtggttctcatagatagggctggtctatctaagctgatagcacagttctgtccagagaaggaaggcagaataaacttattcattcccaggaactcttggggtaggtgtgtgtttttcacatcttaaaggctcacagaccctgcgctggacaaatgttccattcctgaaggacctctccagaatccggattgctgaatcttccctgttgcctagaagggctccaaaccacctcttgacaatgggaaactgggtggttaaccactggttttcagttttgtttctggtaagtgatgtttgacttcctattaattaggaaggattaaggagaaatcatgttttttaatatttgtaaagcaatttgaaagagaaagatgattccatgccgattattgggctcatcaagaccagttagttaaaaaatacaactrtgggtcagatgagaggacagaggcaaataacatgcaattgttcatgttgtcaaatcacaagtatttggaatttcaatctgttttcattttctgtcatctccctttctcttccatctcacttctaactactaccatgagtgctgatttctctctatctttcctatactggtcccatcaagatttcaaaaagtcactgaatgtttgagatgaaagtgatcttagagatcatctggcccagtactgaccactagaaatatagcaaaccacataatgtaattcctaaattttctaatacctacaccgaaaaggtaaaaataaacaggtgaagttaatatttaacaatataattcatttaacccaacatatcaacaaatcctttcagtatgtattcaatattgaaaatattaagaagctaatttacatatttttatttttactgagtctttcaaatctgatgtgtatatatacccacagcacatctcagtgaggactagccacatttcaagtgctcagcagccccatgtgggtagtggctgtggcattgcatagtgcagatgtaaaccaacttattgattgtacaaaggaaaataagacctagatgtcacacaatgaattgactgaattggcatcactcgaacccagctccccaatgacgttcaggccagaacccctttatcaccctttgtatgcacaatccctttctcctaacactctaacacctctctccactctcattcttccatttctgagccacagttgagcctggggctccctgtgtcctttctcactttcctagatcttcattcattactctttctcttttctcctgttttgcttttgggtcccacaggcaaaacagaagagagaaggtgtgatgcttctttttattcctgtctacccccccgccccccgaccaggtgctccagggaaaaatatgtggagtttccctggagggttgtttgttttacatttaacaaaagtgcttattttgtcaggttatcccatgacatattttaaatgctcaatgccttatattgagttccttttgcactataatggaaagaacactagtttaggagaaagggaacctggcaagtactttgaattctgctactaactgggtgatctcgatcaaattatttatcctctctagacttcaggtcctgtgggtgtgtaggtggggggaattgggcaggggaggggagcaggggattaataaagtgactagattagatacaaatataagggtgtttctagctctaaaatccacatttacctgcattttttccccctctcttattttttgctgggagagtttaccagctatgatggtgactcacatttaactctctagctttgaattttcatcccccaccaaaccagctggcaagcttagacttctcattatctctgacatatactcctatgcactgatttttaaataaaaaataaattacttaaaaatagttttattcctccttcctcccaggtcttgtagtttaccttctttgacgttcatagtggaggaaatgacagctaagatggggaatggaatgccttactcctagatatcactgtatttcatcatttgccttgcctacaattgatgatgggctgacacagttatttgcccctgtgtctctttgcgatccagaaatatttctgctccctctaaataaacttctctcctctgtcttccaaattcttgaggtgtctgtgactgttgactttcttttctttcaaagacgtttctctggaagacactcagctctggaaaagggtaactgagcaaaggaggcaggaagaaattgattggtaaagcaggttcggtggtgacacaactctgtagctagcacttattgatctcttactaagccccaagcattgcattaatcactttacacgcattatctgacgtaagcctcatagcattactataaagtaggtcctgttattatcctcattttgcaggtgaagaaattgaggtttagaaaatttaaatcatatgtctgtctgagattatagagctattaattggtgatgctacaacttgactccaatatcacactttaaatcactatattatagtactaaaggtgtgtgagtggtctagatctagggagtctgaataggccatgtcctaggctaaaggccctttgcctgttgtgctgagatggttctgactcatactgtggggcgagggatatatactagcgccctggagacctgtcgaattacagactagcacctccacacttgggctagagaccagttggttggtcctcaaggcaatgggcagtgagttccaaatttcacctttagccagtgcagagacagaacttggaacaggcaaaagcagtcttaagagctcaaaaaagtccaaaggaaaaatagattaatttgaaaaaagactcacaatctgaaaacagaaaaatgtgtgtcagggtgtaattaaaaaggcaggcccatctggaatggtttagttcttttcagttaggtattgttataggygctaaatttgttctttgtttcttcagatatccatttattcacttattgccatcttttaggtgcaacagtttgaatgctctagtccaagaaatggcaaatgtttctgtaaaaatctagatagtacatattttaggctttgcaagccatatggtctctgtcccaactactctactccgtcattgtatcacaaaaacagccataaacaatacaaaaatgagtagcagtggctaagttccaataccactttatttatggtcactgaaatttgaatttcatrtaactttcacatgccacaaaatattcttctttcgattttctcaaccattagcaaatttgaaaatataaaatataaaaaacaattctgagcttgcaggctgtggcaaaacaggtaatgggccatgggcctcagtttgctgaccctgctctagtctaatgcatgtctcaaagtgctaactcactctgaaagccagttagatactagcaggattgcactcatttaaaatgaaaacaggtaaacacaaaatagccaaaacggcgacactattgctatccctatcccttatttactccttcccatactcaaatttcactttattctttgcatgtttttttttctttctctaggttgtttggttagggctgaatgttttcctgtttgtggatgccttcctgaaatatgagaaggccgacaaatactactacacaagaaaaatccttggggtgagtatcacggttgtcacggatagaatctctattgttttccttatctctgattccagcttctttgtgacccaatgccctgatattctctagggctagggttgccagaaaaagtacagaatgcccaactgactttgagtttcagataaatgacaaattatttttttatgtaagtatgctccaaatactgtatgaaacacaggtatactaaaatatttattttaaaaagtctgaagttaaaatttagcttagcatcctgtatttttattaaataaatctgataaccccatctagggcacactacccagacccaataaaggaaacatgcaataaagaaaactattaggcagttgttttcaaactggtttccagaaactcaggtgttcctacagggtatgaggggaaggctaactgggcagtgctcctgctcctgctcctgcccctatttcttttttttttttttttacaaggaggaactggtaccattcttctgaaactatttcaatcaatagaaaaagagggaytcctccctaactcattttatgaggccagcatcattctgataccaaagcctggcagagacacaaccaaaaaagagaattttagaccaatatccttgatgaacattgatgcaaaaatcctcaataaaatactggcaaaccgaatccagcagcacatcaaaaagcttatccaccatgatcaagtgggcttcatccctgggatgcaaggctggttcaatatacacaaatcaataaatgtaatccagcatataaacagagccaaagacaaaaaccacatgattatctcaatagatgcagaaaaggcctttgacaaaattcaacaaccyttcatgctaaaaactctcaataaattaggtattgatgggacatatttcaaaataataagagctatctatgacaaacccacagccaatatcatactgaatgggcaaaaactggaagcattccctttgaaaactggcacaagacagggatgccctctctcaccgctcctattcaacatagtgttggaagttctggccagggcaattaggcaggagaaggaaataaagggtattcaattaggaaaagaggaagtcaaattgtccctgtttgcagatgacatgattgtatatctagaaaaccccatcgtctcagcccaaaatctccttaagctaataagcaacttcagcaaagtctcaggatacaaaatcaatgtacagaaatcacaagcattcttatacaccaacaacagacaaacagagagccaaatcatgagtgaactcccattcacaattgcttcaaagagaataaaatacctaggaatccaacttacaagggatgtgaaggacctcttcaaggagaactacaaaccgctgctcaaggaaataaaagagkatacaaacaaatggaagaacattccatactcatggataggaagaatcaatatcgtgaaaatggccatactgcccaaggtaatttacagattcaatgccatccccatcaagctaccaatgcctttcttcacagaattggaaaaaactacttcaaagttcatatggaaccaaaaaagagcccgcatcgccaagtcaatcctaagccaaaagaacaaagctggaggcatcacactacctcacttcaaactatactacaaggctacagtaaccaaaacagcatggtactggtaccaaaacagagatatatatcaatggaacagaacagagccctcagaaataatgccgcatatctacaactatctgatctttgacaaacctgagaaaaacaagcaatggggaaaggattccctatttaataaatggtgctgggaaaactggctagccatatgtagaaagctgcaactggatcccttccttacaccttatacaaaaatcaattcaagatggattaatgctcctgcccctatttcaaccaaagcagactatatctatctatgaacacctgcttacaattttaagaaagagtttggtttttttttaaaaaaaaggaaagtaaaaaagaaaaaacaaacacaacttgaaaacactgctgtcatggaaacatacctctctatcaaataggagggatacttaggggagtctcatgggtgctacagaattcaaggcctgcagaaaggagggctcaggtcaaggttacagaacctgagaagcttggggaagtggcagatcaaaaacagaagagggagggagggagtgggtagggcacaggggtgtggaggtgaccaggaggaagcacggagttgaggatggttctctcacaggctgatgaacccggatgctgcctggttagaagagcatatttgactgctacctctagtctattatgcaataacagatagaggattttaaatcactttcatcttgacagtgtcattttttcagtagcttttggtatcttcccaatgtacatgtttaaagacagcttgtccttttaaaaaatgcttttttctctctccataatcaaagaatccatgttgagatcacaactaatttgaacgttctgttcatggtttatttcaccctgctgttttccattttaaatgttcatccttgatccttctttagaaactataactccaaaggaggtattaatttgctttaaaaatagctttttactaagagaatgatgcaataaatgtgactagttattaacagcttgattactacatgaccaaaatgtcagcagcacaaaaataaattatgctgatgtcccatggacatttttttttcaaaattatttaaaaattgtttacatatgtagggggtataagtgcaggtctctttctttccttctttcttttttctctttcttcctttctttattcttccttccttttctttctctttcttctctctctctttctttccttccttccttccttctttccttctctctttctctytttcttcttttcttttccttccttccttccttctttctttctttgttttcattctttttattttgagacagggtctttctctgttacccaggctggcatgcagtggcatgatcatggttcactgcagcctcgactctcccaggcttcagctatcttcccacctcagcctcctgattagctgggaccacaggtgtgcgccaccaagcctggctaattaatatgccataatttatttaaacattccacagtcattaaaacatttaccatcactgcataactgcatagagctctcagccttttaagagaataacaattcattgcattgatatgccataatttatttaaacattccacaggttatttcttaaattcatgctcaccttgggaaaatacagggaacaatttgattcactatgaagtagagcagataagcagcagaggaagaagtttaaatccataatttaaaaacatttttttgccaggcgctgtggctcacgcctgtaatcccagcactttgggaggccgaggcgggcggatcacgaggtcrggaratcgagaccmcggtgaaaccccatctctactaaaaatacaaaaaattagccaggcgtggtggcgggcscctgtagtcccagctactcgggagactgaggcagaagaatggcgtgaacccagaaggcggagcttgcagtgagccgagatcgcgccactgcacyccagcctgggcgacagagccagactctgtctcaaaaataaatacataaataaataaatactttttttttgtagacatgaggtctccgtgttgctcaggctagtctcaaaactcctgggctcaagtaatattcccacctcggcctcccaaaggccgggtattacaggtgtgagcgaccatgcccagtcacaagtgtaggtttcttacatgcatatattgcatagtgatgaagtctgggtttttagttacctatcacctgaatagtgaacattgtacccagtgggtcatttttcaaccctcactcccctcccaccctcccacattttgtagtctccaatatccattattccactctgtaggacatttcattttttaaatccctattttaaaaccttaattatcaataatgctgcttccaatgagatcaaagcacatattagtttggtgcaaaaattattgctattaaaactgtttgcaaaaaccgcaattacttttgcaccaagcgaatagaagtgtataagtaaaatgtgaaaatctccctcccatcctactccccagagatacacacacacacacacacacacacacacacacagggacacacacactgacataagctcacaaatgtatcagacacgtaggttttgtttttgaggtgggtactatcgtttattcactttttcattttcatatagtaaaatttgctgttttttggtatacagttctatgagtttgggtaaacacatataataagacacacagctttttgttttaaccaaaaaagggatcactttgtagatattggctggaaattgcttatgttaatatatctcagatatctttctttcttttttttttttttgagatggagtctcactctgtcgcccagcctggagtgcagtggcgcaatctctgctcactgcaacctccacctcctgggatcaagcgattttcctgcctcagtctcccaagtagcaggggttacatgtgcgaactttcatggctggctaattttttgtatttttagtagagacggggtttcaccatgttggccaggctgatctcaaactcctgacctcaagtgatccacccgctttggtctcccaaagtgctaggattacaggcgtaagccactgctcccagcctcagatatctttccatgtgagtgcctaaccagtggtgtgctgaaaccagctcataccaggttgcaatgccagttgcgtgcatctcttcccaactctgcattcagtggtgttcaatgacatcaagttagtgtcttgaaatctggcatggtgggagtatttacatcatcaaaattggcaaatgctggaaatcaggaatccccttcctcccaaaaagctagtcattaaaacatttaccatcactgcatcactgcatagagctctcagccttttaagagaataacaattcattgcattgatatgccataatttattgaaacattccacaggttatttcttaaattcatgctctgctcaccttgggaaaatacagataacaatttgattcgctatgaagtagagcagataagcagcagaggaagaagtttaaatccayagtcaattatgcattaatgacagcaggagttcaattataacaccagtgagtggagatctagagaaatgaacatacattggcatatttaaatgtgctgcaacgaggaaaaaatgttttctctaaaaagaattcatcctatacagatagccaccacagaatatggaactgtgaaattatagtcctatattttcaattcacttgccaattttagctttaagaaatctctgtgattcaaataagcaagtagtgggaaccaatgtggaaatgcaggatctctgagatgagcagaggaaatttactcagaagtggaacaggctgtctgtaccaaaaacagtcagggtgtgagtcagcagagggagaaaacacaggtcatgtggaaaagccagaaatggaaaacagtagggcagcttttgttcaccacattgcctgacattcttagccattatagatactaggcagatcttgtcctggcttattaaactaacatcacatgttcctgggtttacgatataaggaaaaatcaattttgtgcttcatagataattacaaaaaggccaagaaattgttaaccttaacccatacccctccttttagaaagtctttgacaggcacacaatgtaaggctggccagtcagcagaagtgcaacaaaaattgcctggctgctgctgtcagctcctctgctacaacattgtcacactccatagcagtcccaagttcatgaagtagactcagagaccggttgtacagagttgaggagagaagtcagatttagctgccatggagttaagcatattctgtccagcttatacctagtaaggcctgttttttggggctaaatgcttctttgaagcattgattccttgtctcctttgctagcagcttctactgctggatcaggttgttcttgatttatgctgcctggccacccaaggaaatcagcttaaaattttgctcctctgaagttctcccttctcaaatatctacctgtttaaaaattttgctccaagaggtttgctagtcttgactaaatttattcaatttttaaagacatcttaaatagaattggttaaaaattttaagtgtttttattatacaactcttatgtgcttataactgcaatattagaaaatacagaaaagaataaaataccatctgtaattgtacctctaagtatgagctttatttaaaatgcaaataaaggtatatatgatccttggccaggcatggtggctcacatctgtaatcccagcactttgggaggccaaagcaggcagatctcttgagctcaggagttccagaccagcctgggcaacatggcaaaaccctgtctctaccaaaaatacaaaaattggctgggtatggtggtgcacgcctgtagtcccasctactcaggaggctgaggygggaggatggcttgagcccaggaggcagaggatgcagtgagccgatatctcgccactgcactccagcctgggcaatagtgccagaccttgtctcaaaaagaaaaatctatatctatatctatatctatatctatatctgatccttaggactcttttacaagtgacaaataacaaaattataataaagagtattaagtaaaatgttacagccatagaatgttttgctaacatgtaatcattaaatcctattctctttcatgttaataaatgtagtcaaacatttccaaactactgtcatgggaatttctcaactcaatattaaattcagtatgttttatgtattttgcaaacagagcctggcctgatggtgttagctactgagagagaggagaggcagctgtagccctgttcatttgcaggcctcagatgagtgggctgggtcagttgctcacgtgctagatggtgaaatgaagcagctgatggtctctttttctcctctgctgtagtcaacattggcctgtgcccgagcgtctgctctctgcttgaattttaacagcacgctgatcctgcttcctgtgtgtcgcaatctgctgtccttcctgaggggcacctgctcagtgagtcccaaccactcctaagtcaactttcacattaaagaaggagaccccagactcctcagtaggacagtccaacaccatgctcctaggaatggaagctagaagtctcctttggtagctaagggggtgggttagtgcgggtgagtattggcatgctatatgcaagacatattggttatgggttagtgaatttaataaagctggctggcgacatctgaccatgatcattctacatttgtagttttgcagccgcacactgagaaagcaattggatcacaacctcaccttccacaagctggtggcctatatgatctgcctacatacaggtaactcaggcaatccatgaatctgcagactccagggcattcagaatcttgcttcattcatccatccatatgcacattcaaaaaatatttatcgagcactgggcactatttgtcaggcactgttcttggcctgttttcatggagcttaagttctattcctttgggaacagagtaaatataaaaaagatctctccgcaatcgagggtttattgggcaccttctgtgcactcagcattctgctaagcactataatgtaggattcttctagtctagtggggcacacctgccatgatgttgctgagatgcctcttaacatttcttttcatctttccatttagctattcacatcattgcacacctgtttaactttgactgctatagcagaagccgacaggccacagatggctcccttgcctccattctctccagcctatctcatgatgagaaaaaggggggttcttggctaaatcccatccagtcccgaaacacggtgagttgactttctagcaaagcatctgagatctggtcatgagcaggaagtgcacaggtggacattgtgtcaggstgacatttctcctttcacagacagtggagtatgtgacattcaccagcattgctggtctcactggagtgatcatgacaatagccttgattctcatggtaacttcagctactgagttcatccggaggagttattttgaagtcttctggtatactcaccacctttttatcttctatatccttggcttagggattcacggcattgggtaagatcctcgaaccctcattctcatgccccagcccctgaccttgcataattctttgtcccaaaccatccttctttgtctatttcagtggaattgtccggggtcaaacagaggagagcatgaatgagagtcatcctcrcaagtgtgcagagtcttttgagatgtgggatgatcgtgactcycactgtaggcgccctaagtttgaagggcatccccctgaggtaagagccctacgggcaaggacagactcttgttaggagctgttactgttattattcttattattactcttattgttattatcatcattattattagttcagtcctgtgctgggtcttatgaaggatrtctatggggttcctacctttaagaaacttccagtatcactggcaacaggcaattacaaggggatcttgaagagaaaaaactaatagttcttgcatgttgtgagaccctctgcaaaggtaataatgatagcccacattattaattgtgtttatcatctgccagccttgctgcataatatggattatttcatttatatatagcaatagcctatgagatattacttcttttttgtctaaattttgaaacaaaaggacaggattccaagagattaagtaaactgacaagctcttacagtaagtagtggagcttgaatacaaacccaggccttttggattccaaaggtttgaactcttgaccactatactgtcccaaagctcagccgtgatattccagtcaaattctggggggaaataaagcattcttgaagtgggctttctttggtgttctaagaatatgcttggaaatttttgttagatactgggtgattatgaaactgtgttctagggaactcaaggtgtgccccagggtaattcttgcggatattattatttacctttgcttgctcacaaaataggttatattgaggagtaaatggaaggggaaggttgatttgtggtgcctcagagtattctgagaatgattaaggtctttaaatcagattcaggattaagagcaatagcttagttctcatctggaacaggaaaaatatataaaacaaaaagtcttctaaagttggcattttaattcagcaggaaaaggataaatgaataatttttagcacaataagatcatcatctgggaaaaaagctatatcttcatttcacgccttgcactaaaatatgaatcgaggatacatgaagcaaaaaaaccataaaagcaccttaagaccacgtgggaagtttttttctaatactgaagtggaggaacatgtttctaaataagataaaccaccctgaagccataaaagaagagataattttgcatggcaaaagaaatccccatcgggccgggcacggtggctcacacctgtaatcccagcaatttgggaggctgaggtgggtggattgcttgagcccaggagtttgagaccagcctgggcaacayggcaaaaccckatctctacaaaaaatacaaaaattagttgggcatggtggtgtggagggtgaggtgaaaggattacttgagcctgggaggctgaggctgcagtgagctgtaatcatgccactgcactccagcctgggtgacagtgagatcctgtgtcaaaataaacaaacaaataaacaaaaattcccattgtaaataaagatagacaaaaaattaccaagtaggaaaagtatttacaactcacagggcatggactaattttctaatatataaataactcctagaaatcaataagaaaaagcctaataacatgataaaaagagaaacagaagatgtgaacagaataatctcagaaatggagatatatccttatcttaaatatatgaaatgatgcttaatgttattcataatggaaaaaaatgccaaataaaactacaagaatctgttaacctaacagattagcaaagattaaaaaacctgctaatgtatggtgctggcaagtgtggaaaaatgctcttatgcattgctggtgagagtgtaaacctatacaactgcttgtagagagtgatttggcagtagcaattaaggtttaaaactcgacttccaatttattccacaaatatacttaaatatgtgttaaattacatgcattaagttattcattacagcattgttgaatagaaaaaaagactggaaacaagtgtccatcagtggggaactagttacattttgggactttcatgcagtggaatagtctgcaaccagtaaaacgaaagagacagtaccatagacactaatagggaccagtctctaagatgttaaatgcaaaaggcagggcagtgtgtagagtctcctatcatttgcattgaaaagatcatttaaatgcatgttctccagaagaattcacaaaataataacattacctctggggatctggaggggyaggaggatttgctttttactattgtactgttgtactttcagattttgtaccatatacatatattacctatttagaaagtaattttctaataagatagatagaatgctagctacacaaataaagaatagaccactagctacactaataaagaaaaaagagagacaatccaaaaaacacaatcagaaatggcaaagaggacattaygactgaccgcacagaaattaaaaaaaaaaaaaccctcagagactactatgaacatctctatgcacacaaactaaaaaaaaaaacaacctagaagaaatggataaattcctggacacatacaacctcgcaagaccagaccacgaagaaatttaatccctgagcagaccaatattgagttccaaaactgaatcagtaataaaaaagcctacaactaaaaaatgcccaggaccagatagattcacagccaaattcttccagatgtacaaagaagatctggtaccattcctactgaaactattgcaaaaaaattgaggaggagggtctccttcctaactcactctatgaggccagcatcatcctgataccaaaacgtggcagagatacaacgaaaaaagaaaacttcaggccaatatccctgatgatcattcattgatgaaaaaatcctcgacaaaatactggcaaactgaatccagcagcacatcaaaaagctaatccaccacgatcaagtaggctttatccctgggatgcaagtttggttcaacatatgcaaatcaataaatgtgattcatcacrtaaagagaactaaagacaaaaatcatatgatcatctcagtagatacacaaaaggctttcaataaaattcaacattccttcatatgaaaaactctcagcaaactaggcattgctggaacatatttcaaaataacaagagccatctatgacaaacccacagccaacatcatactgaatgggcaaaagctggaggcattccccttgaaaactggaaaaagacaaggatgcattctcttaccactcctatttaacatcgtgctggaagtcctgtccagagcaatcaggcaggagaaagaaataaaaggcatccaaataggaagacaaaaagtcaaactatccctgtttgcagacaatatgattctatacctagaaaaccccatagtctatgtccaaaagctcctagatctgataaacagcttcagcaaagtttcaggatacaaaatcaatatacaaaaatcagtagcattgctataccccaacaacacccaagctgagagccaaatcaagaatgcaatcccattcacaatagccacaaaaaaaataaaatacctaggaatacagccaactagggaggtgaaagatctctacaatgagagttacaaaacactgctcaaagaaattagagatgacacaaacaaatggaaaaacattccatactaatggataggaagaatcaatatcattaaaatggccctactgcccaaatcaatttacagattcaacactattcctaccaaactaccaatgacattcttcacagaataagaaaaaaaaactatttcaaaattcatatgaaaccaaaaaagagcccaaatagccaaggcaatcctaagcaaaaagaacaaagctggaggcatcatgttacccaacttcaaactatacaaggctacagcaaccaaaacagcatagtactggtataaaaacagacacacagactgatggaacagaatagagagcccagaaataatgttgcatatccatgaccatgtgatctttaacaaagtcaacaaaaataagcaatggggaaaggactctgttcaataggtggtgctgggataaccggctagccatatgaagaagattgaaactggactctttccttacaccatatacaaaaaccaactcaaaatggattaaagacttaaatgtaaaaccccaaactataaacaccgtagaagacaaccaccctggaagacaacctaggcaataccattcaggacataggccctggcaaagatttcatgatgaagataccaaaagcaaatgcaacaaaaatgaaaattgatgaatgggatctaattaaactaaagagcttctgcacagcaaaagcaactaccaagagagtaaacaaacaacctacagaatgggagaaaatatttgcaaactacacatccgacaaaggtctaatatctagcatctataaggaacctaaacaaattaacaacaacaacaaaaaaacacaaattatcccataacaaagtgtgcaaagtctcaaaaaaaaaaaaaagtgggcaaaggacataaagaaacacttttcaaaagaagacacacacrcagccaacaagcatatgaaaaaatgctcaacatcgccgatcattagagaaatgcaaatccaaaccacaatgacacaccatctcacgccagtcagaatggctattattaaaaagtcaaaaaataacagatgttggtgaggttgcaaggaaaagggagcacttatacagtgctggtggaaatgtaaattagttcagccattgtggaaagcagtgtggtaattcctcaaagaattgaaaacagattaccgtttgacctagcaatcccattactgagtatatacccaaaggaatataaatcattctatgacaaagacacatgcacttgtgtgttcattgcagcactattcaaaactgcagacatggaatccacctaaatgcccatcaatggtagactggataaagaaaatgtggtacatatataccatggaatactacgcagccataaaaaataacaagatcatgtcctttgcagcaagatggatggagctggaggccattatcctaagcaaactaatgtagaaacagaaaaccaaatatcacatgttctcatttataagtgatagctaaacattgagtacatatgcacacaaagaagggaataacacactggggcctacttgagaatggagaaagggtggagagagaggatcaaaaaactatctaatgggtagtaggcttattacctaggtgatgaaataatctgtacaccaaacccctgtgacatgtagtttacctgcaaactgcacatgtacctctgaacctaaaatagaagttaaaaaaaaaagtaattttgggtggggcacagtggctcatgcctgtaatcccagcactttgggaggctgaggcaggaggattgcttgagctcaagagttcgagaccaatctgagcaacataggaagaccttgtctctacagaatattaaaaaattagccgggcatggtggtgcacgactctggttccagctacatgggaggctgagatgggaggatcacttgagcccaggagattgaggctgcagtgagctgtgatggcaccaccgcactccagcctggttgacagagaaagaccccatctcaaaaaaaaaaagtaattttggaaggacatacctgggatatgttaatagcacatttcatttctaaagtcagaggaaattataagatcataaccagggatctgtattagcggactagtagacaagaggaccttaaagatagggagctattgcctttccgcccgtgtacgccactgaagaagcatcgttaaagtctctcttctcccttccatcttgtctaagtcagagtctcctaaagagctcaaacagctgaggaagctcttcattggagatttgagctttgaaacaactgacgagagcctgaggagccattatgagtgatggggaatgctcacagactgtgtggtaatgagagatccaaacaccaagcgctccaggggctgtgggtttgtcacatacgccactgtggaggaggtggatgcagccacgaacgcaaggccacacaaggtggatggaaaagttgtggaaccaaagagaactgtctcaagagaagattctcaaagaccaggtgcccacttaactgtgaaaaagatatttgttggtggcattaaagaagacacggaagaacatcacctaagagattactttgaacagtttggaaaaatggaagtgattgaaatcatgactgaggcagtggcaagaaaaggggctttgcctttgtaacttttgacgaccatgactccgtggataagattgtcattccgaaataccatactgtgaatggccacaactgtgaagttaggaaagccctgtcaaagcaagagatggctagtgcttcatccagccaaagaggtcgaagtggtcgtggaggtggttttggtgggaatgaaaactttggttgtggaggaaacttcagtggtcatggtggctttggtggcagccatgatggtggtggatatggtggcagtggggatggctataatggatttggtaatgatggtggttatccaggaggcggccctggttactctggaggaagcagaggctatggaagtggtggacagggttgtggaaatcaggacagtggctatggcaggagtggcagctatgacagctgtaacaagggaggcagaggcggctttggcagtggtagtggaagcaattttggaggtggtggaagctacaatgattttggcaattacaacaatcagtattcaaattttggacccatgaagggaggaaactttggggcagacgctctggcccctagggtgatggaggccaatactttgccaaaccaccaaaccacagtggctatggcggttccagtagcagcagtagctatggcagtggcagaagatgttaattgggaatcaaagcttagcaggagaggagagccagagaagtgacagagaagctacaggttacaacagattcatgaactcagccaaacacagtggtgrcagggcctagctgccacaaagaagacatgttttatacaaatactcatgtttatgggcaaaaaagtcaaggactgtatttgtgactaattgtataacaggttattttagtttctgttctatggaaagtgtaaagcattccaacaaagggttttaatgtagattttttttgcacccatgcaaaaaattgctatatgtgatagtctgatcatgacrctgaataaatgtctttttttttttaatgtgctgtgtaaagttagtctacwctgaagccatcttggtaaatttccccaacagtgtgaagttagcattccttcagggtgatgccaggttctatttggaatttatatacaacctgcttggrtggagaagccattgtcttcagaaaccttggtgtaattgaattgatagttactgttgtgacctgaagttcaccattaaaagggactacccaagcaaaatcatggaattattggttataaaaataattgttggcacatcctatgcaatatatctacgttgaataatggtaccagataaaattatagatgggaatgaagcttgtgtatcatccattatcatgtgtaatcaataaacaatttaattctcttgaaaaaaaagatagggagctatttaaagattattaggaaagcttactagctaagatggttaataccttgtcttatcttgcacatcagcttctgtctttttctcatctattacctgagttaagttatagttggtctatttggtatccttaaaacttaggggttgctttggttggtcgtgtaatactctaagagagagaayaccagttttgccacctgaatgtattgctttgtttcttccataaacatttaaaaaatactctctccatattcaccccatttaaaaattagaaaaataatatacatttattgtagaaagtttggaaaatacaaaaaatactagaagtaaataaaaaatttcatagagttctaccacctagaggaaataatgtttttccttgattgatataatggatgctttcctttgaaacatttttttttgttttgagacagtctccctctgttactcaggctagagtgcagtggtgtgatcttgtctcactgcaacctctgcctcctgggttcaagtgattctcctgcctcagcytcccaagtagctgggactacaggcgcgcaccaccacgccctgctaatttttgtatatttagtagagacggggttttgccacgttgaccagactggtctcgaactcctgacctcaggtgatccacctgccttggcttcccaaagtgttgggattacaggcgtgagccaccgcacccggccttgaaacatttgttttaaaatagttggccaggagtggtggctcatgcctrtaatcccagcactttgggaggctgaggcaggtggatcattcgaggccagcagttccagaccagcctggccagcatggtgaatctccatctctactgaaaatgcaaaaattcgccaggtgtggtggtgcatgcctgtagttttagctaattgggaggctgaggcaggtggatcattcgaggccagcagttccagaccagcctggccagcatggtgaatccccatctctactgaaaatgcaaaaattcgccaggtgtggtggtgcatgcctgtagttttagctacttgggaggctgaagcaggagagttgcttgaacccgggaggcgggggttgcagtgagccgagactgtgtgactgcacggagtgagactctgtcaaaaaaaaaaaagaaagaaagaaaggaaggacgcaaggaagaaagcaaggaaggaaggaaggaagaaaagaaagaaagaaagaaagaaagaaagaaagaaagagaaagagagagaaagaaagaaagaaagaaagaaagaaagaaagaaagaaagaaagaragaaagaaagraaggaargaaggaaggaaggaaagaaagaaaaagaaagaaagagaaagagaaggaaaatatgtgtatggtatatataccattttaatcatttcttaaagtaaacattgtggccattactttactcgtgcataatactttttcacaccttaattatttatcttcatttcccagaagtgaagttccagggtaaaagagaaggaatgcttttgaggctattgagacatactgctcaactgctctctgggaagatgttgccaatttgcattttcacccctgtgaaatgcatgttcaatttgcatgcccacgtgaacactcccatttccctgaatcccagttaatgctgggcattattaattaaaattgtttttcaatttgagagactaaaatggtatcttgttttaatatttattactctgactatttctgaggccaatatttttttcacattgttattatccatttcttaaatatgtttttcctcaaattgagctggggaattttcttcaaataagaaatagcactgaattgcataatgttcactctgtttgatttgtcccatctctgcctcttccttccctagagatactcaaggaagttatttgcttgcaccagcttaagaaacctcacttcacacagtcccaatgtatcacacttgagcaactgtgcaagaaaggacataatttagtattgctaggaagtatatttttagtagttcctgtgcaggtagaagcaaactgctgctttgcaaagatctcagggatagaaaagctgctttatttatttatttattttatttattttgagacggagtctcrctctgtcacccaggctggaatgcagtggcgcgacctgggctcactgcgacctcctgggttcgagtgattctccttcctcagtctcccgagtgtctgggattacaggcrcccaccaccacactyggctaatttttgtatttttagcagagatggggtttcrccrtgttggccaggctggtctygaactcctgatctcaagtgatccacccgccttggcttcccaaggtgctgggattacaggcgtgagccactgcgcctggccaaaaagctgcctttaaaaaaaatgtagacaaggtaaaaaagatattactatgttaaatgtttaagcacttgagaaaggaggtgatggataagtactgagttttatgtaccagtagcatcagtcacatactttcccttttttgtgtttgttttgtttttaatcatctgcctctatttcacatctactttctctgttggttttttagattggacaagctgtcctcgaagacagtcttagattcttaaaattaaatcttatttwatttttttggagacagtgtcttgctctgttgcccaggctggagtgcagtggtgygatctcagctcactgcaacctctgctgcctcctgggttcaagcgattcttatgcctcagcatcccatgtggctggaattacaagcatgcaccaccacgcgcagctaattttttgtatttttagtagagacagggtttcgctatgttgcccaggctaggtctccaactcctgagatcaggcagtctgcccgcctcggcctcctaaagtgctaggatgagccactgtgccaggccttaaaattaaattttatatgtaatttaagaataagaatatttaccatgtgttccatttctgtgcttttctcctgcttcttggtcagacttgtaaattttcaggaaatggtctgttttatgaataacagattagcaaacgaaaccattgtcctttattttttctatttccatcttccagatttggtgaaattagtagcttaaaaatgatacacattggagaactcagtaaagaatgaaggatgaactgctacacaaataagtcctaaacaagaaattagtgtgtaatctcattcttaaccctgtctctgtgcagtcttggaagtggatccttgcaccggtcattctttatatctgtgaaaggatcctccggttttaccgctcccagcagaaggttgtgattaccaaggtaaagaatatgcactttcctcttgctgtgataagagttatcttctaccggactacagaactaaatttttatgttgtcaccctgaaagaggaacttggaaactgggcacagtgggtggtagtcccagcactttgggaggccaaggagggcagatctgttgaggtcaggagttcgagaccagcccggccaacatggcgaaaccccatctctaataaaaaaaaaaaaattagctgagcgtggtggtgcccacctgtaattccagctacttgggaggctgaggcgggaraatcgcttgaacccgggaggcagaggttgcagtgagttgaaatagcgccactacactccagcctgggtgacagagagaggctctgtctcaaaaaaaaaagaagaagaacttgggtttggcatacctcagttcctccagcactggacagaactgggaaagaggggcttggccgaaatcatcaggatgagtctatatcagaggttgcaaacaggcagcctgggccagagctagttcacagctatattttgtttggtgcacacaatgtttgtttataaagttgaattggttgccaacatttaaaaatctggatggaagctttcgtttgattttttaaaagctatttcttgcttctcttgaagaatcaggaaacctgataacactgtcatggttccatatcgcaaccactgtctggagctaagtagctgctgccctctttagagaggacttgtgtttgtagttcaccactgtcaccagccctccagcttcactcatttgctttatctgcctgtccctgtcgycattagagtttgctttctttggtctatgtgcttcattcacaggttgttatgcacccatccaaagttttggaattgcagatgaacaagcrtggcttcagcatggaagtggggcagtatatctttgttaattgcccctcaatctctctcctggaatggcatccttttactttgacctctgctccagaggaagatttcttctccattcatatccgagcagcagggractggacagaaaatctcataagggctttcgaacaacaatattcaccaattcccaggtaggtccttgagaccaggagagtcccagaccaggatgcagactggcagaaaagagaaagcaattcttcgttgaatcttaagtttggtacaatagaataggattataataaatatgcagaagtcagccatgrgaacaactatatttctgggaggatgtttgaggttggaggtggaggggagtcttcagttgcccgttatcttctgtcttctgccaggattgaagtggatggtccctttggcacagccagtgaggatgttttccagtatgaagtggctgtgctggttggagcaggaattggggtcaccccctttgcttctatcttgaaatccatctggtacaaattccagtgtgcagaccacaacctcaaaacaaaaaaggtataatcccgtatatcacttttcttctggcctgagtctgacaagtctattgccttcttgggctaagctctttacaattgataagggagcaacctatccctggagttatgagaataagtgatcacttctcttggccaggacatycacttctacagatttatcataagaacagggtcttcttttcaatttggagtttaagatcaccctgaccaaagatgttggaaggctcgttcctaaggaaaattgtcagaactctgaacattcctgctgcctaaagtttgcggctctataaatgtgacttttaaggtcacctaataaggctatgttctctcttgctgatttcagatctatttctactggatctgcagggagacaggtgccttttcctggttcaacaacctgttgacttccctggaacaggagatggaggaattaggcaaagtgggttttctaaactaccgtctcttcctcaccggatgggacagcaatattgtgagtccaaataacacactaattcccctactaaacataagacgaatgtcagacaaaggatagtgcatatggattagaagttatttcttatgatttcctacctgccctcacactcacacacaagtttaaaagtggtggaaagaagaggcagctatcaggacttggtttttcttttctttctttcttcttcttttttttctttttgagacagagtttcactcttgttgcacaggctggagtgcaatggtgcgatcttggctcaccacaacctctgcctcctgggtttaagcaattctcctgccttagcctcccgagtaactgggattacaggcatgcgccaccatgcccagctaattttgaatttttagtagagatgggggtctcaccaygttggtcaggctagtctcgaactcctgacctcaggtgatccacccmcctcggcctcccaaagtattgggattacaggcgtgagccaygcacccagcctaggacttggtttttctaacttttattcctctgaatccaggttggtcatgcagcattaaactttgacaaggccactgacatcgtgacaggtctgaaacagaaaacctcctttgggagaccaatgtgggacaatgagttttctacaatagctacctcccaccccaagtaagtatattttcctctagtaagatgagtttacaggggccgtgcgtggtggcttactgcctgtaatctcagcactttgggaggccgaagtgggtggatcacctgaggtcaggagttcgagaccagtctggccaacttggcaaaaccccgtcactactaaaaatacaaaaattagctaggcgtggtggcrcatgcctgtaatcccagctacttgggaggctgaggcaaggagaatygcttgaacctgggaggcagaggttgcaatgagctgagatagcgccattgcactccagcctgggcaacaagagagaaactctgtctcaaaagaaaaaaaaaaagatgagtgcggagttaggatttaggaaaggtattacaacatgttgaacactcttaagaaaagatctctggggcagaaatcttttgtgccattcttagattcttggtgaagaccgaggaaatttcatctggggttttagaaaaatagggtcatgatcttgaaaatgatgaaaagaggtttttttgccccagcaaactccattcaaacagtgaggcaagtggacccacttctgatctatactaccaaacaaactagagaactggagcaattcaaatgcatttttgcggggaggggactcaataatctctacttaaagtaacaaaggtattatctagtttactggccacctgagctcaatctttctggagggttttgagacatgttacagcacaaaaaatcctggtgctatgaaatcagccattccaatgggaaggagatgaagctgagattccctgaacaagtagggaggtgatgatcaattcaatgctacaaatattcttgattacctttttttttttttttttttgagatggagtttcgctcttgtcgcccaggctggagtgcagtggtgcgatctctgcttgctgcaatctccgaatcccgggttcaagcgattctcctgcctcagcctcccatgtagctgggattacaggtgcccaccaccatgcccagctaatttgttgtatttttagtagagatggtgtttcaccacgttggtcaggctaatctcgaactcctgacctcaggtgatccacctgcctcagcccccaaaagtgctgagattacaggcatgatccaccaagccccgccttggttaccttttataagctcagctctcaccattctagaagctttggaggttgaaagagaaataggatatggttcttgcccacaaggaacatacatttgaataagagatgcacacaatcacctcaaagcagaataatgcactccgtgaaagaggttcacggatgctggagggaagaaaagtctacggccacatggggtgattaggaaaggcttcaggaaggcagtggctagagcacttagtgacttggattcagatgatcctgggtcctcatgctggttctctctttttttcttgagacacagtcttgctttgtcacccaggctggagtgcaatggtgccatctcggctcactgcaacctccacctcctgggttcaagcagttctcctgcctcagcctcccgagtagctgggattacaggcatccaccaccacatccagctaattttttgtatttttagtagagatggggtttcgccatattggccaggctggtctcgaactcctgacctcaggtgattcactcacctcagcctcccaaagtgctgggattacagcatgagccaccatgcccggcccttattctggttctgacactttctagttatgagaccttgaacttctgaactctctgatcttgattcctcatctgtaagacaagggtcatattagtgaatgcctgctctactcacttgcagggttgttatgacaattaagtgagacaatatatgaaaaaatgctttgtaaattttaaagcagcatataagcataaaagatgctaattatcatgttgaatgtaactgaagttttgagagagtatgaggttgtcaggagagagagagagagggagggagagagagagactagcgagggacagagtaccaaggaatgctgcctaggttatatgggaagggaaaaagacaaaccagggaagaaataggagtacacagagaagtggtgtcacagaacccaagggagcaaatattagagaagcgtggtcaatagtgttggaagagtagcagggtcaggaaatgttcatttagcttaagcatatttatagacagaacaaggaccagtacataaaataaaataaatacatgaaagaggggagaggactaagatggccataataaaagatggacaatagtattggcaaggaagtggagaagttgcaatcctagtacattgcttgtggaaatgtgaaatgataccacactcggggaaaactctttggcagttcctcaaagtgttaaacacagtttccagctgggcatggtggctcgcgcctgtaatcccagcactttgggaggccaaggcagrtggatcacraggtcaggagttcragaccagcctggccaacatagtgaamcctygtctctactaaaaatacaaaaaattaggccgggcgtggtggctcatgcctgtaatcccagcactttgggaggccgaggtgggtggatcacgaggtcaggagatcgagaccatcctggctaacacggtgaaaccctgtctytactaaacatacaaaaaaaaattagccgggtgcggtggcgggcgcctgtagtcccagctacttgggaagctgaggcaggagagtggcgtgaacccaggaggcagagcttgcagtgagccaagatcgtgccactgcgctccagcctgggcgacagcgagattccattaaaaaaaaaaaaggtgaaaagaattagctgggcatggtggcgggcacctgtaatcccagctactagggaggctgaggcaggagaatcgcttgaacccrggaggtggaggttgcagtgaccccagatcataccattgtactccagcccgggtgacagtgcaagactctgtctcaaaaaaaaaaaaaaaaaaaaaacacatagtttccatatgacccagcaatcccactccttgttatacacccaagagaaatgaaaatatatgtctacacaaaaacttgtacatgatgtacatagcagcattactcataatagccccgaagtgaaaacaagccaagcatccatcaatagatgaatggatgaagcaaatgtagtatattcacatactggaatattatttagctattaaaaaaaaaacaaagtactgaatcatgctacaacatggacaaatcttgaaaacatcatgctgaaaaacaccagacaccaaaggccatgtattgtatgattccacttatgtgaaacattcaggataggcatacccacagagacagaaagtaaagtgattgtcttgggtaggacagggtagttgggaggaaatgaggactgctaatgtggatggggtttctttgcggatgatgaaaatgttctggaattagatagtggtgatggttgcataactttgtggctgtgctaaaaagcacaaattgcacacttcaaaggggcgaattttatggtatagaaactataccataattatatttttaaaaaagagggggagagaaaggtatgagagaaggaagaagacggtgagacccagagcatagttggaaagattagctttggcaagaaagaacactacctctccactaggagaaattttgaggtagggataagctcacagtggatgggtttaatgggagctaatacatatgtacttgctatgtgccaggcatttttctaatttatttacatgttcttatttaatccttaaaacaaccctatgtggtragtactatttttatccccattttacaggtgggaaagctgaaacagagagaggttaagaaattttcccttgtcggacattgtggctcacgcctgtaatcccagcacttagggaggctgaggcaggcggatcacttgagrtcaggagttykagaccagcctggccaacatggtgaaaccccatctctaataaaaatacaaaatttagctgggcatgctggtgcgtgcctgtagtcccagctactcaggaggctgaggcaggaraawtgcttgaacctgggaggtggaggttgcagtgaaccgagattgtgccactgcactccagctgggggacagagcaagactccatctcaaaaaaagaaaagaaaaaagaaaaaaagaaatgtgcccaaagtcccacaggtgggataaatgtcagagctgagatttgagcccagacaacccagacagactggctgcacagtctggcacttagccactgcactgtcttatgtctgtcatctgtgttctcaaaacagggaaggctgagtgctgagagtgttaagggctgagagcatatttggggtttgtgcgcagaaaaggttaaaaaactaccatgaagaacgtgggagtaaacaaccgaatttttattcaaggttcttggaagtagtagaggcctaacagaggcagtttctccattctgtcattgctgcattctagcccttactattgttctgttcctacaggtctgtagtgggagttttcttatgtggccctcggactttggcaaagagcctgcgcaaatgctgtcaccgatattccagtctggatcctagaaaggttcaattctacttcaacaaagaaaatttttgagttataggaataaggacggtaatctgcattttgtctctttgtatcttcagtaatttacttggtctcgtcaggtttgagcagtcactttaggataagaatgtgcctctcaagccttgactccctggtattctttttttgattgcattcaacttcgttacttgagcttcagcaacttaagaacttctgaagttcttaaagttctgaagttcttaaagcccatggatcctttctcagaaaaataactgtaaatctttctggacagccatgactgtagcaaggcttgatagcagaggtttggtggttcagagttatacaactaatcccaggtgattttatcaattccagtgttaccatctcctgagttttggtttgtaatcttttgtccctcccacccccacagaagatttctaagtagggtgactttttaaataaaaatttattgaataattartgataaaacataataataaacataaataataaacaaaattaccgagaaccccatccccatataacaccaacagtgtacatgtttactgtcacttttgatatggtcttatccagtgtgaacagcaatttattatttttgctcatcaaaaaataaaggattttcttcttcacttgatgaatgagtcttttgttacttctttttgggctctccatttgggaaagaaaatctagaaagtatgctcattgtaattgaaattgtattataattgcaagtcagctatactgtcatcttgtattattctgttaaaagcgattgtgaaaacttgaactccatgttaggatgacttatttagtcaagaggagctctttatcactattaagggagtttattaatgtctagtttaaaaaataacaatttataattttcatagatttttgtggactcctacctatatcgctaaggaatcattcagctaataacataagcaaaatgccttcattctctatcagaatgctttttatttctgccatctacccaacctcggcctacaaggaccacactggctctgggatgttagtcgtcacagtgaatccctagaaggagagaagcccagggctcttaagagagaaacctcacacttcattgtgcccagacaattcaactcattatagattagaagaatggttgtactgaattagcattatattatctattttttctaccattaagtgaccacgaatgaacaaatggttgtttctaatagtttaggaacctctacggcttgagggataaaactgtttttggtttttttttgtcactagtctgagcacaataaaggtaggtcatgaactcatggtggctaatcatgtttcatttattacaacagtaaaacaatactgatggttgtttacatagggagggataccactgctgttgccaatttgttcacccggatttcagctaattcaggtttaataaggctttgggaaaatgcacaatgaaaccttgaagacatgattcttattagacaactactgaccaaatgacaacttcatcttcaatgaccttgatttggaatcttgaaacttacaacgagttcctaatgagaaaggcatcactcttggtctccatgtctaaatatattgacacactcacttcaagatatgatggctgccaaaatcaatatcccaaggcttgaatatttatgggagtaggcataaattcgtgattatattcatggtaatgaatataataaatcctatgcatagccaacatccaagttgaactggggatgagcaggatacacagaaagctcctcacctgctttgagcaagtttttcttgcaaagttgtaatatgaaataccttaatcaacaaatttcttataaatgtttatatgagtagaaaatccctcaatttcattgtcactcaaaaagttgattatctttgcattcttttgcttgacatgtaagcaatatgctattacattctctaagcctatgccaggcttttaattcacctgaccataatcctaacccaggggatagaattccaagaatataaattggctcaaaagtagttccagtagaactttactgattattaaggcaactcttaacctcttgaggttggcctgatagagagaaaccatgttcctccttaatgccactacgagagagatggggttggggtggggggagaggaggaggcggcggcgcggcgagagagagaaatactaggcaataagacccatagattagagctaatggcactaattatgttcatacctatccgcaaggaagcaggcaggagcagacctaatgagcaatctgactgtgctctacatttggtccacttaaaatgagaagaatgtacaagttttagggttttctgtgttgtaagttcccagaataaacgtagttacagggtagggctgcaggttagggactgcctggaagataggatgaaatgtattttgttcatttgatttctgtttttatttcatcttgagcatgtgaaaaatcagtggctttttaaactttcaaagttgactgcctagactgataagtttaagaacacacaagtaaatgtcaacagtctcttgtgttgctgacacactcaaaccagtgctaaaacaatttttgtcttaactctgaattatacatgttcagacctgctattgaaacaaatgcattttgatatttggatttttctaaactaaacacacagctgtgctaggctctttgctctgttagccttctgaccattttatagctctaagcatgtgatattttctcctagaagactccgaagtgctagaatattttcagagggcaaagccttataataattcttactggaagcaaactaaacaaaaaccaagttccagaaaacattgcttctgagaaattctcaaatatcatcaagaagaataagtggttaacttaaaaacaaaactatggcaatatgttaaagtacaatactgcagtaagggtagaaaacacatctaaggtttcacccttagtgttaagctttttaaaagcaaaaaggtcatgtgtatcaatttgcagtgtactaaaattgtgttcaaagtttatttcaagtcacagaaaatatacaaactaagacaataaaatgaagtgattttgttctgagagaaggtgatgggagtcctccacctggcactgatttgagtcattcaagggttaggatgcaggtcatcttttttcaatatttcaacaaaattatagaatttccagatttcttgccaggtatttttgaaaacctgtaagaagaagttaggacaaagccattagaagtgaagacaaagctctcttccggaaaaacttcaggaaaaaaaataaaaaggctaggggagggaggacaggcatataatcaaatcaccaggacagatttgcaaagtatctgtctcctgcctcctgactcctcaaagcaatcagcccttgcagcagggtttctcaacctcagcactactgacattttgggctggagtactagttgctattgggaagtgggtgagggggaccatcctgtgcattatgggatgtttagcagtatctctggcctctacccactgaatgccagtagcatgccatactccctaaagttgtgatgaccaaaaacgtctcaagacaatgtcacctagggggcaaaactgcccttgtttgagaaccattcatctctaatgacaacagtatagaagcctgtccatgatggcagagatggatcacaactagctaggtataggatggaggaaaacccaacactttagccatggtatgcacaaacaccagtagacacacaataaaatcttgcccacataaaattgcatagaaccacacatacatatacacaaatcatgatagtttttttaaaatggtgaaaactgagtttgcagtcaagttaacagtaatgtgccaatgtcaatttcttggttttgcactacactgggtgaagggtacatgagactccttgtactatttttccaactttccttgagtctatgattatttaaaaataaaaggtaaaaaaatagacaaaaactttgccttgtggttaatatgcaaggccttaaattaaacatcctataagcaaaactataatgaaagaaatttcagaaacatttctacctctactatccagaaacagtaaggagtaattttctcacattgtagggaatgccttctctggcttaagtaaattagtaaaagaaataatttttatttattcctctgaatgtaataggtagtctatacttttactaaaaaaaaagaatatgtggggtttgtggaataaaacgttaaggtaccaaaagtctactgagccttctatctatgatagcttctcattaattcatttaaggtctaaatacatatatgatgcatagtcgcagtttaaatgtttaaagacatcacaagtatggattaaaatgatatattttgtaagagtggtaattattaatagttaaatgagttcactattatataacataagaataggaattataatatggatggggtaaaaagtagaaatttaaattgtgctgtcctacctgatagtggggcaacatgaattttaaactgtttttagaaaaaagaactgtttataaaatacaaaatgctggggaaattttttttaaaaaagaaacactgatacatgtatgtgtaatcaagttgtcacatgattatttatgaagcaggttacctggatccttttttttttttttttttgacacagagtctcactctgtgacccaggctagagtgcagtggcataatcatggcttactgcagccctgacctcctggactcaaccagtcctcccacctcggcctcacaagtagctggaactataggcgcatctcaccatgcctggctaattttttaaaaaatttttgtaaagatggggtctcactatgttgcttaggctggtcttgaactcctggtctcaagtaatccttccacctcagcctgccaaagctgagattacagggctcagccactgtgcttggcccctggattctttctgcctaaatgatgagcaagaaaaataagggtagcggggtacagcgatctccaaaatatatagaaactgatggtgatgacggacatttactaccttaaattatgtgctactatagttcaacatcaaaatattccctataaaataaatacaagaaacaaaatatttacacattttattgaaatgctttgtatttttccattttgacaggacagtttggaataaaataatacaattgattgtagaaggatacacaccaaactatatttagaggttttgtctggggaatgagattgaggaaacagggctttttacctttcaccttctacatttctgtatatgattacttttgttaaactgatcatacattacctttgtcattaggaaagattataagcaattcaacaactgaacaaacattgtatagccttactctatccctacaggagctgacctactgaagggtaaagaagagtctagctgagtggattgagggccgctgagagaacaatcttgttggttaaggttaaaagtatatacccagaatagacaaggagctagtcctactcagatggggattaagtttgctcacctatcaaggtgctccagtggatttctgtatttgttcctttaaaatcaggatactctgcctttgctcaggaggcaacatggcaatctggtctgcagtcagttgtagaacctgcataatcaaagcagcctgtgcagaggaaaaaaaaaaggtagtgagttttaatgatggcagctaaaaaatacaaaacaaaacaaaaaacccaccaccagcttctgtccaaaaagctactgtagtgggatatgaagcaaaatggaaaaaggaagaacatttcacacagaaaaaaaccaacagcccccctccaaaaaaaataaaaaataaaaaaaaactggtgagaaaaggtacaatgaaaagaacaagtataaattaaaatacctaagattagacgattcaaaacagacaacttcatgaactcaaagttcctggagactaagatggtatctgtgagccctggaaatccttcaagttttaatcctgttttgaaagtctctctttttcacaaattttagcctttccatcagacataagctccccacaatggtcaaatataaaaacagaaagatataatcatggggaatctactattgtttttagggataaagtagaaagggaaggaaaaagggtgtggattttcaggtcaatctggcctgaacaagaaaaacctgctattggcagatgagtgtgaaatataaaataagctgccatttacatccacttaagaacttcacatccattaggaacttcaggaccagactcacaaattttcaggtaacaagatcataaaagagttctaagttagaataaacatcacctccaaagggactttgaagacccaggatcgtcacatggtaactgtgaaaagaggaatcaaaaaggctagaattgtgcataaggaggcagtcagacagtgttgcttaccttctcatgatcctgtggagtgacttggttctgcccgggactaaagccgccaggctggcttccaccctgtatacttgctccttgcattcctgttccctgcatgactgggacctatgtgtacaaagagaaaagagagatttttggcatttttaatgtataggtaacctgaattcagtaataatgtgacaaattatgatctctatacagatatgagtaaaaaaagcaaatcaatgactctgaagatcattttctactgttagcaatagcagaaggcagggtttagccagagatcaactagcaagttcgacatacttgcttacaacacctccagcatcatcaacaaatattacacagcacaactggataccactgaattaatcaaaattcagccaaataagcacagtgaaaactgagaacaccctggaaactagtgctcactggaaatacaaatgaaagccaacagagtctagagaaaatgtatgctggtccactggggaagttacattcacagggccaccccctaccctagttcaatcagatacaggtagtttgtcccaaagggccctatcccacaagtgaggcagagatgttca

SEQ ID NO: 93759 - DNA, 17611 bp, Homo sapiens
atcagacactggggcctgtcagcatgtggaaggaaaggggagggagagcattaggacagatgcctaatgcatgtggggcttgaaacctagatgatgcgttaataggtgtagcaaagcaccatggcattagaaaacaaataacaaaatgttgtgaaaaagtcattacttaaaagtaatcttgaatgtaaatagacaaaactttccaatcataagacttagcatggatgaatggataaaaaacaagtccaaattgtctgttttctaccagaaacacactacctataaagacacacatatgctgaaaacaagagatggaaaagtgtatgccatgcaaatggaaataaaaaaacagcaggtgtagctatgcttatatcagacaaaatagacttcagactaaatctctaaaaagagacaaagaaagtcattttgtaatgataaatgggtcaattcagcaagaggatgtaacaattgtaaatatatatgcacccaacactggaacatccagacatataaagcaagtgttattagagctaaagaaagggatagactgcaatacaataataactggagacatcaacactgacattaagcactggacagattacccaggaagaaaatcaacaaagaaatattggagctaatcagcactacacaccaactgggcctaatagacgtttacagaacatttcatgtaatggcaggagaatacacattcttctccctagcacatggatcatcctcaagggtagactatacattaggccacaaaacatttataaaaacattcaaaaaattgaaataatatcaagtatcttctctgaccaaaatagaattaagctagaaatcaataacaagattaattttgaaatctatatgaacatatgaaaattaaacaatatggtcctgaatgaccagtggttcaatgaagagattgagaaggaaattgaaaaatttcttgaaacaaatgataatggaacacagcataccagaacctatgggatacagcaaaagcaatacttagagggaattttatagctataagtgcctacattaaaaaagaataaaaacttcaaataaacaaactaatgatgcatcttaaagaactagaaaagcaagagcaaaccaaacacaaaattagtagaagaaaaagattataaataataaagaaataaataagagcagaaataaaattgaaacagagaaaacaatacaaaaatcaatgaaacaaaaagtttttagaaaagataaaaccgacaatcctttagtatggctaaataaaaaaaaagataatattcaggtaaataatatcagagaagaaaaaggagacatttcaaccaataccacagaaattaataaactcattcgagtctactatgagcaactatatgccattaaattggaaaaccaagaagaatggataaggtaggcatggttaatgggtacatagatacagtttaaaagaatgaataaaatccagtattttatagcacaacagagtgaccgtaatcaataatcatttaattgtgcatttaaaaataactaaaagagtataattggattatttgtgacaaaaagaataaatgcttgaggtgatggatacctcatttaccctaacgtaattgttacacattgtgtgtctgtatcaaaatattccatatacttcataaatatatatatgtgtacctaatatgttcccataaaaattaaaaaatgaaaaataagttgtgctttatttaatgatagcaaggatttgctccaaagggaatcatttttatgtttctagagccaaatattttctatgacatgcatgcacataatgtacaactcagggcagttactcaaagccaagtctctgacattcagcattattcctcatcctatcacactacatctttccttgatcatactatatgtagttgctcatataaataccataattgaaaaacagaagaaagaaatctgacataaaatttttttgccatatgatgaaaattgataccttgtttctctgccaacagagatccattttgacaagctttacaggctatttaaaaatgagtatgtatttctcacacattgtttcatcagctagggctacaaaaggaggtcacattcgtttaatatttgaaataataaaacaccctgagccctcatcatgactatagaaaaatgttttattcccttctatgagagcaatgagatcaccagaaaggcttaattagtaaaagctaaggggttagtcctgattattattgcctcataaagagaaaattagaaagcctgttgtcctgtttgttttcactgttattatgatttttaccacaaggtgtcagtacaggaaccaggcaggtcgattgctccagtactgtcttcatgaattctctgcttcacatcaggacatatgatatcctaagcacactatgtcacaaaaatttaggaagtcggaagttttgtgatgtgaagaaaaacattaaggcctacatcatcatgtcagtcatttgtcagtagcttctctagttgcagagacggaaggggaagattttttccttccttgttacattaaacttggccctcctacatctcattaattctctaacatgtatttgtgaataggactctgatttctttactagaggtataatgggcagacgaatactgaccctccttccctgccccttgcttaagccagataacttgaaattcatttctgagggtagacctgtttaaaaaaaaaaaaaaagaaagaaaaaagaatacatccacagagttgtgtaaccattaccacaatttaatattataactactttatcacctaaaaagaaactttgtacccattagactttagtctctatttcccctcaaactctctacccctaggcaatgaccagtttactttctatatctagatgtagctctttgaaatttcacataagttaaattatacaatatgtagtgttttgtaatttgtttctttcattttgcatgtttctaaggttcatatgtgttgtagcatgtattaatactttactcctttgcattactggataatactgccttatatgtctgcagttcatttgtttatccatttgccaattgatgggcatttgggttatttctattttttggctattatgaatgactctgttataaacatttgtgtacaaggttttatgtggacatatatcttcattccttctagaagtggaataccctggacatatggtagctctaagtttaaccttttgaagaactgccagactgtattccaatgtggatgcatcattatacactctcaatagcagaatatgaaggttctatttttttccacatttttatcaacccattttatcatctttcttttggattataaatatcttagtgggtgtaaagtgctattttattgtggttataatttgtatttacataatgactaatgatattgactaggaactgttgtgaatccacagcacaacacagctgctccatggaaaaagtgaccaggctgttttccagggtccctgatttcacttctctgtactggcatggtttcctgacctgagacttcagcacaactaccctgcccccacatgaacactgcagttggaggcagctctgcatttctctcaggaggaaatctaagagacaactcacaatccctctgccattgcagctgcagtgatactgccctaactgccctcaggcagggaaaggaacaaagggtctggtcactgtgttcgcatgtccagcacactgaagtcatgatatggagaggtatccagtccctttcccttgtgcgcccccaacttcacttttcaccaggcagggccctagctcaggacctcaatttagctgccccacccagagctgagcacacctacaggtagtggcactgagtttccctggggaagatcttccagaggcaaccaacagcccctctgccactgtcacagcagtggttctgtccctgctgtcctcagtgtaaggaaagaaacaaagagcctaaggacttcacacatgctcccagcatgccacaatcacatagagggaggagctcagtctcttctgcctgtgagttattgactctgctcctgaaaaagcagagctccaagctcagcacagcagtgcagtcaccctgtcccctggatgaacatacccagtaacagcatctccacatttctcttaggtgaaactcccagagccatctgaaagctcctctcccactgccattgcaatgatactgcccttgctccccttggattgggaaaggagaaaatactctgagggctttaaccacacctccagaaagctgcagagggagaagaagccaatctgcttcccttgtgatccactcacccccagttgttaccaagcagcaccccctccccctggcttgagcccacagtgcagccactccaatcacattaattgatagcagctctgcatctctgtggggtaaagctccatgagacaagtgaacctctgtaacacccactgctatggtcccttcccttgctgcctccaaggtggggagggaacataaagcctgagctcaccccagagctgcagtgtgcagcctgggagtgccaagccaagatctgcagccagtactcaagtgggaaaggaataaaactttcagagcactaagaaggaccatgattgcaattgtgaaaaaacacagataagccatgtgattgagcaagaggctgcatactggccattttacttcagcacagtctactagattgaagaccaaaacttctacaccaaaatactttgctgatatactcgatgaaacaaaggacaagaattcacctacaaataaccaccctgcacaaagcttcagctctctgaatacatcctaaaaagaagtctactgcctgtactcaaattacaccacagttaaaagaacaacagcccacacagatgagaaagaaccagcacaataactctgacaattaaaaaagtcagagtgacttctttcctccaaatgactgcaccatttcccaagaaagacttcttacctggctgaaatggctaaaatgacagaactagaattcagagtatagatagtaaatgaagatcatcaaaactcaggagtgaacacccaatccaaggaatctaagaattacaataaaataaaaaataagctggtagacaaagagaccattataaaaaagaactaaataaatctgatagaattgaaaaacacactacaagaatttcataatgtaatcacaagtatttacagtaggatagaccaagctaaggaaagaatatcagggctcaaagactagctatctaaaataattcagtaagactaaaaacaaaagaataaaaaatatgaacaaaacctctgagaaatatgagattatgtaaagaaatcaaatctataacccacttgtgtccccggaagagatgcggagaaagtaagcatcttggaaaacatatctcagaatattgtccaagaaaacttttccaacctcactaaagggttaacattcaaattaaggaaaggcagaaaacccttgcaagatactacataagaagaccatctcaaagacacaaaattattagattctcaagggtcaaaatgaaagaaaaaaatgttaaaggcagacagagaaaaggggcaggtcacctacaaagggaaccccatcaggctaacagcagaactttcagcagaaactctataagccagaagaaattgagggccaataatcagcattcttaaggaaaagaatttccaatcaagaatttcatatccggccaaactaaccttcatatgtaaagaacaaataagatctttttcagataaacaagtgctgagggaataagttaacaccagacctgccttacaagaggtcctgaaggcagtgctaaatatggaaagaaaagaatgttaccaggaccacaaaaacacacaagtatacaggccagtgacagtataaagcaaccacacaaacaagtttacataataaccagctaaagatatgatgtcggcaggagtcccgggctgccgctggcaacatcgtgtcacccagctaagaaaatccgcgggccggagccacgcgcctgtgaaccggagaggtcccactgcccgagtggagccgggctgagattcttctcaagttgagcctcagtgatcctgtggccgaagttagcgccttgacgtgggacaaccggacacgtcgccgggagagaactgaggcgccttctagcagttgtgacgccaaaatcacgtctctggagacccgcgccctccgccagccgggcgcaccctcggcgttagccttctttgtgcgccgtccggactcccagctcccggcccggcagccgagccccagcacaaagcagtcggaccgcgccgcccgcctcccggctcgtgcccccgcctcggttttccaactctgcgccgtcgggtcgcggcaggatggttgcctcgcatttgcttgcctacttcttcaaggagctcaaccatgaccaagtgcagaaggttgaccagtatctctaccacatgcacctctctgatgagaccctcttggagatctctaagcggttccgcaaggagatagagaaagggcttggatccaccactcaccccactgcagcagtgaagatgctgcccacctttgtgaggtccacttcagatgggacagaacacggagagttcctggctctggaccttggagggaccaacttccgtatgctttgggtgaaagtaacggacaatgggctccagaaggtggagatggagaaccagatctatgccatccccgaggacatcatgtgaggcagtgacaccgagctgtttgaccacattgtcgaatggctggctaacttcatggataagctacawatcaaagacaagaagctcccattgggttttaccttctcgttcccctgccgccagactaaactagacgagagtttcctggtctcatggaccaagggattcaagtccagtggagtggaaggcagagacgttgtggctctgatccggaaggccatccagaggagaggggactttgatatcgacattgtggctgtggtgaatgacacagttgggaccatgatgacctgtggttatgacgaccacaactgtgagattggtctcattgtgggcactggcagcaacgcctgctacatggaagagatgcgccacatcgagatggtagaaggcgaygaggggcagatgtgtatcaatatggagtggggggccttcggggacgatggctcgctcaatgacattcgcactgagtttgaccaggagattgacatgggctcactgaacctggggaagcaactgtttgagaaggtgatcagtgggatgtacatgggggagctgatgaggtttatcctggtgaagatggccaaggaggagctgctctttagggggaagctcagcccagagcttctcaacaccggtcactttgagaccaaagacatctcagacactgaaggggagaaggatggcatccggaaggccyrtgaggtcctgatgcggttgggcatggacccgactcaggaggactgygtggccactcaccggatctgtcagatcgtgtccacacactccgccagcctgtgckcagccaccctggcccccgtgctgcagcgcatcaaggagaacaaaggygaggagcagcttcgctctactattggggtcgacggttccgtctacaagaaacacccccattttgccaagcgtctacataagaccgtgtggmsgctggtgcccgactgctatgtctgcttcctccgctccgaggatggcagtggcaaaggtgcagccatggtgacagcagtggcttaccggctggccgatcaacaccgtgcccgccagaagacactagagcctctgcagctgagccatgaccagctgttggaggtcaagaggaggatgaaggtagaaatggagcraggtctgagcaaggagactcacgccagtgcccccgtcaagatgcttcccacctacgtgtgtgccacccctgacggcacagagaaaggggacttcttggccttggaccttggaggaacaaatttccgggtcctgctggtctgtattcggaatgggaagtggagtggagtggagatgcacaacaagatctatggcatcccgcaggaggtcatgcatggcaccggggacgagctctttgaccacattgtccagtgcatcgaggacttcctggagtacatgggcatgaagggcgtgtccctgcctctgggttttaccttctccttcccctgccagcagaacagcctggacgagagcatcctcctctagtggacaaaaggcttcaaggaatctggctgcgagggtgaggacgtggtgaccctgctgaaggaagcgatccactggcgagaggagtttgacctggatgtgattgctgtggtgaacgacacagtcagaactatgatgacctgtggctttgaagaccctcactgtgaagttggcctcatcggttggcatgggcagcaatgtctgctacatggaagagatgagcaaygtggaactggtggaaggagaagaggggcggatgtgtgtgaacatggaatggggggcctttggagacaatggatgcctagatgacttccacacagaatttgatgtggctgtggatgagctttcactcaacccsggcaagcagaggttcgagaaaatgatcaatggaatgtacctgggtgagattgtcggtaacattctcatcgatttcaccaagcgtgggctgctcttctgaggccacatctcagagctactcaagacaaggggcatctttgaaaccaagttcttgtctcagattgagagtgactgcctggccctgctgcaacacttagggcttgagagcacctgtgacgacagcatcattgttaaggaggtgtgcaccgtggtggcccggcgggcagcccagctctgtggtgcaggcatggcygctgtggtggacaagatacgagaaaaccgtgggctggacgctctcaaagtgacagtgggtgtggatgggaccctctacaagctacatcctcactttgccaaagtcatgcatgagacagtgaaggacctggctccgaaatgtgatgtgtctttcctgcagtcagaggatggcagcgggaagggggtggcgctcatcactgctgtgttctgccgcatccgtgaggctggacagcgatagaacccctgaaatcggaagggacttcctctttctctccctcctccctgttttaaattacaaggtgtcatccctttgtgtcagagacagaccccttggcttttccttggcagagaggaccccactggacagggttttgtctctgcatctcatcgtagagcttggtggccgagcttggccctattaagataaatacagttccaaataaggatttgttcacatgcgtcacaaccattcccattggttctcttaaaacatgaaaattgtcacccttagtaatccgccttgccaaattccacgtccctgtataattctacaggatggggacactaatgaagatgtggttgcttcaccttggagcctgaacatgacatttccaggtggggtgcatcccccagcactgacgttgttactgattctcctgtcagagatatgcgaggtctccactgaggacgtgagcctgattgtcctacaggcagacgtggggagggtggaggggcgacaatggagggaaatccatggatatccacgcagcagcccctctttaacctcatctacaagcatttgccctgtggattccagcatttgctattcctggaatcaaggaatcccaagtctgggcaatgaaaccaaagccaggagttgatgaattctgcagtcgggccagctgtcgcacctcagcggggtgcacatgttatccaccagcaatggacctttggggaggggggagtttttagtttgttttacaaatttttcctgcaaaagtggaaacactgtattttcattttaayttatatttgaaattttatttagttcttgaagtagatctgcttcttcatcttgacgtgtaatggtcagttgtacgtaatgtatttatatgttaatttgttatgtatacagatatgcaagtcttgtcagaattggcctcagtgtagttaaagggcggaagagaaagatactgactagtcatagaaatacctcattcgcctgtgggaagagaagagaagcctcttcagggtgagtgaatggcaaagtggttgcttctggctcctccttcccctgtggtcttggaagtgtgtggaaggcagggacagagatggaggctgagccaatagactgaagagaccacagcaattggctcctccatctagagattttcttggggcaacattccatgggatgttaagcaaaggaaaccaaaggaatcgtttcaaatggactcatggcttagaaatctttattcttagggcagtcagtagtattttaaagctttctgacaagataaaggaagtcgccaaaatttctttttttaagttgtatctaatcctcaacaacaaaccaaaacagaaaaattaaacaaccaaataaaacctcagggacaacatttttggtgtatttgtgccctcccagcaagtttcaccttgggtttgtattttaaatgttttacaagaattgttgtccatgtgcttccctaggctgagctggcattggtctgctaacctgtttttgtgttttttttttatacacaatatttatttcaaactagtgggaaaaaattaatttatttcaatttattgggagggatgagagtggcttaaaaacttccatccctacttttcaagagtgcagttgattctgaatctgaaagcctgcctctgccctaaaatacgcaaaagcacagacattaaacctggatactatataatagagggatgtaactattgaattggatacaaggatcagaatggaaagaaactcacgatgaaattgcacccagtttttgtgtatctatcaaacttgtgctgggaatagtgtccgattatacaacttttacgcaaagttgggtgtaattaggtgaaaacggcccagctcctcctgggagcacagaggggagaggggctggtctttctcgtttattctagtcttgctttgctgtctggtgtagctcttctgctgctcccatctgcactaattgacccaaaatgtgggtgtctcctgctacacaaaagccaaaagctttcacgtagattttagttcactaaagggtgtccacaaaatagagattaattttaacttaaattttaagcttgaagattaggtgctatctatgaagttacacttttttttttaaaggtagagatgtgtgtgtgtgtttgtgtaggtattaaagatgtgttgttggtttccaaaaaggaacactggaaataaattttgaatgtttgcgttctcagaatcaggttgacagtcccttgctgacatggctttgcttgtgtaaatacagtggatctcaatcttcggggtgtgatgaatagcaaatcatctcaaatccttgagcactcagtctagtgaagatgttgtcattatgtacaatacataactagtttaattaactatgtgatgttaactattattaataaattttaacattttccaaaataaataaaaaaacatgatgtcatgataaaatccacacatgtcaatactaaccttgaatgtaaacagattaagtaccccagttaaaaggcacataacgtcaagctaaagaagttagacccaaatgtattctgtcttaaagagaaccatctcacatgcaatgacacacataggctcaaatttaaaaatggagaataatctaccatgcaaatggaaaacagaaggaagcagacgttgctttcttaatttcaggcaaaacagactttaaaccaacaaagacaaaacaagacaaagaagagcattacataatggtaaaaggttcaattcaccaagaagacctaactgttctaaatatgtaagcacccaacacaggagcaacgagcttcataaggcaagttcttggagacctgtaaagagacttagattcccacacaataatagtgagagacctcaacacccccactgacagtatgagaaagatcatggaggcaaaaaattaacaaaaatattcagggcctatactcaacacttgacaaaatgaaattaatagacatttacagaacactccacccccaaacaacagaaaatacattttttgtcatcaccacatggtacatactctaaaatcaaccactcaatgtgatctcaaacaacactcagaaaattaagaaaaaaaagcttacatcataataaccacactctcagaccatagtgcaacaaaaatagaaatcaacagtaagaaaattgctgaaaaccatgtatttacatggaaattaaacaacctgctcctgaaggacttttgggtaagtaatgaaattaaggcagaaatcaagaagttatttgaaactagtgagatcaaatatacaacatatcagaatctctgggacatagcaaaggccacataaagagggaagtttatagcaccaaattcccacaccagaaagttagaaacatttcaaattatcagcataacatcacaactacaggaactagagaagcaagagcaaaccaacttcaaagcaagaagaaataaagaaataaccaaaatcagacctgagctgaaggaaattgagacatgaaaagccactcataaaatcaacaaatccaggagatggtcttttaaaaaattaataagatacatagatcactagctagaataataaagaaaaaaagagagaaaatccaaataaacccaattagaaatggcaaaggggacattaccacctaccccacataaaaaaaaaaaaactactcattgactactagaaacacctttatgcacaaaagctagaaaatctagaagaaatgtataaattcctggacacatacatcctcctaagactgagcaagaaagaaattgaatcactgaacagatcaatcatgaattccaaaattaaatcagtaatgaaatatctaccaatcaaaaaaaaaaaaagcccaggaccagatgaattcacagcctaattctaccagatatataaaaaagagttgataccactcccattgaaactattccaaaaaattgaggaggagggtctcctacccaaaacactctatgagaccagcatcatcctgataccagaacctggcagagacacaacaacaacaaaactcaggccaatatccttaaagtacgtagatgcaaaaatactcaacaaaatactaacaaactgtacacatcagcacatcgaaaaggaaactcaccatgatcaagtaggttttatccttgggctgcaagtttggttgaacatatgcaagtttggttcaacatatgcgaatcaagaaatgtgatttatcacataaacagacttaaaaatgaaaattatattattatctcaatagattcagataagtcttttgacaaaattcaacatcgctttatgttataaattctcaacaaactaggcattgaaggcacattccttaaaataataagagccatctatgacaaacgcacagccaatatcgtactgaatgggcaaaacctggaatcattccttttgaatgctggatcattataaagatgccctctataacgattcctaattaatatagtactgaaattcctgaccaaaaaaaatcaggtatgacaaagaaataaaaggcatcccaatatgaaaagaggaagtcaaactaccctgtttgtagaagtcgtgattctatatctagaaaaccttgaagtctcagccctcaagctccacgatatagtaaccaatgtcagcaaagtttcagaatacagaaatcaatgtacaaaaattagtagcattccagtacaaaaacaacagtcaagccaagagccaaatcagaaacaaactcccatttacaattgccacaaaaggagtaaaatacctacaaatacagctaaccagggaggtgaaagatctgtacaacaagaattgcaaaacactgctcatggaaaccagagatgaaacaaacaaaaagaaaaacattacatgctcattgataggaagaatcaatgtcattaaaatggccatagtgcccaaagcaatttatagattcagtgctattcctatcaaactacgaatgacacagaatttaaaaaaaaaactgttttaaaattcatacgaaacaaacaaaaaaagatcttgaatagccaaggcaattctaagcaaaaagaacaaagctgaacgcctcacgttacctgaattttaatcatattacaaggctatagtaaaaacaaacaaagaaaaaaaaccaaccaaactgacaacaataacaaaaaaatcctccagaatggtactggtacaaaaacagacacacagaacaatggaacagaatagagatcctggaaacaaggttacatgcctacaactatgtgatcttctacaaagctgccaaaaaacaagcaatgggtgaaaagactccctattcaataaatgatgctgggataactggctagccatatgcagaagattgaaactggaccctttcttacatcaaataaaactgtaaactcgaaatggattaaatacttaaatttaaaacctaaaactatgaacaacctagaagacaacttgtgcaataccattctggacataggacctgacaaagatttcattacaaagataccaaaagcaattgcaacagaaacaaaaaatagacaaatgggatctaattaaactaaagagtttctgcacagcaaaataaactattaacagaataaacaaacaattgaaatgatgggacaaaatctttgcaaactatacatctgacgaaggtctaatatctagcatctataagaaacttaaacaaatttacaagtaaaaaacaacctcattaaaaagtgggcaaagtacatccacagacacttctcaaaagacatacacacaaccaagaagcgtatgaaacaaagctcaacatcgctaatcattagagaaatgcaaatccaaactacaatgaggttccagctcacaccagtcagaatgcttattattaaaatgtcaaagaataacagatgctggagaggttgtgcagaaaagggtatgcttatacactgttggcaggaatataaattagctcagccatttttaaaagcagtgtggtgctttctcaaagaatttgaaatagaatgaccattctactcagcaatctaattattgtgtatatatcaaaataatataaatcattgtatcataaagacacaagcatgtgtattttcattgcagcactattcacaatagcaaagacatagaatccacctaaatgcccagcaatggtagacaggataaagaaaatgtggtacatatataccatggaatattacacatccatataaaaaaccaaaatcatgtgtgtctgtggttttttttcagtaacatagatgatgttggaggtgattatcctatgcaaagtaacacaggaacagaaaaccaaataatgcatgttctcacttataagtgaatgctaaacaataagaacatgtggacacaaagaggggaacaacagacactggggcctacttgagggtgaaggttgggaggagggagaggatcaacatagtacctgtcgttcagtatgcttactacctgggtggcaacataacctgtacagaaaatcaccatgacgtgcagtttacttataaagcaaacctgcacatggatctctgatactaaaataaaagttataaaagaaaataatctaatttcactcttctgcatgtggatatccagttatccctgcaccatttttttttaaggaaaccatcattccccattgtatgtttttggcactcttgttgcagatcagctgactgcatctttgggtatatatttctgtgttctctatccttttccattggtagctatgttggtctttatgttaataacacactattttaattattataactttataatatattttaaaatcagaaagtctgatgcttccatctttattttttttttaaatatcactttgtatattctgaatcttctgtggtttcacatgaattttaaggtgtttctaggacgtataaaactgccactggaattttgatagggatagcattgaatctgtacatcacttttggtagtatgtgcagtttagcaatattaattcttctaattcattaacattaaatgtccttctatttatttgtgccccttaattcctttcattgaagttcagtagttttcagtgtataagtcttttagcaacttggttgactttactcataagtattatttttacatttttatactattgtaaatggaattgttttcttaattttcttttaggatggttcattgttagtgtatataaatgtagcttattttatattgactttgtatcctgcaattttattgaattattttattagttctaataatacttttggagtttgtacaaattaggatcatgtcatctacaaacagacataattttacttcttcctttgttatttgcatttcttttatttattttttcttatctaattactctggctagtgctttcagtgctatgtcggagggaagtggtgagagtgagcatcctcatttgattttcaataacagaggtcaaatatgatgtgatgttaacagttatcttttcatatacaccttttattatattgaggtacattccttgtacacctgttttgttgggtatttttattatgaaataacattcaactttgttaaatgcttttttcatatctattgaggtgatcatatgatttttgttcttcattatgttaatgtgatatatcacatcaattgatttacatatgttgaatcatccttgcatctcagtgataagtccctttgatcatggtgtatgatctttttaatgtcctgtagaatttaattttccagtattttgttgagaatttttgcatctatatttataaggaatattttttcttttttttaaaattttttattatactttaagttttagggtacatgtgcacaatgtgcaggtttgttatgtatgtatacatgtgccatgttggtgtgctgcacccattaactcttcttttaacaataggtatatctccaaatgctatccctcccccgttaccccaccccacaacaggccccagagtgcgatgttccccttcctgtgtccatgtgttctcattgctcaattcccacctatgagtgagaacatgcggtgtttggttttttgcccttgcgatagtttgctgagaatgatggtttccagcttcatccatgtccctgcaaaggacatgaactcatccttttttatggctgcatagtattccatggtgtatatgtgccacattttcttaacccagtctatcattgttggacatttgggttggttccaagtctttgctattgtgaatagtgccgcaataaacatacatgtgcatgtgtctttagagcagcatgatttataatcctttgggtatatacccagtaatgggatggctgggtcaaatggtatttctagttctagatacccgaggaatctccacactgacttccacaatggttgaactagtttacagtcccaccaacagtgtaaa

SEQ ID NO: 93760 - DNA, 441610 bp, Homo sapiens
  misc_feature (1)...(441610): n = A,T,C or G
taatatagtataatagcaaacatataaagacaacctcttcaggacctggaaatatttttgtcaaatgaagttttgcttaatccattgccattactcatcaattgaactcagtttttaaaagaatgaagttgtctgtgtctttcttgatttattcattcattcatctagcacatacttattaagcacttattatgtgttttgcaaatttcaggtaataggactataaggaacaaaagaaacaaaatcttttgccttgacagaacttacctcttagtgagggaacacaggccacgttaatacaaaagtaggatttgtgggtgtttactaattgttatgatacaccactaatacacttttttcttgctttataccaaaggaaatagtacttattattaaataattagacaaaattcaacaaccttcttggtgcagttcaattttattatatttatatatttttaattggatgcaaacaatttttttcctttcagtctaaaaatattgattaaaatccattcctttacccagcggtggtacaaacatgtttgaaagagtcttagaaaaattggtccattctttattttcttactttaaaaataaatcagctgaagcttggagatcttatgtgacttctccaacgatgtatagttgatatcagagatggaacaaaatccagtacattaaggaagcaattctgagaatattcacaattactacactatagtgtggaataagactagaagtgaatttgatttattttcaaattaaaaaaattatgaatcaaaacatgtgaagtggcttaaaatcatatgttggttgaattgaatgagaaaggtgaaattggacaaaaacatgcatgaactatatctcggcatggttccatagaggccatgtcttgtccctcaataaacattttttttttaaattttagagcataattaagttactccttaatgactattttaagagacactaacaagggtataaaaataaaagccaaggtatgtgaactttccatttacgtaagcttgctaaataagcccctcttcctgcacctctctaggcaactgatcctgagcacacgtctccatggcggcaggagtcattgctttttagatcacgttctccgagcaagagccgagaaatcgatatctctcacaaggctgtagacgtgctggaactgattagtcattaacctattgtcactcctcccagcgctcatggaaggagttgcagcatgtcaatggattttaaaagagtaccaggattaaacttctccatggcagtgggcatttgtgaaaggtctgttctgaaataccagtaccatcttctcacatgttaagggccaaaaatctcagtaagtcactccaaatcaggttttacagatgattttttgaaatattgattctggtattgtccctgaaaatttaatttatcaaataagccaattaagaagcgtcttttaaaggcacgtagggaccattcagcactggatggacaagaaaatgaacatattaatcttacagtcagcaacgttttgttgatgctttggaaactgaactgcaaaggagtacttaaatgaactgaaagagttaatttgacttctaagagccataaactggcttgggttgggtggattctgtattcccagactctggttcaataaaaatgtaaatgttatctgggtacacaaagcatatttcatggcgataatgaatctgttgacatactgttcatactttattatataaattttagtaatgtatttgccagagagaaaaatgaatacacagggaaagactctgtgctcagctctacaatctgccccaggttggctggcacacgttcgcttctgaccttggcgcagtttgctgggctgccttgatttaatcaatcagagccctgtggatgttgagaggaacacgacggcgtcattgactgagctaatctaactggatttgaaataggagctagaagatgggttatttttaaaccaaaacccactgatgcataaacctatcctgcagcgtgattgcttagatttataatcgattaggtgtgtcttagtgtgtatgtaatccctgagaggtgaccacattaggaggggatgggcttgagttcgcaggcagaggaggccttctcctttggctggcctgccgtaggctctgcctgcaggcccagaatggagtgctgtttagtgtgacctgttaccagcatgggctttctaatttgcaaggccgcgggcaaaacggacatgcagaaccttttgatcaaaaattttgaagaatttcagggtggtgacagcagaaccttaaaccagctgcacaagtcacagatccaaaaagtcagccttgcttgctgggttatgaggatagagggctgccctctagcgttacaggaaagaggaattctgcttcctgatgtttgctttttattttttctcccacaggcccagttagagattccccagcaggtttctttttgcaacaaataaattgctacagagtaaatatatgggagaacctcttgctctccaggccttacccttggagtggcagccctgctacccagagacacagaaatgaaccagagrtctcctttggggtccctttagtttcaagagtccatatttcacgctcctggctttgtactaaaggacgtttttcattttacttcatatggcttgtaagttattattttgtttctttttttctttttttcctttttgaaatacaaacttgtggagaactttttaaaaggcatacttagtgcaatcgattctaaaacatgaatacagaaactgtaatgattgtactgtttcactttttttggtattaaacataaagcaatgacagaagcccgcataaaaataagcatcaaaacaaaacaaagatcaaacaaagcctcagagaagcactgacatattcttcatttttatattattttccttctaagtcctgtgtctatgatgatgaaatttaaattgtagtgttcaggaggaaaggaggagtaggaatgttgatttttgttcctgtttcacttcttgtagccttacttttcaaagtaaattggaaactattacaagggtcccaggatccctgtctttcccacgccttcaccctgcccccttcatccagcacatggtaggcacataatgttagtttaataaactaatggaaggatgagtgaattaaaaaaaattcaaaaagatcaagggcaaaataatctccatgtcattacattgtaacaaaatttcttaaaagtcttaagactgcctttaccatacagagaacatatatatggtatacatactggatatttaaaagattccacttccccactaggaagaaggagacagtaattaagcatttccttttcctcataagtttttcagctcttttcgcataaacctaaatgacggattatttattttttctcccttcttgagtgggtgaagacaaacatgtatcaatacaaggggtaaagaagcagcaaagattgaagagaagatgaataattagtctgttgctagcacaggaaaggactggaaatgtgcaactctgcccgccccagaaagaccaagcacacagccggaggaagacagaaccaacacaatagaaaccgtgtccagcttcccactcaaccgtgtttccttggaagggattgggttctggatatttataccgcggattcatcagtgttgtctgtcatggaagcttgctctcagaaccttcaaaaacctaaaatctgggagtatagtaatcacatcctgaggttcatagcaaagcaccgagcccaaagcatccagcccagtgaggtttggtgggagggtctgaggttgaaattacctgggttacagtcacaggagggtgttggagtggagggcaggcaggacagggtgggggcagcagtccataaacactgcagggaagagaatttctttctgctgctagggcaggatgacccacggtgggaggtgagccttgggacctacaggaggcttcagggggacacccccccacccattgcctcctcctccactccttgtttccaggtcctcagaaggagggaagtccagggaccagggagcctggtggggccggacctgaggtactgcacgcagccctgggcccagtctcctcggccacctccctgcctctggtgtctatgagatctgcgggtgagctgtgcagctcctgagccctcatccttaggccctgtgggcactgacggatgctaaaatgaaaacctctggaaggatccgtgcccggcctggccctgtgctcagggtaacgcagctacctagcttacatgccctctgccagcgaggaggacaggacagccagggaggcggggcatggggccattcgagaaggttctgaggtcttaggtggtgacaaggctgagtcctgagagctggtcatctcctggaagagatgaaaagtgcatggaacagccctctggggctgccctctgggatgctcgctggtggcaggagaagggagggctcttgtgccttggattccttggggtaaggctttgggggaggaggtgggatttgggggctctttgggccggaccacactcgaataggaggaaacttccagaagggtgggttcctttggtgataagcaatgaagccccttcggcccccagggcgaaggccagcggcctccgctcccacgcgtgtcgggaggggacactgtccctggtgacatccgcccccacaacgctcctgccgggtctctagcgcctcctgcgtccaggcccccaaggtgacagggagggagctactcccagggccgacccgcccgctcccgcgcccagccgctctccccggcgcccctttgccgccatccccgctcagcagaggggctcggcgaggaccacgaccagccacggggcagctctgtaaacctgtgatatgacaggcttatacggcacctccaaagtgtgactgaagctgagcgtgcagggcgcaacggacgctgcccccgcgaggccgtggcgggggctcccagtgcagtcactgccgcttcacttccacatggtgccggtctccagttaggtcccctggcgtttccgcgccctgccgccctcgcagggagccccggccctctcaagagggtggagaggatgggggagccctcaaccctgctacgctgaggggaagaagggctggacggcaaaccggtgcccaccgcggggaggcgggaagggtgggaaatcctctccagctccccaaaagagtgaaaaggagggagaccccgctgtcctctgacccgcgtactaaaggagggaccccccgggtcctctgaccccggctgcgctctgtgactgtgggggagggtgggagcaggccccgcagcccactaaggggtggaggaaacaggagggtggcagcgtccctgcccgctgaccttgaggtagtggagaggagctgaggagccccgcagtgctccgagccaggtggggcggggggagtggtgggggtaggactccctccctccaccccttaggctgtgttctcacttcgtagcggggagggccgtccctcccaccccacccacgctgcactcgggatagggcagaggaggtggacgacctggtggctgagtgtgggaggccggcgggcgaggacgaccccgggccggggcgcagcgggagcccctcagttcgccactccccccaccgtacagcccccgccgtccccagcctgcagccgggccgtcgggtgggggccgacaccgcccctgcacggaggccggctgcgcgcggggcggggagcggcgggcggagggccccgtggaacccgccccctcccgcgcggtggcggtggcggcggcggcgccgggagctgcccccgaggccgccgcccggcccccgcccgcgcgtcagcgcccagcccggggcgccgagctccgcccgcgccggaggcccctgcgcgcagtccgggtgccggcagccgggccggccgaggcggcgcgggggtgggacgcgggcggccgcggcgagcggcgctgcccgggccgggcgcgcacggcgggcgccctgtgagcggccccgatgtggcaggaggcgatgcggcgccgccgctacctgcgggaccgctccgaggaggcggcgggcggcggagacgggctgccgcggtcccgggactggctctacgagtcctactactgcatgagccagcagcacccgctcatcgtcttcctgctgctcatcgtcatgggctcctgcctcgccctgctcgccgtcttcttcgcgctcgggctggtgagtggcctccccgcgggtccagcgccgcgccttccccggccctgagaggagcccggccagccgagccgcgtcccgctccgggctgcccctcggcccgcggcagcccctcggcccgcggcagcccctcggcccgcggctccctgcttctcctgctggcccgcggcccggtggactctggcaagggctgcgggcgggagaaaagtttcctgggaaggctcttcccaaaataaagttcccgaggtgttcaccaggtggacgggcagggcgtgtgctttttgcatctttgcgcacccgctggcaaactctgcgctttccgccgggcaccgctgcccgcagcgctsgaataggtcttccccgactcagccctgggcttcctgggcgagtcgctgtctcctgcccggttccactggcatggccccacagttggcattttagttgggattgggcgttattcaactctgcagaaagcctgccttgggaaagtggttaatgacaaggaaaatgaagaagaaaaattaagtatacatctttgcctttaaatctgtatgcatttagctctttagcccgatagacggaaagtgatgtggtgttgacttgtgaatcaatctttcatctcagagactacagttaagaagcgtttgggacggacgattgctttcccgtttctaaagaagtaacgtgtttagggttttggacaggttattaaagtggatttcatcacgaggagtataatgcagctcaacagctgatgtcagttttgccagtttatatttttcaagcagaaatccttggctcgctcccttgaaaagtgaggggaagtctgtagatggcgataacttcctgttactgatctctgagtgtgtggttcaaacttttgcactgcctgtgacatgcatgtgcagattttgtgcgaggcattgattatccaccagtgagttttttttttttttttttttttttttttagtcagtggttgatctgtgaatgtgtccactgggtgatgtattttgagcttaraatataaatatgtgcctatatttatatgtgtccaccaccaaagaagtggattttgcttatatttcaccatgcataaaatagctgtccttggtatttggcaatttgtttaggatgtccggagccagatggtgttcaaatgttatgcatgggaagaattgttaccatcatgtttttaaaaaataaaaaaattcccccacaccactcaatggtagctgtctactgattgagttcaatgaggtaagaatagaaatagaatgtaggaggccatgaagtcacagatcacacactggctcttgtactatcaaacctagagcagagagtaacttttgatccctgtagtctagataggagtccggagaaaccctcactctctccacatgtaaccagccttctatgctctctggaatggcatttttatctctctttactacttttaggaacaaaaaggacttggggagagacttctgctcagtctcatgggcaagcaggatctctaaagtcatctacttattattttttacttgccaggaagaaaagaaacatcagagttttcctttggaaatctgttctgctggggcatttcagcttgtgattctcttgaacctgtaattcaaacctgctctggcttgttctcttctaaatggaaaggagcaggtgatgacctatttatagcagcattaatatatttaaagacaagtgtgaaattcatgcttcctctgcacacaccactttgttttctgtgatggagaattctaatttcttaaacctcattgatagagattcttgaatgggtcactcagagatttagcattattgggcttaaagcacccttctttgaattgtctttgttctttgtatttgtgtgtctatattcaattcctttatgttccattttgcttggtgcatmtgtgttagtggtacccttttcaaagcgttttccacgcatctttacttttccttgataaatcaatcattttaatgctcctcttgccttcagctaaatcattttaagcacaaagtgggcatttcccacagcatggctgtcacctatggtgaggtccagagacagtgaaatgaatcctgtccttggccatacctaattcatggtctcatgtctactatgtgcacccttcaaagagataagctgtgcagaaatgttccagaatcagggagggttactcagtctgatagaaaagccaccttcaggcagagaccagctgcaggaccaagtcggaaggagctatrcctaggagaaatgtgccctgtgttctgaaaccggacctgagtcgggactgggatgatgttgggctcccaacagcctgtttctattttgattttagaaacaccataaccagcatctctgctttccaaaacacgttctccatccagatagtcagcgatggctggggtaggracatttgaaggtagaatagggctaaggtaaagctgtgttcatgtaattagagatgagttcatttcttgggctggcagggcttcgcttcagagaggtctaccttgggaggtgggaatggctgctttgggaccctgccaaggtttccatgctggagcactttacttgaatagctgggctgtcatgcaattcaggagctaagcagatctatttttgctgcctaaaatcttggacagattcctttttttccccctgaatctgcctgattttgatttccattagactttcatcagttcttatagaagtttggcaatctgcttaaagcacatccctagcctcctagagcatttggactacaaaatgctcttagcataatgcaagtacatagagatttttttgctgtatgtaattgcctttgtagaagtgatttggaatacatactaaaaagaaaaaagcaagcttcattttgatttaatatttccctaattgatattgttcacaaagtgatttcatttaatttcaacctttgatcaatccttgattctgcattgttggccctaaagttaaagtaatcctcaaagttttatatgctgtaaaagtaaattctgaattgaaacttcacagtcttggttaatttattattttctacatgaaaactattaagtagttttaatcccatatttgtgaagaattatttgaagacaggaaactcagtaaatataaaatttgatggcatgtcttgaatttaaatattctgtttaataatatgagtaatagtttctgctgtttatcatggagagtattcatgaaaaatctgatttataattttttcaccatcagcttgttgagtgcctaccaagtgccaggaatggcaataatgctgggcatggggaacaaaataaaattgacccctggcatcagaaaacttagagctaatgaaatgaaattttaagtcataaatcttatcatgtcacttggtttttaatttttttctttttctttttctcatttttttctctttctactttgttttttggaactggtttttattactgaatgcatgaaaaccctttttcagaatttaatactctcatttattatatccaaaatcagccagctgttttcaaaatttgcctgtcagtgttaagaaaggttgacataatttttttttattttgtcaggataccagctggctccagccagatttgttttggctaaaacttatgattaggaatagtcaatatttcaatataaatgaaaaaattttattccataattttaagtagtcagagaaataaagtagattttttttagtatgatactgaaataagagtatgcacttttattaactataaataggtaatatatgtgactgagaatatggcccaccttgtttcttttatggtgatgtaatgagctagatatttaaaacaataaccagaggtatttttatgatgaatcaatgttccagcatcagatattttttcgaagggcagatttatcagagaggttcttttgtgtgtacatagagaaagaatcttattcttccaaaacaaattaacatagctaattatttgtagaggccaaccaactttattattccagacaatctttcagcacccccaataggtggaagaatcacctccttccttgggggttgaaggatgggagggcagacaaatgtgcccaacatcccctctaagaagcaggaaattctgtgcatgctttctctagtttcccttgtggaagggaatagagcatgttctcaggtattgcagtaaaggtaactaaagattcatctttttatgcatttctatacacgcaggaaatcttactctgcaggtgcttgtaatttgcaaccagtaattctctaagtcgttttagttataatttacttgtggtataacaaaggccaagggaaaactgtaattttctgcaggaaagatggttgcaatttagaggcctagctagaaaggatttggaagcatcctttggatattgaaatgtatgattaaatatatacatggcaccttcctttcccattttgaaaggacagtggagtgaaatggttgagagcatctgcctgtgtgggagttgtggctttgtccatttccacttctgtgaccttgggaaaattgtttaacctatgtctcagtttccttgtttgtaaaatggcatggtacctgccttgtaagctgatgtcctcaattagtacatgcaaagcccttagaacaatgcctggcataaagtaagcctccaggactgttagctgttcctaggtctttgtagctgcattttcactgttactgtgagggaatactgtagtcacattgcattagagccagaaaggtgctcattctacagatgatgaaactgagacccggagaagtgaactcatctcttcaaggtcatgcaactgctacgctgtcacagggtcacagggcatttgactttccctgggtgactttgctagagaagattgaaggtctagaattcccagcgctggtcttggaaaatagcaagttttcttgttgaaatttcttactgatatgaacagcctcaatcttcattctgtgtaatggagttaccttttaatgtttttctcttccagagttaaaggaattcagtagagatgcttcctcataattaattcactgacgtgctggcattatttattttcattatgctaaatgtccccagtgtcttccccatcaagtggagcctcaaatgtggctgtgcttttgttgtctgagaagtcctggcatatgcaccatgggtgtgagaatcattcctattaagccgtgattcttactgataatttaaaaccgaatattctactaaaaatggaacaacactgttagagctgcgatattcctgtgttgaaggtgttttgtgtgtgatatatttcatgagaaattgtcagtgacaggagagtctgagctggatgttgggcrtactccactggtatatgggttcttcctgccacttgatattgacatcgagacaattcattgaacctgactcatttcttccttcattgagtatttagagcacctgggttgggggtgcaagcactgtgattgacatcaccctggatggcagtccaccctgaactggctcaccccttgcatgttgacatgatcccttaaatactggtgactgctctagggcaagctatcatcattatcatatctaaggaccacaagagctgagggcattcaactctgaccctctccactttctggatcttcctgagtggctcccctaatcttaaagtctcttccacatctccgtgccttatatccaaacgtttgggaggacagaaaaggattaagttagctcatgggtttggtccattkgacaaaattaagccagtgctaattcttcagtccttttttggtataaggatgcaataaaaaatcacaagggagaggatgaagagagggttaggagaagactttgtttgttcaactgtttttggcaatgttagacatagttcctttggttccckctttttgcttctgcttatacttctgtctccaggagccagatgcaagtgagagtcgggtagacacagtaagaaaaacctcaaccgaaaaaaccattgtgggctgctttaccagctagttttctgactctgcctagagttctagaacaattgtgccaagacaaagagaatgaaaacacagacctgaccatggctcatagagatgtgtaaggcagattgtatctcagagttgaaccaagtcacttctgaaaagcttggtgctggaaatgggaaagttcaattatagggcaattaaaatatgttgagtaaataatttattgcatttgaaacatatagacagaaagtataatacaatcgtttcattttaaaagattgtaattctgaagatttctcaaggtggtcattattttctgggagagtcccgtgaataaatcaggtctctagggtcatcaccccatagaaagttcctggtagaaaagatggcagatcagcactattgtaatgggagccctgcctgcaagatcttggaattatgatttctacccatttatatcaatgtcctttgctgtctctcagacatgatgctggggtattgcagctaggacaagccagagctcaaaggtgctggtttttattcctgtgtgcttactcccaacactgaattattttttgtgtgtgtatatgtgcgtgtgtgtgtttttagtgtcctgtattttttttttaggtatatagagaaaaaaagagcaaataattaagatatcaagttactaatgatctgtggtcattatgaaagaaataaaattgtagactagtccattactagaactaattaaaattattaatgttaaaaattaaatacggagatcaggttaatgtgaataaaacagataatgaggaaatgttagcatagttcagacatatggtcaacctaatgtctgactctttcccatcattgacttgcagtgcattcaaatacacaacctccatgctctttggaattgaattttaggtgcataaaatagaattactcatttgattaattcaattaatatttgattctcaggcataatccttattaatctctatgtggctcatttatagtaaaataaattttcatgaattcattttgaactagaatatctctagttaggaaatttctttctatatgctcaactaattccattctactctctatcctcaaatgtaaacttcatattgaaattggattttatcattcttttacttgtctttttgttcattttatcatatatagacacatacacataaattatatatatgtgtggtgtgttatagaaattgagattcatttacctattttttccttgtggagaatcaattgccactgatccatttcaattactttcttcatatctgtcatatatcaaaattctacatatggttggctggttatgggctgttctgccccattgactaagtttttgttttgttttgtttttatcctttcaatgctacacacacacacacacacacacacacacacacacacacaaaattactaaagcgctgtaataagtattgttggttgtggggacagtgaaacttctgcttcagtgtctttgatagtagtaagattgtctagtatttytaattttatttcttgggtcagtttcaataagttgtttttstaggaatttttgcatttcatccaaattctcaaatttaactgcatgctcatttkgataatattgttctccttttgatgttttccatatgctttatttttgatttttatttataatattgtttttatatgccttcatgtataatctcaccagatgtctttttagctttttcaagaaccatccctctttgtttatcttatccattacttcttttgtgtgtgtttttatctttattatctcctgttacgtcagtcagaacatattagattatgtcatggaaacaactccaaagtcttcctggattaacacaacacaacaaatgtttatattttgctcaagatacacggtaaagatgattcagtagagggactctgctgacagtcctgtcactcagggtttcaggatgaaggagggcacatcccacaacacacttctttcctaattgttgcaccaaggaggaaaagcttgcttccatgtctaactactggcgatgaacactttccacatggaagtgacacatcactttcattcatttttttattggccagagtaaatgttcttagttgtctttggttgccttaaaaaccaccataaaacttaatgactggaaacaccaccatcatttattttcctcctgaacctgcagtttgggcacatttgccagtggtggctcgtccttgccccatgcatcggctggggtggtttgaaggctggggcttgcctccgttgaaggtttgctcacttccctgtctggtggtcatgctggcttgcaactgagattcakctggcactgctggccagaacaccttcatgtggcctctcttcatgattacttgactttctcttgatatgggatctggtttcaagaatgatcatcctaaaagaaaaagatggaattgcatgacatttttatgaccctgtctctcaagtcagggaattctgccatactgtattgattgaggcaccgtgaagaccctctcaggtgggtggtcagtctaaggggatagaacctaacttgatgaaaggaatgtcaagcatacatgggatgaaatgtagattgtccccacgtgtggaaaataccatctgctatgttaccttacatagccatgccaaactttcatatgcctggaagaaggatgtatcaattaacttgtgctgtgtaacaaccaaaaacttaacagatttgaactactctttttttttttttttttagctcataattatgtgggtcaggtcttggttcttctgacctaggtttcccagttgatctctgctggtctgtctcatgtttgtgtgctctactggcaggttagttaatcgctggattactcaaaatagctacatttatgtgtgtggacagctggcaggctatccaccatggctgttgagtggggtgccaggtcactyggctgtctcctctcatttagcaggctagcctgagcttctttgcatggagttcaggrgcttgcaaagagcaagaggaaagggacaagccctactgcccaagtctttgttcaagttattgcttgtgccatgcacctgccattagattggccaaatggagccatgtggctagagccagactcagtgtaggagagaattacacatrggcatgatacagggaaggggattattggagccaatttggatttttaaaaaagctgtaacagaaaagcaaactagaatgctgagcaaccctaattactacagcagtccacctacctggtcayccaatatatagtttattcccatttatttatttatttagagacagggtcttgctctgtcatccaggctggagtgctgtggcacgatctcagttcactgcaactttgacctccctgggctcaagttwtcctcccatctcagcctcctgagtagctgggacgcaggtgtgtgccaccgtgccctactaattttttttttttcttgtagagatggagttttgccatattgcccaggctggtctcaaactcctgggcccaaatgatctacccacctcagtctcccaaagtgctgggattacaggcatcagcctctgtgccaggccaatttattcccttttgaagaaaatatacatactcccttttcaggagagatgaccctaaagtcttgtctgtgaagggcagtaagctcagaatctaggatctctaagggaagggcactcttttgttcaaagggaccaatgaatggtcttttctccatcaagcctgggtgtggcttctgtgatctggagaccagtggtytaaaaagacttgttatcagccatctacccagccacctcatatacctaggataaccacagtaaacccttctgctctcccaaaagaaggatgaaactcattggcccttggctcacagcaattccaagtccacctgggcaggcagggtgagggtccctggcccagagactagagattgcttcttcattacaaccagactcttgttttaggagatagtccccttttcttctgttttatgtggcctttgaatcttccccgggaggtccttcttctttatttaccatcctcttagctacatttgaactgaatatttggatattcccttcttgggggctgagtgactttctcacctcttgtctgccataaataagaaggcacagtttctcttaagtctagaacatccatagttcaggttagttttttttgaggaacacaaatctctcaaaacttattcaacctcgtaatgtcaatagtcacagccagagttcttttcaagacatgcttcttgaaaggtttgctatttttctctgccttctcatgctatgtctgtctctctctctttcagcttctatgtactttaagcctgtatgggaaacacactctgagtttacttttccctgtgccattttgttcagttgaaataatttcctggcaccacactcttatttagaagttaacttcaaggcacctttatccatttggttttcaacaatgggttatctgagggtcggatgaactccaacagtggtggacgtcgcagattgcatggtgactgtgtggcccattgtcaacgttcagaccattctaaggtctggtaacaagacagcaatttttcctttctcaaaaagaagaataattatctccacagttactcagaagtctttgtaaggcactggtttgggtggaaaagtcagaacattcagggaaatctgaagacaaacatgttgtattagtcgttttcacactgctataaagaacgacctgagactgggtaatttatcaaggaaagagatttaactgactcacagttctgcattgctggggaagcctcaggaaacttacaattgtggctgaaggggaaggggaaggggaagcaaggcatgtcttcttatgatggcaggagagagagagagagagcgagcaatggggaactgccaaacacttttaaaccatcagatttgggtggggacacacagccaaaccgtatcacatgtctagtcagccaaagggtggcgaaaggtggtgcagcttggtgaaaaggtcratgggcatctgttgcttctgtgtagctgctgacactgtgcttcagcagccagtgtctgctgggcccccattcatcaatggccacaagttgggaagaagagcaggacatagagccagggagagtgaggatgtgcagaagccggcctgggaccccgtgagtgtccatcgtcatgtctgaccatgaagacttgcctcactgttgcctcaaaattctggcacagattctggcacaaattcctttctcttcagttctttttttttttttttttttgagacagagtctcgctctgtcgatccagctggagtacagtggcacaatttcggctcactgaaacctccgcctcctgggttcaagtgattcttgtgcctcagcctcccgagtagctgggtttacaggcatgtgccaccatactcaactaattttttgtatttttttagtagagacggggtttcaccatgttggccaggatggtcttgatctcctgacctcgtgatctgctcgcctcaacctcctaaatgggtgggattataggcatgagccaccgtgcctggccccttctgttcagttctaaccaagaactctagagggaaggggattctgggaaaggtaacaagcagcaaaactgacacctaagcaactcagttcagtatttgaacttgtaattttcccaccagacaccactgttaccacgcaccacaaatgttgatgtgcactgttttcattattctttgaaaatttacattaggtggctattattattattgttattttgagacagtcttgctgtgtcacccaggctggcatacagtggcacaatctcggctcactgcaacctccgcctcccgagttcaagcgattctgttgcctcagcctcctgagtagctgggattacaggcatgtgccaccatgcctggctaatttttgcatttttagtagagacggggtttcatcatgttggccagcctgggctcgaactcctgatcttgggtgatctacccaccgcagcctctcaaagtgctgggattacaggcgtgagccaccgtgcctagccaggtggctattattaaaaagtaaaaaagcaaaaaaacaaaaaaccaaaaacaaaaacaaaaaacagatgctggtgaggttgtggagagaaaggaacacttttacactcttggtggagtgtaaattagttcaggcattgtgggagacagcgttacgattcctcaaagacctaaacacagaaataccattggacccagcaatcccattactgggtatatacccaaaggaatataaatcattctattataaagacacatttatgtgaatattcattgcagcagcattcacaacagcaaagacatggaatcaacctaaatgcccatcaatggtagactggataaagaaaatgtggtacatatacaccatggaatactatgcagccatgaaaaacaacaagatcatgtccattgcagggacatagatggagctggagcccattatacttagcaaactaatgtaggaacaggaaaccaaataccgcatactctcacttgtaagtgggagctaaattatgagaacacgtggacacatagaggggaacaacacacactgaggcctatctgaggagggtggagggtgggaggagtgagaggatcaggacaaataactaatgggtactaggcttaatacctgggtgatgaaataatctgtacaacaaacccccaggattcaagtttcttctgtatcaaatctgcacaattacccctgaacttaaatgttaaaaataaaataaaataaaattcacattatgttttacttttcattctaaaggttattcagaattgtgctttttatcttatatgtggtaacttttaatttacatttttgtgatgaacttttaagataaattatgctgtaatcaaagaacatggctctgtgtgataactcttctttgaaatctttggaggttgcctgacacatgatttttataaatattccacatgcacttcagaagaatattgttccacctaatggttgcatgtggaattctgtatttttcaattaggccaagattactaattatgatgttcaaatcctttaacatcttttcttgtttgcatttttattttatttgcttggcctatcaatagcaagatggggagctgaaattgtctgctcttagtagattagtttactttttttctctgattttctaaatttttgctttatacagtttgaggctattttattagttttatagatgtttaaaattattataattgcctatttattcctttcacacctcatggtaaaatggagtatgactatgtatgtagataagaataaaaattgtctatctatttatctatatacatatgaaaaactgtatctccacacatccatttgtagtcaaatgtttatcaaagctaaaggctgatttcatttttcctagtaattactgtcatttgtggtacacctgtgacataccaaacacccagaagccacaccaaatctggatgactgcatgtgaagaagccggctgagggacattcgacttctcccactgaaaaatcacagcaggaagtgatggaaattggtttctacctttggtcttgctgacttcaaagtatttcactaaaatataatttttttaattaaatagaaaggcagtattttacattagactgtcttttaccaccctcatacaaaatagtactgttcaaaaaaaaaagaaaaaagaaaaagtacattgaaaagaaagaaaatacagacaagctgttactgcgtggaaaaacatctaagaaacaaaggaattgtcacataaggaataaaagtgatgggtatttaataggcctggcaattagaagccatctgaaattaccggaaaatgcatggaaaatgaagggataaaatgcttagagtggaaggaacccataatcatctcagtggatgataccatagtcaaaatctcctgctttaaaggcattttcgtacatttcatttagtatgcattatatggtaaattttattttaccttgttaaagccatttttaaaaagacattttagtatattttaggtaatattaaaaggattttagtacattttatttaatttgcattatatgatatttttttccacaaagggaggaggggtgaggatacataggaatatttaattgagattgatgatggttttaatgttttagtttgcttattttaagctagtctgtctgttttatattctaatgtttgaaaacaactcaatcagaagaacatggcctcggggtgtaccttgctggcttccttcctttctccatctgctgggagctggacaggagagaggagragctgtcatcctaggtctgagagtgtctctttattccattgacttagccttaagaaaaatgcatgatgcaggcagcgaggccagggaagactgtggcctgtaagctcgtacatcctctagtgaatactcttctgttcttcccatgacaccctcatgcaaggttctcaaaactccttcagagttagcattcaaaggcagatacagaacaaattggtggctgttctcttccttgaagagtctctgtttttcagtgggcccagcttttgcaaaggttagggtcacaggcctcacaagcagcagctgactgtctcaagccgttggccgtcagagcctctggctcaccctctgaggtgggggtgtgtggtctgaggatgactctcctcctctgctatgcagaacccacctgctaacgtcacccatctggggagggcaggcacaccaccagccactgaggatcatgacctagattaggacttcagaggtcaaagtcctctttatagtttgcaactgcattgtcataaagatgtatgtaatctttgaccctaagagtttgtgcttttttggctgttctcattttgaaagaaatttaaacatttttgcaggactctaagagggctgtaggacccagacactgtgctcactgtgattaatgatggagaagtcacctgcagccctgacaaatcacatctcggggatctgatttttaaaaaagagagagaaaaaatagagagtttacaatttagaaccaaaatcaaaatcaagtcttacatactttacccagaaaaataagacactgggtctctgtcttgttgacagagagatcctttaaaagagaagcacggccgggcgcggtggctcacgcctgtaatcccagcactttgggaggccgaggcgggcggatcacgaggtcaggagatcgagaccatcccggctaaaacggtgaaaccccgtctctactaaaaatacaaaaaattggccgggcgtagtggcgggcgcctgtagtcccagctacttgggaggctgaggcaggagaatggcgtgaacccaggaggcggagcttgcagtgagccgagatcccgccacagcactccagcctgggcgacagagcgagactccgtctcaaaaaaaaaaaagagaagcacgggaaagctcttacaggtcattccgtttcttctctgcttcctggaaggactatatcagcatcttcttgttccctggttccctgctctactaattgtcactttacagtcatgcatatttttgcatggtttttcagtctttctggagatctaagagccagtaaagtcaatgattgtttcacccctgctgggataatgaaatgactggaaaaaaaagtcatactaggaaataggtttcctgattatttactggttagttttctgtccacagctcagtgaggctcatttggggaggtttaagttaaatcagttttcatggcaccatgtgtgcagtggtcataatctcagatttgatgtcctcagataacacgctgtcatgtcccacgtgtccgtttgttcgtggtgtctgagtgccggggagtgctcgcagcctggcagacacctaatacccttttgcagcaattgtaaactgtgtctgagggtaagagtaataacttaggcacttaatcgtggctaaaaatagcagtggagggagagaaaaagaacatctcatttgatcyacttgttttctgccagttctggaaacacacattctttcggccacggcaacaactagccccattcggttgagttcactgtctgctgcaggaccacagacccacaggctatgcctggctggaggcctgtctcacccaccagctggacaatccatggcagcccttctctgtgcctcagtttcgtcagctgtagaatggaactaacactagtgccccccatcctgcctgcccctaccaggatggtggttgtaaagattaaagaggttaatatatgtaagcctgcttagcacaagtagcacttactagcatttaccattcttgttgttcctcttgcctctttcccaggcatcatttaacacacataattgtgggagagaaagggaaacgatgtcagttaagagggcttggattctggctttttccctccttgggaaccaagactccgtgtggatttttggctggtctgctctgtttccccatctccctgtgcttcgttgcttggtatttgcatggagccatttccagtgtgaagttagagctgccagtgggtggaatgaaccttgtgcccacctgtaaagaatagagatcaccagacagacagtccctttgtaagtcccatatatggtcccagccttggggttttttttttcttttttcttttttgagacggagtctcgctctggcgcccaggctggagtgcagtggcgcgctcacggctcactgcaagctccgcctcccaggttcacgccattctctgtctcagcctccggagtagctgggaccacaggcgcctgccaccacgcgcggctaatttttttttttgtatttttagtagagactgggtttcaccgtgttagccaggatggtctcgatctcctgaccttgtgatctgcccgcctcggcctcccaaagtactgggattacaggcgtgagccaccgcacccggccggtttttttttttaatagaagtgtctgtggatatttctgttaactacacatgtttgggtgaggattaaagaccttacactgtattctgttccatagtaaacgctgtccatagcaagcttccagcataatgttttgcagaagctaaagcctaagcccaggcttgtgtaatcaaatgaaacataatgtctgtatgtggagttgaacttgtgtagaatggaaatagtgggtctttgtcatgtggtaaggaagagataaataaaaaaaaattgtgtgtcaaaataaatgtaaagaaatacattagtaagaagtgaataataaatgcccattttctttttgcttgtttctttttgccatgtttgttattttattttctccatctctcttgagagagaaataacaaacatggcgccctcctgtatgcatttcccgctccctcacgttccatattcagcactttctgacccttttctattaacctatgatcccatcaaaacattaattgccatgcattaaaataaaagctcatcacyataaaaacagataattttgaaagaagttttttaaataaaacatttaaaatccatttgcaagatagttttctaaggccggggtttttctgctcctctgatttagggagagaagttggttgtcttattttctcctggcattaatgtgttcttacattcacttctgaataaaatccatttctgcatttatcagggaagatgtaactttgatgagatattgtttgtcctattttaaatatccaacattggattatctatttagaaaaacatgcttatttattatgaaacttgaattttaaatgttcaaactgttctactttcaaaacaatttcttaaacccaatatattctgacattgacaagcgttgatgacattttaacaacataaatcattggtatcacagtgtctctaaatggtaacttttccatgtatttttttatctcctcaggaagttgaagaccatgtggcgtttctaataacagttccaactgccctggcgattttctttgcgatatttatcctggtctgcatcgagtctgtgtttaagaagctgctgcgcctcttctcgttggtgatatggatatgccttgttgccatgggatacctgttcatgtgttttggaggcaccgtctctccctgggaccaggtaaggtgtgaaaatattttttgtacttcttttatgtcttgatttgtgacatacttagttctgtaaacaacttggccttaaactttgaagaggagtcctataactgagagcagagtctatttttttcgatttatattgctaaaatttatttttaatcaacaaattataattgtatgtattatggggtacdaggtakakgtatttatatctgtatgtatgtgtatttgtatagatgtgtatgtgtatgtatatgtgtgtgtgtataattggatacatatgtgtttaatataaaattaaatctaattatatgcaacatgtcacttccatagttttttggtgagaagctttaaaatctactctttaagcaattttgaaatatacaatacattattattaactatggtcagcatgttatgcaatagatcactgaatcttattcctcctgtctaactggaagtgaaataagccaggcacagagaacaaaggcttttgaaatagctgtctttgactcatggtcaaagtcactctgtcctcattttagcaaacccatcgtaccacagccaaggagctggccggggcctcatactgtcacttgtttcggatagctgagcttcaattctgtccgtagccttgttttacatctcgaaccacagtttcgacaactcagtccttctgtttccggagtgccttgtctaggcttcctatttctccaggtgcttgcaaccctccaggactggttgttgtccttaaattccttctcaattactagaattttcctacttaaagacccttcctacttctgtgacactgattttccctccacatggtcacaagctattgaaggggtggcttcggatacctgctgaaaaacccacattcattcattttgcaccttttgaggctctggrcctcaggtcatatcctgaggagagtgttgtctaactattggcttttttctgtagtgctgctgctatgtgggtggctgctcccagcatattcatctgacagcgtgataaatggtgtgttgtctaggggacaggcctaggctgagatgtgagctactagtttagagcttgtcaaccgagacatggagttttgaagccatccagggagagggtgactgagtagctgagagggctgtcgcagggttgatggggacattgagagccaggggtgtgccaggaacaggatctggaaaggaatagaggagccatgatggggagaagagagccagtgagggtacactgctgtagggagggtttccagggtttccagagggtgtggacagaatggctcaaaagccatgtcaagggacagaatactgttggtgtgcctcagttggaaagagcccagagatgagctggccagtgggttctgttggtaagtagtcatgtgaccwctgccaagccattattctctttgtgcctccatttcttgggcaaagggaggaggctggactaagtgaactcaagttagtctttatggctctaagaggacactgtcatagtggacacaagacccggcgggcgccatcacctctcctttatcactctcccactagagccccttggagggctgggcgcggcccccatgctctgtctggcttcttcctctccctcacactccccgctctctccttcactctctgtgctcctgatgccacttacactctgtccttccccactcaattagaaatcctggctaatacaattagacaaaatactacataacaataaggtaaacatgagagggagaaagaaaattctaattatctgcagatgaccatactatctatacaaataaactgggagtctcagatcaactaacagaactcataagagagcccaccacgactgcaggatcaatataaaaacaatagtattcttatgcatcaacattgaccaattagaaaaggtaattttaaaaattactgtttaaaaattttctcccccagcagcctagacatcctgttgcgtgcatactggtgcccaggtaatgtaaacaggagaacagttaagatcctgctggtcggttgcctggatctggtggtctcttcttgcaccaaagccatcttgttttaaagttacaggtttctaggaagacttagtgtctgggaggccaagtacctcttcttgttcagaatgtttttagctcactttttattacggatcagtttgtcatgttcaatgaaaagtccatttgggttctggatttaaattatattgaatttctaaatttttgttatgaaagatatttaaagcctaagaattaatgaaagggtcgtgtataaaacatccagaaatatgctctttttgtgtttcgtcttttcatcaaatggcatggcatgtctatcaaagaattctgattactttttgttccttcggagactcttttttttcttcataaaatcaataataattttcgttagactcaatcttaggtacctaaagtctttttgttgttttataaacagaattttaaaaattacctttgctaattggtcggtgtttatatataagaatactattgtttttatgttgaccttacagtgtccgtgggctcttctgggttctgttagttgatctgagactctcaatttatttgtatagaattttctttctccctttcatatccttaatttaccttattctgatgtagtattttgtctaattattttagccaggatttctaattgagtggggcaggacagagtgtaagtggcatcagatgtttaacttgatgggaacatggaagattccagtaatacaatgtttgctttatcattgttactatttataatagaaccaattaatcaggataaggtccttttgtctgtctggaatgttcttgtccccaggttgcatgtccttagaacgatctttcctgacccctatctgtcacttcataaggcaacatcactcaccttgcttgagtgtttccatggcacttagggcaacttatagaaccttaaattacaggacacacccctctctttgtttattgattgtctgctgctggaacataaacttctgggcagggacatgactgtctctccagtatcctatccttacccttagcagaatgctgtccagccattggcagccagtagcttctcatttcatatgttcattgacagatgactgtattttcatcttcaggtttgttgttgttattgtttgtattttaaccttttttgctgttgttgttttataacatgtattttgtttttttgacaccatctgcctgcttttaaaaatctccctaaggatcataaacatgcttgtatcatagtcattttctcaagactgactaccctcaggtgttgaatttgttggccaaatttcttggttttagctctccctgtgtaccttgacatttttgcttttacgtacatcttgaattcgaatatattcacctctgcccctaatataaccccaaccattctgtggttgtctttcccacgccactggggccctggatcgtgagtgtatatgaggctcagcccaggtattccatgttaattttgcaggttgggaggccagctcaacctgccgcctggggatgtttctgggaggagcacagctatgtctgctaggccctctcacccaaggcatgatgcttagaaaaggccatagccaggctcagtggctgtagctatttttgcccactattcctaagccaggagcattggcagggtgtgtgcctcatgcagtggaccggctcayaccccttggagagacatcgagtcctgcccctcctagagtctgaagtcctgcccaacacttctagctgcccctgtccattctatgggaatgggggtttaaaatgaaattaaaracaaaagtctaccttctgttttttttttttttttttttttttttgagactgaatctcactctgtcacccaggctggagtgcagtcgtgcgatctcggctcactacaacctccgcctcctgggttcaagcagttctcctgcctcagcctcctgagtagctgggattataggcacgtgccaccacacctggctaatttttgtatttttaatagagacgggtttcaccatattggtcaggctggccttgaacttctgacctcatgatctgcctgccttggcctcccaaactgctgggattacaggcgtgagccactgcacccagccctggtgtcttttactacagacttcatatatgtataccccttaattagccattaggaagtgttgcggcacgttcactttgctcaagaaagcactgtgcttaggaaagcaggctgctttcagtatcctttagaatagaatggttcccactggaagatggttaaattaacaacatagttgtaaagtgatgcaggaatgagcctgctatgcagtcagagggaacagtctatgcaggaccactctcattgctgatactaattgcaagctggggggtttccaggactacccagagattggacaattttctagaagaacccacggaacttgtgacagccgytatcgctgtgattagggattgctacatggggagaatacagaygcactttggcaaagagaagagcccaggaaaaccgccagacatggagcccctgttgtcctctctctgtggagtcatggctggtgctgctctcctacaaccacatgtcacaatggccaaagagaattatctattgccgaagctcaactgagcctttgatgttcagagttctccactggggctcaatcacgtcctgcctgcacagctgacctttagtctccagccttccgaaggtgaggctgacacttttattctccagtccctctggaggtagcactgacatcacagggctctaagttcccatcataaaccacattcagactgtcctggggtctaagcccccagataaataaacacactcttctcgggcaggacattccaagggcctaggtcaccttccagcagttgagggcaaggccagacctcatataaggttaactctaaactgtacagtggcttgagtgtagctcatagtcagcaacatgcaccaagcacagacagctagcacgtgcatggtctggacccagtgccagaccctgttctgagtgcttcccttacatgacttcactcattcgtttatgagcggggcaccatcctaccccagctttccaagtgcagagacgaaggcacaggagggaggctgaagtacaaaggaatttgagcccaaggggtctgcctcctgaggctggctctcagccaggagacctgtgcttctcaaacgggagcgattgcaccccccggggacatgtgattgtgtcaggaaacatcttccatttgtcacagcttggtcgggtatgggggaatgctactgtcatctcgcgggcagaagctggggatgctgctaatcaccatacaacgcacagggcaaagaattatgcagcccagttccgagcctgagaagccgcatatcacccaacatggcctctctgtaatgccttttaaataaccagctcttaagccctcagtgagcagaactgtatgaagttgccacggcacgactgaagagtgatgttggcagttttgatcaggaaagaggagtaatttttcagtgtgtgcccctgagaaagtataggcaacaacaagggtggggaccctgggtgtgggtcaacaacctggtttgggaggagtcactgggaaaataaggaaaatggagcgaaaaagaccccaaaccttcaagagatttgccctcacaggttttgactgtaaggggtggggttttccaaacgtcattattttagttcggcacaaaccacccccatcccgaaggttccctctgctctgtgctactggcactcaacccagctgatgccattccacgtagctgcctcccagatgaaaactcttttaaaacaatataacctctgagtgaagtctgcgcagtaacctgcagagtttctggctcccggagttcggggcagcatttgcatttgacagggaagtctttttggtctgcctcttgcctgactgccttgtgaaatgcctttcatttgtgcttccaattccccattgatagagctgttaggatggctgtgagggtgatgctgcgattgtgtttcatttttctgaatggtttaaaaatacatgagcatgttgaactcaaaattagcagaggagtatgttttctctgtcctggtgcatctagtaagtgggatcatttttatttttaagaaatcagtggcagagtgtatctctccctctctgtccagctcaattacacaacacagcaaggatttctacccataattgctgtggcgcccaccagtcccaccggaaggaacagggaagcttggaattccagaatgtgtttattggagtcctgtcactgatttcaaaaagagcagtcatttgtcccatgggtagacattggatctgtttctagtgctgctgtaactaagcctctttcaagttgtgttccatggcttagaacaaatagaagatatttattgtctcagctctggaggtcagaagtctgcagaagtctgaaatcacagtgtcagcagggctgtattcttttggaagactctagaggagaatcctcccctgcctcttccatcttctggtgtcactggtattccttggcttgcagacacatcactccatctctgcctccgtcttcacgtggtagctcctctgtggctcttctcctcttcttatagtgacaccaatcatattggattacaaccaccctaatgacctcatcttaattggatgacatctgcaaagaccctgtttccaaataaggttacagtcacaagtactggggtttaggacttgaagctatcttttcaggggacacagttcaactcctaactgacaacggttccctaagtgggtgctctctggtagtaggacaggcatttccatcttgtggagtgctgctctgaggttcactcctccttcttagatttggaaattgctcttgatgttgactttcccttaaccttcaaatccaccttgaaattaaatgtgggctatgaaagttttgaggcttttatcaggttggtgcaaaagtaattggggtttttgccattatacaaacctgtttctctaaggaattagagacgttcttgtgtgtgaatatcatgttgaaacaaataaacactcatgaatgtaaagagaaaataactggtccaatcacattgctgtgtaaataaacagagtgctgtcaaggcatgttagcatgctagatgttgttgatttatctctgcccttcctgtcatggaagtgtttcttgttggttcttacattcatggcattgattaaatccttcttgcctgttacattaaaacaaacaaacaaacaaacaaaaaaacaaaactttgactcactttgtaaaccctaagcttttaagtgatgttttatttgatgattttgtttttctttcttttttttttaattgagatgggggtcttgctatattgcccaggttggttttgaactcttggccgcaagcaatcttcctgcctcagcctcccaaagtgttgggattgcaaatgtgagccacygtgcccagcctgtttaatgattttctgacaagcacggatccacttcatctcagctgataattactgacttaggaccctcctctgagatggttttttttcaggcaggttggattgcctggaatgtcttctgctcattcatgggcttaaagagccatcagtgtggtcaggaaggataggaaagctgacccacatttgcatctgactccagctttctgcatttctcttgtactaaagctcattgaatagagttcaacagaaacttttattcctgacaaccccatttcagccttggcagggagaccatactgaagttattttacagatktgttaaattaccaccaactcgaaaggctaacatttttctctaggaaggagagcctttctttgtcctgttacctaaaaggatgtcagacattcagcatgtgcatatgtgtcctttcttacaaaaataggacatcagtgtgcaaacatctttttttattgaaaatgagcgaaaatgaaagaaaataaaggcctctcttagcctttgaactggtgcagaatccttttgcttttcctctagtgcagtcacttggaatgcgaccaaagaatgtatttaccactggaagaaccgagtagcatatgaatgaaagtagaaaaatgcaacctagaaagcctgtctctgtgcacccaagaaactcttctctgtgtgctgctgtgtgccaggatgatttttcagtgtgggcatttggacttactatgaagaagcacacacctaagaaaaattaaacagtaattaaaattatttccattaacaataaagaggaggatatgtttttgttgtttaataaccacacctatcctgatgacacctgtgcatttgagggaagtgcagctgagctgggctcagcctgcagtgtgtttattgggagacctccatgtttctggctctttggagcagaggaggcatttctgagttatccctactgtgagttcccagccagagcgttgagaaaccaaactggctgatgtggtttggctctttccctacccaaatctcattttgaattgtagctcccatagtccccatgtgtcttgggagggacctggtgggaggtaattgaatcatggtggatctttgccatgttgttctggtgatagtgagtaagtcttatgagatctgatggttttataaaggaaggggagatcccctgcacacactctcttgcctgccaccatgtaagacgtgactttgctcctcatttgccttctgccatgattgtgaggcctttccagccatgtggaactgtgagtccattaaacctcttttctttataaattacccagtctcgggtatgtctttattagcagcgtgagaacagactaatacactggcttggctgtccctcgagctgaggatttaccctaaccctcacttaggccttcccagatctgatcttgcttgaatggacaattctgttggtctttctggaacattctctctgctcctccttttctctgtactgcttttcttaagaggagcatgggctccggtactgaaaattggcatcatgactaaactgtcctctggcctgcacacagactttgtgattctcctcccacccccatctctacagccaatgtgtgttaaggagtccgatgtaaattatttggataatggataccctaaaaccctgattcaccattatgcaatttatgtgtgcaacaagattacacttgtaccccataactttgtacaaataaaaataaatactctgtggtctttgagacatttttgcttgctgctctgttcccagtgcacaacacagcaccacacacgtagtgatcacatcgcaaaaattgtgggaacaaatgagtgtacaaatactgcatctgtgcacttgccccttctaccgtagaatgatcagagtcacttccaaggtcctccagtagcaggcaccatgtggttactttgcatacacaacttatttgatctgtataaccctgtgaggtaaatactattatcacttgcatcttgctgatgaaaaaattgaagcccagaaaagttaaccaacttcctcaaagtcacacagtgaggaagaggaccagaatttggacttggcattctgccaccatcacatggaatgtccasatgcccactgtcattggtgactagggtgtccccctcctgttgtgccctggcacatgacagattattgtgtgatgtgaaagggacatatttgtgaatcyggattgttctatttgaaccacttttgggttgatgttatttggaaaaacttcgtggggagggagcagtttctgcagagatgccaaaaatatggtactgtcactgtttcgaattgccagatgatatttccatttggaggtatttttcactcctcacatgaatcaataagagaaataggactaacttagcccaaggaataataatagcccatgtatgtattaggcagcattactgttggggaatcaactaaaactgaaattctactttctcctaaagagatttattatacatagagtccttataattgtacctctttgtgctggttttctcatctgggtctgccctagctcctatatgcctgtccttggccycattcctccctgtaggaaaacctcatcaggtgcaaagggcactggaagggcattcactaggatgccacacagggttcaatccagccactcgccagcttctccctgtgcggtgccagccatgggtcctgtgacctcccttgaagcctgcccagtgctgctcactgtctcgagagccccagacctatgtgtgcagctctcagggcatctggaagagcctcctagggaaggcaacacaagggcgcaacaaggaggtgtgagtggggtctgggatttgcagtgttttcctgaaagagctggacttttacaagggaggaaaaatgttctctgagtttcccaaacatctgtttttgacttagtttcaatggaggtgtttttgatggcggctatcttagggcttctgcatcatctcccttgtgtttgtcatggaattccaactactcgagcattaagtcttggatgctgttgttctatcccaagaaacattcttaagagaatttgtgacgaatacaacttcgtctccatcagaacagagctgtgtatatgtacccatgcaggcatgcagagaacctgctggaatgtaagagagtgaattatagacttcaggctagagcagcaaattctcaggaaaaaataaattcagagtttaaattatttcctgtgaaaagttgctaagcaacacttcactaaactctggtattctgtatttcaaatatattttttcttagcagcaactaatattattttcactcaagtcgtaaagggaggagtgaagtacacacctgcaaatccaataaaggcatttgcctgccggaggcttcacagtaaacttttagattcatgctgaataagtatgggggaaagcagttgaatattttatactatcatggtatttttttcttgctctctacatttgcagtgctttgttaatgtgtgtttcccattggaactgtaattttcctatttgtagaatgagtttgggtattaacaggtactgtagattttaattaactcattgctgtaccatcagcttcccatcaggcccagcctttgtgtcatcttgctcacaactggtattcccaacccccaggcgagaaacaagcatgtgactcagaggcgaggtagtaaagtccctggaagagttgccagagatgaggtggagaggccccatcctgcataaggaaagtccatttcattattttaaacactgctctggccagacagcttaccttctatttttgtccaaagattagtgccctctaataggagttttagccagaataaaacatttctctgagttaaaagtgaatattgagttctcatcgtttactttttagaactatttggcctttgtcttagtccattttgctgctataacaaaataccacagactgggtaatttataaataatagagatttatttctctcaattctggaggttaggaagtccaagatcaaggcaccggcagatttggtgtctggcgagaatggctctctgctcccaagacagtcttgttgctgtgtcctcacatgtcagaagagatggaaagaccaggcagctatctaagcactccaagggtattaatttcatttatgagggcggagttgtcaggtcctaatcacctcctaaaggccccacctcttaacactgttgcactggggattaagtttcaacttgaattttggagagggcataaacatgtaaaccatggcagccttggattggagtttgtgagtttgtaatcatttccggatcttagcttcagcaccataagcatgcagatgttggtatttctctctgcttgtggaccatccctgggtctcccccaggagatctagagctgccagcactggcttccaccctctgtaacggctttgaggtcatggctccttttgccatctctaaagagtgtgacccaaatgaggaatggccatgggaggctcaccaggcgcagaatttaggagagaaaagctttgccaagagtggtgaacagagctaggatgctgtgttaacatgccactttgcaatatttgtggttgtctgctgcattcatgtcccagggctgccagaacaaagtaccacaaagtggctggcttagaacaacagaaatgtctcagttcttgaggccagaaatctgaaattaaggtgcagttccatgctccctccgaaatcctgggagaatgcttcttgcatcttctcaatattctgtgatttgctgacagtcactggagtcccttggcttgcagctgtgatactccaatgtcacgtgttttcctctatgtctctgtcctcacatgccagtttcttacaaggacaccggttatattgaattaggagcccacctgtattagttcattctcatgctgctgtaaaggactgctcaggactgggtaatttataaaggaaacaggtttaattgacttacagttctgcatggctgagaaggccttaggaaacttacaatcatggcagaaggtgaagaagaagcaaggcaccttcttcacaagacagcagcagggagaagtgcaagaggcttatgaaaccatcagatctcgtgagaactcactcactatcagagaacagcatgggggaaactgctcccatgatccactcacttcccatcaggtccctcccacaacacgtagggattatgggaactacaattgaagatgagacttgggtggggacacagccaaaccatatcaccaccccacaacagtatgatgtcatcttagctaattacatctacaatgatcttatttccaaataaggtcacattctgaggttctagggggttaagcctttggcatatctttgttttggtggggaaggggaccaaaattcaaccagtaacaagtaccaaggaaggaactcagatatgggaatcatgagaatcttatttctacttttccatttgctttggagtgtttgaagcccagcggacctaaaattcacatctagacctagtctgtatgcagaatccactccatatggcatggctccttgtgctaaatgcaattgtggagccccttgttaaaaaattattaagcatttcagaacaacaactacagagcatttaaccaaaggcaggccccctctaagactgagccctgtgaggctgcacaggccacaccccagggagctgggcctgtctgctatcatgcagagggcaggggtcggggagctgaaaggtgatttcagcttttcaggttttaggtttgaactgctggtagcaggttgatggagatctgaggaccacttacattttctatatcatgactttgcttcaggcaaaaaattcatactagcaggagggaatctccagccatctgaaacacagggaatgctgcctacctcagagagaatcaatgagaaaagtagaggaaacaaggcataatttttaagtggctgcttatctttgttagggggaaaaacaccaaaaactatcttaagccaaagatagagttttttctgctaaataaatggcttttcactccatgatatatgatttataaccattttcatttgcttaagttcagcttccattttaaagaaaagctttagttcccaagtttccattaatacataccacactgtgtactggtataaattatgtgaaattgaattatttttcaataagctgggtttcataattttattgtccaataaattcaaagctgagattaataagtattctgttaaaaccagtgaggggataatttcattcccaagtagatagtgttttgtatgtccatgttcaaacatgatgcagaaattgagtcctgatttacctccccaccttgaacagctaaaaaacaggacaaaatacttgaaacaatggctttaagacatgggtcaaaggatactatgggaaattgaccctgataagaaggggaacaaaaaaagtgaactctaggattgctccagtttcctttctggagagagtccgtgggctgtgacacagggaggggacccaaacagagcscagctaattgcactgagttgaggaaacagaattctgagtttgggaagacaaaggtgctgaaattctcaggatggaataccaagaggtatgagaagagttgcacagagagagagagagagagagagagctctagtgatttgtagagggtcccaccaattcatcagcagagtactgacaggcacatgcctaagagcaatctactgaggccaaagaaaaaagctccaggaaaragcaggtgaaataatttctggtactcgcacaggccctgaaagagcaggtacagtgagaaggggacattgcctactgataaaggaattagtacctcaggaggagctaacagtttcaaatacctgtgcccctagtaagagaaattcagaatacatgatgtaaaaatccatgtttactcagagattttagtacccatttctcaataactgctgagacaagaagaaagaaaatgaataaggatataggagatttgaaaagtcccattaaacaagttgacctaattcatctttatagaacacgtcccaacaatgaagagtgtgttttctttgaaatgcatgtggaacatttatttactaagatagaccatattctgggcaacaaagtgttgctgagtttaaaagggttgttatgatacaaagtatgtgctttgggcataatggacttaaattacaaatcaataacattaaaaagtctgaaaaattaataaataattggaagttaaccaacacagttctaaataacccatgagtccaagaagaaattaaggggaaattagaaagtatcttgaattcaatgaaatgaaaacatgctgtatcacgatctgtggaatgcacctaaggcagtgcttagcaggaaagtgataacattaaatgtttatgctgaaaagaagaaaggactgaaatcagtaacttgaactttcactttaagaaaatggaagacaaattaaaaggaacagaaaacaacaaaattggaagcaggaaaacaataatcagtgaaatcccaactggttctttgggaaggttagtaaaattggtgaaactctagcaagactgattgggaataaagatagaagataaaatgattgatattaggaatatgaaaggggttattgttataggttctacagaccttaaaagtttaataaggaaatattatgagcaactctttccattaaatttcacaatatagataaaatgggcaaatttattgaaaagcgaaccagtaaaactcattcaagaagaaatagataaatgaaatagctctatatgtagaaataatttgaataggtagctaaatatcttcctataaagaatgctccaggtccaaatggcttccctggtgaattataccaaagtttaaagaataagtaatctcaattctacagaaattcatccacaaaatagaacaggaagcatttcccaactcatgtcatggggccaccattactctgataaaagcaaagacattccaaagaaagaaaactacagaccagtatctttcaggaacatggacacaaacattctaaccaaaattcaaatcaaaatttatcaagtgattaccacatttaatctagtaacacatatatatgttcatgtgtgtatgtatatatatatactatatatatatagtatattgatatactatatatatagtgtatatatataaaggataacatgaacaaatgtagtttatctcaagaatgcagagttggtttaatattttaaaatcaattttcgtgattcaccaccttaaggataatttcaacaggtgcactgtgtgtcaccatttcagcagatgccaaaaaggcttttgtagtcttacatattggaatcatctgttagaaatggaaaaaaaccatttaatataaactcaaaaataggaaatacttagaagtaaatttgaatagatatgtgcaatttcactacacagaaaactgtaaagcgtggttgagagaagttaaagagctagataactggagagagattctgttcatggatccaatgacaatgttaaatgttaattctccccaaatttaaccaacacagtttctccccaaatttgatcaacacatcttgagattcagtacaatcctaattgaagtcccagcaagctttttcatagagagtaggaagctggttctaaaatgtatatggaaatgcawaataccccttaaaatttgaaaaagcaggacatggagatcttaccctaccagatttcatgatttattataaaactacagtaatcaagatagcgtgatattggtgtaaaaatagacatttaggccaatgggatacactagactatccggaaataagtcccatgcctatgtggtcagtttatttttgacaatgttctaagccaattcagtgggaaaagtataagcttatcagtaatagttgctgaaagaaaagacagatggttttgtgcaaaaactaaacttctactcttacctcacacaatgtataaaagttaacatgagatggaccatagatgtaaattttagattgaaaattattaaacatctggaagaaaacatgaagaaagctgttagtacccttgtgttagaaaatgatttcttgaatataacacacaaaaaggtgggaactattaaaaaaaaaaccctgatagataaaattttatgaaagttgctttgatttgaccaaaattaaacactgttaccattcaagggcattgttatgaaaatgaaaatgaaaatgcaaaccacaggcaggaaaaaatagttgcaaatcattataaaatctgaccaaggacttttacttaggatatatagagcagactgacaacttaatcataagacaaataacaacaaaaaactagcaaaaccttcaaaaaatactttatcatggaagacagatggttggcaaayacatgaaaacatattcagtattactgatagggacaggaggcagggaaattctgggcagaagagggtggatccctggtgagggccccaccctcaagcatgaaactgtggcccaaagtgagaacatacatccctgttttctcgctggagtgttgccttttccaaaaccacccatgaccaccccacccctatcctgtgcccctaaaaacctcaagctctactggcagagagaagagaagcagctggatgtcagagactaccattgaacgttggaaagaagtgtcttgacttcagagggatagctgtctgacagtgtagctttggagaggagtccggctggggatggctggactctgggggaagattactcttccgctctgtcccctttcagctccccttcccaccgagagccactttcattggcaataaaatctccttcattgaccatctccgatttgtttgtgggacytctttcctcctgggcactggacaagaatgtgtgtgtgggtgcaaaaggctgtaatactgaccttccactgagctgttaatacttaagctgtccgcagatgacaaagctaaaagagcactggatgtaacactccttctggggcttcaggggtcatgggttacccactagatgctgctgcagggctggtacagagttttttcctgccagcgcccaaaagcattcaccctggctcctggacccgctcaccttcgtgctccatcccacgaggggttgagtgcacaggttcgagtgactggagttcaccccagctggcacggaagtagctggcagttccaacgcccacacttcagttcctgcccatgaaggggtgagggaaaaatcctgcttcatttttaactattaggcaaatgcaaattcagagcccagtgaagtactgctatgtacaatttagatttgctaaaagtcaaaagctgattgtacacaatgttggccaagacatagagggatgggtacaatgggcacaaggacacttttggggtgatggctgtgttctttatctcaattgtggtgatagtttcacaggtgtttatgtatgtcaaaactcatcaaattgtacaatttcaacatgtactgcttattgtacatgttgtactgcttattgtactgcatgatgtactgcttattgtacatcagttatacctcagtaagggtgtaagatggtgtataggattttgtagcatacaaagaatgttcacatttttcatttcaaactattaacacttgtcttcagcaggtgttgttcacatggtaaacatgaaacaaaacaaggctgagatacaaaagagatttggtgactcgccaaaaaacgtgtccaggctggaaaccactgcttcttccttctttccattcagatatgctcactccatcactcttggccttccctcttttttgcctttattgtgaagtagaataaagttactgagatggtctaagaaaatgacagtatttctatttttatcaagtttacttaaggaggagacgattccttgggcaaacacatattttattaatttttttaaaagattgtaaaatcagttgctgagttttaaaaaaattcagtctctcttcaatgtctttaacttaaaaaaaccgtacatggtttgtgtgtgtgtgtgtgcacacacacatacaatgcctaggtcaccaagctgtatttctttaatattcctgaaatgcgaaaattacttttatcacagtttttacttcctgaggagggacgtagccaaagaatgaaatattctaagaagcataaaaaccataaaacacattactccaaaaattgtggaacagttagataacttttgtttttgtaagcagataagccaaattccttgaagaaagaaaaaaaaatggaagatttattttaataaatcaaataatagaattgaattgtattgtattggcctagatacaaataaagagaccttgggaacagaatggagagctcagaaagagacttgtttatgtggcaggggtgaaattaaaacagcgagaacaggagggagtacttgatacatttaaaaaatgattgaaataaattaacaaaagaaaaaaattggctatcttttggagaaaatcagattcctacttctgtcatgtcatgtcttcatgtcatacaaattaaaaattcattaaaatacaaattagttaataatacaaattctaggtggattaaaatctaagaaaagcaaactagtaaagttttcaaaaaagtgcagagggaaatctcctcatgacgtcaatacagggaagaatttcctaaatatgcatgaaaagcaaacattttaagtaaagaaagaatgatgacaaataaatgcaaaagaaaagacccatcctaattcattctgcatatttgcagctacccactagtcttacacgcatgcatgggactcctggagacgtttgttcgtgtcagcattgtctattataggaaaggaaaaaaaggaataacctaaatggtaatcagttgggaactagataaatcaatttggcattttcatccaatgaaatactaagttagagtgaaaggaataaagtacatctgcatatatcagaagttgtcccatattcttttaacatatggggcatagtttaactgcagatgtagtaggctgtgtgtgctgcattcactgacttgcattccaagccaccttcaccttagagacagctttgaagaagatgggattcagaagctggatatgacatggatacttctttccttattgaaaattggaagccacccaggtcaagtgtaggacatataaactccacatgctcttaggatgtgcacacaaactctaagtgccatcataggctatttaataaatgcagaagcatgcttttataattgggagcatatctacctgctagtttctggtgtagcctctgcaggctttcctctgactatttgtgagtttcacagagaggaaaagggacctagcccatgcaagatggaagtgggattctacaaagcgtgtctcccacattgtggttataaagagccaatggtctcagccaagactctttcagcgtctgtgctgtgggaggcctgcatgggtccaaaatctctttcctagctttatagggaagatttgagagtggtgaattaatttactttcatccaaatgccaatttattattcaattgctattaagagaatgctcctatcgctaaccaaaatatcttctttctggtgttaggttacctgggaaacccattcagttgggtgtgttttgaggatcagatcagaacagaggggattatgtgttctccttgcgtgttttcttcaggctacaacagaatccgaggagtatcactgtcacactatgtggtcgctatgttgtgccacggtcttgggctatgttacgtgaagattctgtgagatcagtgtcagtgcttctccaacattctcaagtgaactgatgtaagctcacttacattaaatgtggcccagggaagagaatgaatatttttggaatactagcattgtgcttagccatttgtggaaaacctgggcttagttttggctacggcttttcttctcgctgcctgatgcctcttcactcatgacttaacacatctgccagtgggagaacctatccttttcatcatacgacataatcagaatttccagcagaaatgcccagcaagttctagattctgtgaccagcagggacagttcagggcatacaacagctcatttctaagtgcaggaaacactctcattgcatttaagctgttaattacatgaacatacttttccttaagaattcaaaacgatttcttatagttccaattggaaaatcatggccctgagagtagttggagaatgtgttgactattaaaataccagcttaggtttctttctcattttgagccaaactctattttgagtataggacattgtccacgtgtgtcaatagtaggaccaaacagggctcagctttactcacgatgctgggatgtttacattcaacagaatttaacatcagacttgggcatttatagctgttagacatgaacaaagttctcagataactgagcagttttttcccacccaacagtgactttataatggtggacttctgtagaatgaaggcactgtaaaattttagaagccttcagaaacctcaacattttagccttggtttttgagtagagtcagaatggagtgaaaatatagtcagtttccattatttgcaggttccatatttgtgaatttacctactctctggaatttctttgtaactccaaaattaattattggtgtcattcacagagttcaatgataattaattaacactgtattaaatacagtatctttaaacagacgcacacataaaacaaggttctgcattgatttgttgacgaaaatattgtgaccaggggtgcataggaacataaccctgtatttaatgatcagttttctctaattcagtgtccatggcaactttatagacataactacctcgagtaaaaagaattgaccataccttagcttgggagaagtgaacaatggcaatatcaataaaataacctatggaaatgacattgcagttgctgacttcacattctatctctatcgttgccttctccaccttcatatctgatgtagtgaaacaatatatgccttggcttcgatgtctctgtgagttgtgtttttgtcccactcaacaatttaagcctattgttgacatatagtaaaaccgtgattgtattagaaaacctgtagaacaggtccatgccaaggattaaggaatttcaggattaaaattctgagacaaagatccctaagtccgcatgtctttgataaatsatccctggatgttgacagtgacatttgctcatcagccaccagtgcctttggcaaggaattgcctgcaggtggcggatcaggtgacgcatcatcgcggcactcttgtgggctcctgagacagccatgtaaagagagcctaaggataacatgccaggcgtgtgcagcctgttygggacacttttgtgatgggagtgggtctgatccagataaaaccactgcctcttcctcagggcgtgtgctagggaatcttttgatgtcaggccagctgaacttgttggagccgagccaccttccccatgctgagtggtgtgaaatcagctccaccttcacaaggggctgtttctgtccctccagtggtatttaaggagagaagggaccctctaaaggggccaccaggatcaggcccagctctgctttgtaggcaccagctgtggggcccgtgcttccctccatcatgcagaaggttgcaggaactcaggccaggaggtgtcattaggacacattacaatgtgctggacaggacttttacaaagtgctggtgttcaacagcagcccatgcatgtaagggattggcttatgggtgctcagcctcccctgtgatctttttcagccccctcaagctactacagagctatgtaaaatgatggtattggctttgcaaacccaactttaagacatgttccagcctcccctcccgagacaggctacccaaggcccctgcaggaggaaaaattggggagccacagaccacacgtgttaacgcacactgctgtgaggagttcggagtggaagttaagagcacaggtctgcaatccactgaactaggccactttcagtgtcaccgtgcacacgttacgaagaccctggtcagggaaaccacttgtcctcagtttcctcatctataaaatcataatcataacagcagcagctcagagggatgtgggagatttgcaaagatagttcttagcacagtgccgggcacggcgtgataggtactcgggaaattttagtgattgcaatgagtcttccagtgtcccagagtatcttttcctgaactctgaatgtggtgcagctccttcgttcaacaggtgagtaataaagatactgataccaatgggatctaggctgcatttgagttactttttaattagcactttgaacagtatttcttgtgcaaaatttatgtgctgaaatcagaaagcacaagaagagtataaacttttgcagtaatgacagcagtgtgcaaattttgaatgaagcacaagtctcagaatatccctttcctttgttcttctgaccctgttggcaagatttttgtgctcctgtggtctggccaccatttcttagactaaaccctgtgcaatgatcatcttgataagaaaagaaaagaaatgtgtggcattttcatataactcaactcactgattacaatctatttatttcccttttgtgtggtagcctggctggctagaggcatttcttacattgttgtaaatgtcaactccatttcagccaagaaggtccaccggaagattccagatggaaaggtggtggacaagatatttttgaaagcctcaaaactgactccccttctccttgttagggcattgtgcttacccaccgttatttatttcagttcaacaagtaattatggagaggctaggccctggaattagagcaggaaacagaaggaatgaaacctcttgccctcatggagcttacactctaccaggagaaggagcaaacataacatgcaacgcatcagtaagttttatacttgttagaagatggagagtattgtgggggaaataagtgaataatatgagggagactgcagtgctgggctagcagagagagggtagcaatgatgacttggatgatgtaggagaccaacatctactataaagagagggmctcaggggtgtggctgtggtttagggggacagcagggaggtgtgagtgctggagcagcaatagccagaaacactgaactctgagtttggttttactgcttgcccgctgtatgtgacttaatttctttgagcctcagtttcttcatgtgtaaaatgggtataatgaaacatcacaggtcagtttccagatttgatggttaataaatcctttagtatttactgcatgtgtcacagagaaaatgctgagtgaacagtcggaggttctgttaggagcagcagggtggcatttgaagggcctgattctgccctgggctgtgaggctggccagctgatgtgagaaccctcagggtcccttggtttgagagaggacagcaggacacagcacgttgagcagtgctctcaggccagctcacctgggagcaacacaagggtcatgtcctcatttcctgtcttttctctcccaccaatgctgcaaaatgtaccagtacctggacactgtgagtgcatttctctgttgttggtgtgaccacagagggaaagcagaattaggaagacatcattgccatgaggtagactttcttacgtatgatcttttatttttagaaaatcattttataaagaagtagagtgtattagtctgttctcacactgctaataaagacatacccactactgggtaatttatgaaggaaagaggtttaattgactcacagttttacctggctgggcaggcctcacaatcatggctcaaggtgaatgaggagcaaagacacgtcttacatggcggcaggcaagagagcttgtacaggggaacttccatttataaaaccgtcagctctcatgagacttattcactaccatgagaacagtatgtggggagaccaccccctgattaaattatctctacctggccccacccttgacacatggggattattacaactcaaggtgagatttgggtggagacatagccaaattgggttaagatacacacacacacacacacacacacacacacaaaagtatgtgtgtacatatacattatgcatatagtaacctcattaatattaactattctctattagaacacttgtaatttattaagttcatatcaaacaaaatggaataatggtaactactatcaatgagaaagtgtcacggagaaagttccagagtccatattttatacacaatccatctgattgtagaagacattgtggaagagtccagggcacttcatgtcatggatgaggatggagaagagcaggaggagctaagctggctgcaagttttgaatgtggcagagaggagaaatgggagacacaggtgggagggagtgaaggagtttaccactctacaggtgaagaattccgggggtgagaggagagttcagagctcaagagaaaggttgttttaaaagtaaacctrcgattgttccaaagctgtggaataagatgggtgagaagtacagagaagaggggtggacagcatccacatcacaggagaagttccagctatgtgtagtgactgtgatgtcaaagatgagagaatttaaaaatgataagaataatgaaagatgtcaagaagtcctaggtctgaggagagggtgctcaggtttggcttaaattcaagttgttataatagagtggacatctatccagtcaagatgaggatttcgtcatgcattacttttatatttattaaaaatgagccctcacttagagatcgcattaaattatatagcaaaggatgttcttgattttctttcacagggagctagatgattcactgaagaaatacactgcgcgcactcagcttttatgattatgctctaaaatgtttaattgcagaagcctttcaagtattttttccctaagctactttaaaaaaaatcttttcattttgcgtttcagagttgaaacatgcatttttgcagatgaatgattaacakgacctattttatcctgaacattttgagtctaggccttttgcacgcacaagctacatggaaacagcattctctgtcccttattcagcctaattcagcccttccagagtcccccaaacaccaccatgttgctttataggaggaaacacagtgacagatccgctaatgaggattaaagatgccagtgatccttcatggtgagaaatttcttagagataggaaaaaccctaggaagcagcagatgattttcaaaatgtcaaaaacagaatttatgatacaaaagaaatcaataaatgctgacatataaccatgtcggataagccagaaaaagagcagtgtggcccaagagttgagcagaagaggcagtcacatggagggttatgaggggctgagccaaagaacccactggagctagaacagccctttgaggtagaagatgctgctgtctccacgttacaggtgagaaaaccaagtcataggaagttagcgcaggcagggaacggagctgcagaaattgaacgtggttttgtacctttggaggatgggagctcagccagaggctacagtcagggtgtagagggcaggacggttttggagatacgttcttaggaagaaaggaattttgaatgcctgaaaaaaaaatcaagtgactgagggacacaaacttcttgacttctggggatttccaaggtttggagttgaggcgtccagcaatgtctggtcaactgtccactgagagtagtttggcaagactgatacatgggagacggaatggaattgcagcagcagccattgtcacaacctacttcctgatggctgaaatccctaaactggggtataacaagtatcaattaatgccttcgagtgaagatgcttcgctgagtgatactgcatgtcatattgatgaaatttaattatttttagtgttttttttttaaataatcagtcaatataaaagttaatggacatgtacacacattttcttgacttgatgactaggatgatagcgtgctggtaaaccacctgacagaggaaaaaaaataaagaaaaaaagccctgatttatagtggttgctgttttccaaggcataactatgcccccatggttcatttcaagctgccactggctcccaaaatgcttatataaccaccatgatatttgtgatggttagttttatgtattaacttggctaaccatagtacctcataattcaattaaacacacgtctaggtgttgctctgaaggaattttgtagatatggtggcacatctctaatcaattgacttcaaagaggtggttcttgaaattctgggtggacctcaccccatcagctggaaggccttaagagcaaaattggaggcttcccagagcagaagacattctgcctcaggtctgcagcctcagctcctgcctcagtgtgtccggtccaccagcccgccctcgtcatgttagacttggcaaccgccacaattacataagtgaatcccttaaactctctctgtttttctggtataggtcctattgattctatttctgtgataggaccctgactgatacaccattatcacacttaacaaaactaaccatgtctgcttgctgtgacacaatccagtctatactctgattgccccagttgtctcaaaaacgtctgttgtttgcatttggtttgatgtagtcaaaatccccattagggacattaattgcatttgcatgttgtgcctcctgtgtgtcttctcatccagactagtctctcctcttttgttcctatccaacttgaatcctctaaattgctcatcttacaagctctgtcttgggctgtgcaatgcctcacattctagatttgtccatttgctatctccttgggcttttagcttgtgtctgggtctttgtactgaatatgttctgtaaactgagcggtacctstaatggcttcattagatttggtttaacttttaatttttggaggcgaggacaaaaatgctaccctggtggtgtgtgttcccctggttgtgatcaggagagatagcgtgtctttctgtcccagtcttcctgggactgagatagatcagtggactcagagggtgacaaactgatgcctccactgctctttctctcactgccctttcatttcttggtttcatctctcactcaccctggtttggactcattatttcatttgtttctctacttttcttgaaattatcctgtaaggaactttcacttatgagtagggctaattagtttatctgaaatgaaacttgaataggaaaataggaataaattgttaactttctcaacaactgctaattttcagagtaaggaatctgtgccctattactcggtgattaatttttctggggggagttgctttctttttggagggcatcacataaactcttggattgatactcctgaatattatcctaaatgttcttatgtagttgatgtgtttctatcagttacagccattatttttgatgctcaaattatcccttctttggctagtcagagccccatgacgttcacttctgcatccttggacacagcctgttagtctttcttagcttttggatttctgcacaacaaaatacccctgacacaccctccatctttccttttccacagcagggatgggaatggtgtttaaggagggctcattgctccatgtcattgttttcatgtatttttaggagacagaactagaaacgaagtgtttttgaagagaaagagaccatgagtttatgctaacatttcttatttaaatttaaaattatgagatcggaacttcagttttatgcctgaatatactcttacatttaaaatctacgtactcaacaccttwaaataattatttattcttgttttattgtggaatacaaggccgggcgtgatggctcacacctgtaatcccagcactttgggaggccgaggcgggtggatcacgaggtcaggagatcaagaccatggtgaaaccccgtctctactaaaaatacaaaaaattagctgggcgtggtggcgggtgcctgtagtcccagctactcgggaggctgaggcaggagaatggcgtgaacccaggaggcagagcttgcagtgagccgagatcacgccactgcactccagcctgggcgacagagtaagactctgtctcaaaaaaaaaaaaaaaaaaaaaaaaaaaaaaggatacgtatgtgagcacgtacacatatttatatataatatacatttttgaaacaccagtattaacactaatactatgaccactgattgagtgctaagatttttttgttgctgtctccattctaaggmtgcatttcacgaaatacatagggtcggaatattgtgttttaacatcccttggaatattttcttgctgtttttgtgattctccctgatatatagttgtgttgactttgttttaaattttcagcagttttcatctgtaaaacttagattgactttttggatatataaaatgcataattccaaacttgtaactatatggctatctatatataatctcagagagatttcaggtaaatcttcctcatacctgctatttttgtcctgttctcttcaagcyccttttggtgaacagttctgctggttttggtttttatctcttttttttttttttttttttgagacggagtctcgctctgtctccccggctggagtgcagtggcgggatctcggctcactgcaagctccgcctcccgggttcacgccattctccagcctcagcctcccgagtagctgggactacaggcgcccgccaccacgcctggttaattttttttgtatktttagtagagatggggtttcaccgtgttagccaggatggtctcaatctcctgacctggtgatcctcccgcctcggcctcccaaagtgctgtgattacaggcgtgagctaccgcgcccgggctgtttttatctttttagttactccttttttttcctcctaaaggatattctatagctaacactctgtatcaatatacagagctcattttttggctgcatgtttcatttcactgtttatcttaattcattaatcattccaatattgattgacattggagttattttcaatcttttactcttagcaatgctacaatgaataattttttccatttttgccggtgtatctttgggatagtctctaaggaacaggatttttagggcaaaggatgagcatgatattgctggctattgttcattttactcccccgggcttggactgctttkcttccccagtagtgcctaacagtgcctgggttgcagcttgccaatcaggtgagtgcattatcacacagttagagaaacgacatcccaaggcagatttgatttgcattttgtttgttataagtgagcttgagcagcttttcatgtgtccaaaggacatttgaattttttctcctctccactgtttgtttgtggtcttgcccgttattggattaggttgttctccagttttaagagttctttattcatagggatatttgtcatttacctttgatttaagttgcaaagattttccccagtttttaccttgtcttttgcattttggtgtgatgttttgcatacagaagttctattttaagtttttatgtagttaagtagatcaatcttatagtgtgtttggagacatatttaggaagtctgtttcccctcactcccactgctrggttataaagcagtgcactttcatgagctcagttttacacttagattactgattcatggggcatttgtccccgtgggaagtgtgacatgcatatccagtgtcatctttatctatgtggctacccagctggcccagtgcagtttactggaaggtcaccctgctttcctgtgcttcatctccacttgcactcaggtcatttcatcgatttcattttcttctgttagcctctgtgggtgccaggaccaccctgttttatttttggaaattatatgtttaatatctgctagatcttttataatattacacattttataatggacttcctaccctcagaaaaaaattaaaacatgtagatgtttttatggggattgcattaaaattataactaaacctaaagagaagtggtgactttgtgatctcatmcaaaaacattacattttccatttatgcatgtctacatgaatcattctttcaggagtgttctaagttcctcatacaggtttaacacgtatctcatttatgtgcctaagcattgcattttttatcattcattcattcaattattttattatgtaaaagatattttctagcactgtgtcttctttttttcatatttttgttttaaattgggtttattgatttttctctcttaaattcatgttctgctatttgaaagaatcctcatattgttttcaacagtcttttaatgcacttttgaatcttcacacagttttatctgcatataaagattgttttatgtcttttctccttcaattctggtgcttctaattgctttctcttgtctcattgcatcgtctaatacatccattaccatgtttaataatagtggcgacagttggcatctgtgcagtttttctcactctagtaggaatctctccagtgtttccatattaagtaagagctggcatttggactaaaatttttatatttacataattacattcaatgttaagtaagcatccatcaactcctcttttactggatgtttttataaagaattgttgttgtattttgttaaatgccttttgatgtttttggaaatgaatttcatagatcatttaatatcttcaactatatttaagaaacttgattgttcgttgtagtctctggcattataaagcacctgtatttgttttattttaaataatttttattctaaatttcatgatgtgtgatatcaaattctaacttcagattatattttattgcttttgcctggtaatttcttttacatttctttgtttttaagctttctgggatatttcaattgtctttgttgcttgaggccaagaattcaagaccagcctgggccacagagcaagaccttgtctctgaaataaatacatacatacatacatacatacatacatacatacatacatacataaatgtgagtctttggtatacagaatagagttattgttttgtaacccgaaagtcttgtttttataggtgagagagggccatttgcatttatygatgcagtcagcattcttggtctcagttctgctgtgagtgaacacacagttggatccatacccacgtgtgtgcacagtatagatacatagtcttgccatgyggtctatttgttttatttgcttattttaaaaggggagatggtttcttttggcacttagaaagaactatatttttcttttgcatttgccttctgtgaatactcttctacaatgttcttctacaatacctctttgataggactattggcttcctgctcttataagcactaccaaaattaatgagtatccacagaccctgccctctcatgttaagttcatccttgaattctgaaggatgctgcttgttttgttagctgcaggtgacgcatgtgtttcttcactttcggagtgcgtcacagttacgctgtctgtcatcactctttcccttagtcggtcatctggtacaagggctgaagttaaataggctcagtgcccaccacccgaccttactcagaagcttgttctggggatccctccagaacaaaatcccccaagctcttctgcaactctcgggtctctcctgtggtctcacctctaatttaggttcttgatgtctctggcctggacggccctgcacrctgaggtctaactgcctgtgaccctgcctggccacggctattcctgcccctcagaggaaagggcttgcagcatcatcctggcagtgggcatcatcctggcagtgggaaagcaagtctctyatagggatcccttcacttcagaatctggttcagggaattgagatcctggacctcagggcctgtccagctctgtgctggtacagggtggcttccaggtctggtcaggtaatctccacacctcccccwacctcatgtgatttctgtttttcagctttgtttgtctgcctttcttctagcagaaatgttcactcccacagcctgcagctgggcagtgagtgggaagccagggggtcctgcacagtgaagaggtcgagaggcaggaggaggctattctgagagcaggaagagatcagcacagtggggagctggatcttgcagatgaggggcttccagggccaaaggtggaagatgctgttgtaccagatctcagcagaatttcttgcactcacagttggtttaacggggaggctggagggaaaatccagaagaaaagtgtccaaaaggccggagcagagcctggggaggggcttacaaggagcaggacctaatggggctgcagaagcttttcctgaggacctggggcttcctaccgaagggagggggcagctgcagagcttggccaagacttccacagacacggtgaccagagggtgtcccttgaagaggcctcccaaatatcttggcacaagcacccctctgaagttgctctgcttacaacaggccctcttgtgtgcaaaccctgtgtgctgtctggggacacctggaactctggcttcttctaatcccacaagaccctgaggtagggatggggtctttctggttattgcttccctcagctgcagctctggagctccttcaatatgaagagctaagtaccctgtcctacttgtctcaaaggagttatcaggagaatacattaaagatgcagaagggtctctgaagaatgtcgtgtgccagacccaggtcaggtgctgtctgtccttttccctcgtgctcagagtttctggtgcaaaaagattctcccctgagtctctctctgtgtagcagatggctctgacttattttatgtaaggcctgtaacagctgtaggtgtgttggtgttgatcagattcattcattatttttttttttcatcaacttttaagttctggggtacatgtgcaggatgtgcaggtttgttacacaggtgagcgtgtgccatggcagtttgctgcacagmtcttcccatcacctaggttttaagcccagcatccattagctgttcttcctgttgctctccctcccctaccctccaacaggtcctcgtgtgtgttgttcccccacatgtgtccatgtgttctcatcattcagctcccacttataagtgagaacatgtggtatttggttttctgttcccgagtttgctgagaataaaggcttctagctccgtctatgtccctgcaaaagacatgatcttgttcctttctgtggctgcatagtattccatggtgtatatgtaccacattttctttatccagtctatcattgatgggcattttgattgatttcatgtctttgttattgtgaatactgctgtaatggacatatgtgtgtatgtatctttataatagaatgatttatattcctttggggtatatacccagcaatggaattactgggtcaaatggtatttctgcttctagacctctgaggaatcaccacactgtcttccacaatggttgaactaattgacatttccacaacagtgtaaaagcgtttttttccctctgcaaccttgccagcatctgttgttttttgactttctgataatcgccattctgactggtgtgagatggtatctcactgtggttttgatttgcatttctctaatgactgctatcttctcaagttcagaatctcatgaagcaaatccatcaattcattcaatccagaaaaaccaatttttcttttaagaaatgttgtcccccaaaatagactgagaaacaaaaacatgattcttcttaaaatgagtacttcaaatgtgttttcagtgtattctgtactatttttgatactggggtgaacaaaagagcacctctgccttaccttttcctatgcagaactctatcagcctggtactttttagtttaaaacagaacaagaacaaccaagaggtgccagcttcactttcaggctgtgctactaaatatgaatagccaaaaaatacataaaaataaaatggaatatctgtattcccctattgtaatacataatgactcactataggagctggaaagaaaaggagttgattttccacactggcaacaaccaactccatatacagtataggcacacctcatgtgattgtgctttgttctattgcacttctcagatactgaattttttacaaattgaatgtttttggcaaccctgtgtcaacaaagtctgttggtgccatttttccaacaacctgtgctcacttatgtcactgtgtcccattttagtcattgtcacagtatttgaaaagtttcattattatggtatctgctatagtgacctgtgacccatgatctttgatattattttaagtgttttggggcaccacgaaccgcagccacatttgacggtgaacttaatacatgctgtgtgtcttttgactgctccactgaccagctgttctccatctccctccctcttctcaggcctccttattcccagagacaygacaatatttaaattaggccaattaataaccctacagtagcctctaagtgttcaatgcaaggaagagttgcatgtctctcactttaaatcaaaagctagaaatgattaagcttagtgaggaaggtatgtcttaagtcatgataggccaaaagctagacctcctgcagtaaacagttagcccagttgtgaatccaaaggaaacgttcttgaaggyaattaaaaatgctactctagtgaacacgcaaatggcaagaaagcaagtcttattgctgatatagagaaagtttgagtggtctggctggaagatcaaatcagtcacaacattcccttaagccaaagcctaatccagagaaaggccctaactctcttcaattctatgaaggctgagraaggtgaggaagctaccaaagaaaagtgggaatctagcagaggtggcttcatgagatttgaggaaagacatcatttccttaacataaacgtggaaggtgaagcagcaaatgctgatgcatgttatctgaatgatctagctaagatcattgatgaaggtggccacactaaatgacagattttcaaagtagacaaaataaccttctgttataagaagatgtcctctaggactttcatagctagagagaagtcaatgcttggcttcaaaggttcaaaggctaaatctcttattagggactaatgcagctggtaactttaagttgaagccaattctcatttactattctgaaaaatccaagagcccttaaaaattgttaattttattgtgcctgtactctataaatggaacaacaaagcctagaggacagtgtatctgtttacggcatgctattggaatattcatgagctgcatgaacttaaaatatttctgaatattttaagcctactgttgaggcctactgcttagaaaaataaaaagatgcctttcaaaatattacttctcactgacaataagcctgatcacccaagagctctgatgcagatgtacaaggaaattaataccattttcatgccagcaaacacaacatctgttctgcagcctatgaatcaaggtgtaatttcaactttcaagtcttattacttcagaaatacattttataaggctatagatgccatagacaaggattcttctgttggatatgggcaaaataaattgaaaatcttctggaaacaagtcaccattccagatgccattaagaatattcatgttcatgggaggaagtcagaatgtcaacattaacaggattttggaagaagttgagttcaaccctcatgggtgacttcgtctttgttcaatgcatggaggaagtaactgtggatatggtgacagcagcaagagaaatggaatcagaagtggagcctgaagatgtgaacaaattattgcaatcttatgataaaacttgaatggatgagttgtttcttatggatgagcaaagtagtttcttaggatagactccactcttgatgaagatgccataaacattgttgaaatgacaacaaaggatttataatattacagaaatttagttgataaggcagtgacaggatttgagaggattaactgcaagtttgaaggaagttctagtgtgggtaaaatgctacaaattagtatcatatgctacaaagaaatgtttttttgaaagaaagagtacatggatgtggcaaacttaattttgttcttattttattatgtctttatccttttaaatttttttttatttcaatagctttaggggtaccagtggtttttggttagatagatgagttgtatagtggtgaagtcagagattttaatgcacccatcacagaagtaatgtacattatacccaatatgtaggcttttttgttttctttttgtttgttttattgagatagagtcttgctctattgcccagtctggagtgcaatggcacatctcggctcactgcaacgtccgcctcccaggttcaagcgattctccagcctcagcctctcgagtagctgggactacaggtgagcaccaccacatttggctaatttttttgtatttttagtagagacagagtttcaccatgttggccaggctggtctcgaactcctgacctcaggtgatctgcctgcctcagcctctcaaagtgctgggattacaggcatgagcaaccgtgcccggcccccaatgtgtagttttttaatccctcatcctcctcctgccctccccatttctgagtttccaatgtgcattatatctctctgcatgcctttgcacactcatagcttagcttccactgtatgttataagtgagaacatacagcatttggttttccattcttaagttacttcccttggaataatggcctccagttttatacaagttgcttcaaaggcattattgcattcttttttatggctgaattgtattccttggtgtatgtatatcacattttctttaaccactcatcagttgatgaacacttaggttggtttcatatctttataattgtgaaatgtgctgtgatacacatatgcatgcaggtgtctttttgatataacttctttccttttccatagatacccagtagtgagattgctggatcaaatggtagatccactttgaattctttgagaaatctccatattgctttctattgaggttgtactgatttatattcccatcagcagtgaataagtgttcccttttcaccacatccatgctaacatcaattgttttttgactttttaataatgactattctggttagggtaatgtggtatctcattgtggctttaatttgcagttccctgatgattaatgatgttgaacatttttttcatatgtttgttagccatctgtgtatcttcttttgagaaatgtctattcatgccatttgcctactttttaatgggattatttgtttttgtccttgttgatttgagttccttgtagattctggatactagtcctttgttggatgcagagtttgcaaatatattctcccattctgtgggttgcctgtttactctgatgattatttcttttgctgtgcagaggctttttagtttagttagctcccatttatttatttttgtttttgttgcatttgcttttggggtctttgtcatgaattctttgcctgagccaatgtccagatgagttttttctgggttatcttccagaatttttatggtttcatattttagatttaagtctttgatccttcttaagtttctttttgtataaggtgagaggtgcaggtttagttttattcttccacatgtggctatccagtttacccagcatcatttactaaacgttgtgttctccccctgatttatgttgttgtatgctttgtcaaagatcagtgttattgtaagaaattgccacagccacccccaccttcagcaacaacagttcttgttactggcggtgaatccctgtgtgtctgcagcagcctcaattcttgcctcctcagaagaaagaattcgacttaggaggcagaaggcagaaggagagaccaaggtaaattttagagcaggagtgaaattgattaaaaagctttagagtaggaaggaaagacgggaagtatacttggaagagggccaagtgggcgacttgaaagacgagtgcacggtttgacttttcgacttggggaagtatacgttggcatacttccggggtcttgtgtcccttctcccctgattcttcccttggtgggcagtttgcatgcacagtggcctgccagctcttgggaggggagcatgcagagtgtgtttaccggagttgtactcatgctcacttggggccatcttcccttatcagctgaatgttcctaggaggtcatataccagttaaactccgccattttgcctcttaaatgcacctgtgtgagcccactcacccgactcctgagatcttattaagaagatgctgatcaccagtttcaggttttttctatctacagggagactgcttttccctggtgctggctgcaaccaattattattttagcgagacagttaacaactgcctgaacatcacctgagggtcacctgacatttctagttgggtggggggtgccctctcctgccctgttcatgtctgaccagctgtcttctgtagcaccttgagtcagcggctgtcaacactgaggcaagacctttcatcagcaaaaagtttatgacttgctcaaggctcagttaacagcatttttagcaataatgtgcttttaaattaaggtatgtgcattctttaagtagtgctatttaggctatagtatagtttcaacataatttttatatgcactgggaaactaaaaaattggtgcgactcactttatttcggcattctctttattgcaatggtgtggagcccaacctacaatattagtgatgtatgcgtctatttacttttcaattcccaatggagaaaactgttttcagatgttttagaatttaaagataaatttatccttgattcctatcttgctgcctcttccaaatattggtgaacacttcttttttcatataatctggcaaaagatttttatagaagtatttattcatgcaatgttataaaataatgttttgtggcaaaaattataatgtaagtaccttaacatgcaatgaaggaaacaaaactcacagagaattccaactctcagagttgacactatgcttgttttggaagttcctatggggtgttttcttttcatttatgatgtatttgagctcatattgtatcttcaatttagtagcttgcctttttcacatgtgtttaaaattcttagtaaatgttaattttttgtacaatatacctaactctcctttggtttttagatatttaggttattccagatattctcattattataatcatgttgtgataaatccccctcatgcatagagcattttttatgtgctttttgatagttatttttcagtattgaatgtaaaagtgaagttgctagtccgaaagagtgtttatacggctatagagtagacatctaacagctttgccagaactttccacattctataccccacctgtgaaattgggttttcttcttttctcgctgcacaaacttagcatactgccatctttcctaggttctctttgtgtgttgtatattgtaatgaatgtcagcttgaaggatacaacagaagaataaaattagctaaggcaccacagttagacttacattgctgtcactgttgatattttgttagtaaagagaggctagacttatgctgctgtgtgaaaacacaagttagatttaggtttaaaagtctgtctgagatgctggtcagtgatcacacactcttccactaaaatttgcaacacagctgatgaaagtctccttaaactatggacatttgagggaaaagttctcactaaatgtgatatcacacattattataggggatcaaggttatgtgattacctattcaatcaaaaacataatcacaaacttacataatttgttttaaaatatcacttattatatattataaaacatgtaggaatataatgaatataataacataaaaatgtacataytataattatgtatttgttatattacatatggtatatgtatatatactgtatatattatataacaaatatataattataatacatacattttgttatatcaattattaacataattatattatgttattataatatatgatatacagtatgtrttatataaaaatatatacatatatactatatattatataacacatatattcttattattataatatatttaattataatggcatactacatatttataataatgtattatgtacattgttataaaattgcataacatattataacaatgcatttatataatatataagctatataagttattaggaaagcatagtaggaataacattttaaataaaaatttaaattttaaattttaaaattgtaaatraaaattttatctgccactttcatctttaagaaatgaggccttgagataaactattttatagtgtctgtaggaaggaaagtagtcctattatataaaaatagtggttgctttaaaattattcattagctatatttatagtttataaaataatgaaatttaaaattgccttaaattggactaataatcatgagtttgaaataaaaacagaataaataatgttcattttaaaagtaaaagtcagttttctagattatgaatttggtattgatktaaatgaaatgaatttacattgaagaattgtatgtctttagggattcagtgttcagtgatgatctgttggatgcacagattgaaggagactggatagaaatagcttcctgtgcctcaaaaaaagtcaggaattactgccaggaaaactcagagcttcagagactgcaaatatatttaagttactgaagtaagacgcttgaaatgaaaatgtgtacactccataaaccatggatggcatcaataacatgaatactatctgaaatattattgcgatcaggctcaagaaatacatgctccacttgctgtgatttttaaaatttaaatattgatagtatatggaaatactgcttattcttgctataatatttaatgtgattcctattctttacactgttttaaaaaagctttaggatcataaactgttgtattgggggtaattcatgaagtcttgatgactgtaggaggaataatctattgttttccagtttaatgttcatgttgcccagcatgtctgcttaatgaatataattccttttttatattaaaatctgataggacttcgtactctaataggggttttaaaagagatgtgtttattcttctagttttataagaataggattttgtaagggagggaatattttattctcattccgcttgtttgtagaaaacagtgattgtcaatgtgtggggccaacaccaataacttgattagcaaaagctgggaacttgttggaaatgcaaattctcaggctccaccccagaacaactgactcagaaacttaagaggaggtcccagcaatcttcatttaacaaactctacagatggtcctaatgcacaggacagtttgagaacmaagaatgttgaaattttttacagaatgtccctacttgaaatttactatactcatctgcattgaggcttcaggttttaggagatagattgaggttttggatgaaaacctgccatatcagttagctttagtactataacaaaccaccccagaaattagtggttaaacaagcatgcgggcttcccaggtgattcctctggcctggctgggcttcctgtgcatgtggtcagctgctatttagttgggtgctggagagctcagggtgccctcagctgcagagcctggtctgtcccatctgtggcctttcttcctgcagcaggtggctccaggctcttccaggattcctagagaatggaaggcgcattcaaggcctcagaagccacctgtgctccttctgtccttttctgttgactaccccaagattcaaagccagcccagcatcaagcggtggtgggaaggactccacctcttcaggggaggagatacaaagtcacaccctaaatgggacaaggtgcagggaggggataacgtttttgcacacagttgcccacacctgcagatcaggatcaaggctaatgctctattggctaaggaattctggccctctgttctgtagtccattcagatcaagagtggggaccaaaacgcttcctcatttttctctgaagctgagaagtaagaggcaatcggtaaaacagaacacagtgtgttcgtagttaccacgtcgtcctgttatcagtgaggatggcagtcaccatgtttgcaaaagtaaaataaatctcaaaayttgactaataatagcagacacaaaaaaagtagaatccagtacaaatatgccttttatttcaagcatagtttcctcacttttggccctggatttcctgtatgatttctcaaatgtattattctaaatgatgacctgcacactttgtgtagaggtttcttggttttacatgtcctcagggatactgggggaatggtggtatataatagtcatgaatagacttgagtaatgtatagtactctgataggattctgctgctgcttacattatgacagcatggtaagtaaaagaacagaaaaagagtgggaaaaatatattcttaattaatgaactttggaccaaaaaataatagagtcctttatcttatttacaaatacaacagttttgaatagttcatgttatactttaaattattaatgagagtaatgaacagttttgtagagtaatgtataatgaggaagcaatattaacttgcattaacttgcagttatttagttatttatataaagcagttatttgcaaatcatgatcagatatatttaactaagatataatttatatttttagagatgctcttttatttttccctccaatatgcgtttaggaaaaataaaacatgtattctgtgataytgtcagtctgctctgaacttcagctttctcgttcccaagttctaatcatttccagctggcgtatgttaatggcgtttctgtctaacattgtggctctctcaaagaagtacaagaaaaagtctcttcccacagggagtttgataccatacaacacagatatcaccattatcacacaattgtaaagcaattacagaagtcaagataatatggcaaagactgtttacctaagactcgatagtacacaaaacaaagaacacatgggctactaggcaaacagttatgtggggttgactttagcctgaaaaaaagtgttctgattgaagtaatggcacgtcacacaagaagggctgatagagggccgctcattaggatggctgctcacgggactggccagaatgactttgggtggcgtatcaagtgtccattgccacaattatgctgtacaaccacttgccccaagaccaatggcttaaatcatgaagatgcgtttttcactcaggtctgtgcgttggctgggatttggtgattgtcagctgcccctcactctaggctgtaggtgggtgcggatcttctgacatacttctgttttccccatggaccgggagttccttgggggatgaccacaggaaaaggaccaagccaattctgcaagcaaatttaagccactgtttcatcaagtccactagcaatgcattggccacagcaagtcacatggcccaggcagacctcagggtgctggagtgttctctgcccattgagggagctggagcagagtgaacacttgcctaaccccagtccaaaggattgtaagtaggatgagaacagtcaggggtgtcttgcggttgctgtttcttttcacggatgtgcacaggtgaatgtaaggtttattgtcttctcacattctgatggttaacatcaaacccacagctcacgtttcgaagacagttttgagatttgcttttcctagtaattcgcctccaagcagtgggtcttgtttagtagggacaatcttgaaatggctaaatttcttctaagaacagtattggcaacttgaagagtcgttgggatcagtgttatgttcttgccttaactccaaaattaaacgggttatagttattgttgtgtatatttggtaatgtacattaaaaataaaaacctctagacatgacacataacattagcaacatataaccttaataagtcaaataaatgaactatctagcagtttaagaggtaatttttttttttttttttttttttttttttttgacgggagtctggctctctcgcccaggctggagtgcagtggcgcgatcgcggctcactgcaagctctgcctcccgggttcacgctattcttctgcctcagcctccggagtagctgggactacaggcractgccaccacacccggctaattttttgtatttttagtagggatgaggtttcacggtgttagccaggatggtctgaatctcctgacctcgcgatccacctgtctcagcctcccaaagtgctgggattacaggtgtgagccacggtgcccagctgtttaagaggtaatttttgaaatttttgtttgcaaagkgaatatttaatcctattatatctgctggactgtgtgccttctaaaattctacttagtagaattgataagcagggatcatttaaaaattaaacaacatttttcatttaattaatttatttatttgagacaggatcttgccctgttgcccaggctgaagagcagtgaggcaatcacaactcactgtaaccttgacttcctgggctcaagtgatccttccacctcagcctcccaagtagctgggactataggtccatgccaccatggataaacaggtatcttttatacagtgataaaatgctgccaacatacactaggctcttttactatagttgtttttwaaatttttttcacctgaaatataaatgtaaatgttcagtattatcaaaattaaaactcttgagttatgatctttggaagtttatacttaatgtcctaggagcatggtattaattcagtagccgtggttggtgtgtttcttacaagcaatcttcaaaatgaaggtgtcaaggagaacctgaatgttggttcacttggggttggtgttttctttttgtacactaagtgtcttaattttttttttgtggacatggaattgtgtccacgagtatgtatttcttatgggattatgtagaaactattgtaacattctgagcctttcttcctttagacgaagggcagggaggagacacaaccttgcaagtagttggacgtggtgatgggagtggcctggaatagggatggacattataagttctttctttaagctttgcttctatcattcgagagtaggttcctctgcatttacaagaaaagcaatctcagccacagttgtttatataggagggaagtttgtccctatctcacatcactcaagtccagagtttggaatcctgagttggtagagatccttcatggcccagcagaggcctggctccttgctgtccactgcccccattcccatcatgttctcaggggcagctggtccaaggccaccacaaggcatgatgcctgggatgagggttctctctgttcttttcaaagagacttccaggaagaaaccttacaaccttagagacctgtctgtctctcgttggctgaatttagtcatatgattacatctatcaggaagggactagggagtgttgttctttggctgagttagcaaagaaatgagcttctttttctttactagaagggaaggattaatactggaggcaactggcaagctccgcctcaatgcacatggctcagtttgtctttagagaacattctgaatgtgtagttatagatgcccattgtgatatrcatcaaatcccaatattttaggtacattcagagtgtataataattgagtataatattctgccttctcatagcttttatttattttataagctgccttgaagctataattctgtttccacatatgtgcctttggcacatcttagaatctgacgtagtttcccagccaatccaaccatgtttttaaaaagagctgagaatttcattgagccactcttttgtatggggctctttatggaaaaattacatttggatttaaagaaggaaattccttacagttttggaatagaaatttattagataaatcttcaagttaatcttccttgtgaatttgggtgatgaatgctggttacactgtccaagcaactttaaaaatgttttggttttatttctgaactcacatttgaaatattacttgattgctagtgacaaaaatgatttctgtttagatctcatatttaagcatctatgataatgaaaacacattaaagggaaagtcctatcattcctgagagtttgcaacattgtcagaatctccctgagaaggaatgccatggagggcaaggctgctttcttgtctatgatttgatctgttggtgagaagtgaggatgaacgcttttcctgtctgtcggtttatggtgtctgcacattttgatagcagatcattgctgttcactccttctcctttaaatagagcaagtggaattgtctacagaatgcggcctaagtattctattaggcctaatgtgttttaattagcaacagcagacgaacccaaacactgtctcttagtgcgtctaaccttattattttcaagtagcagttgaataacacttggaagagagtcatcaatctctcagactaattaatgaaaatgtttaaaaaatactggcagatgaaagtaataaacatgtcagtccccaaattgtgtttttccgccactgattgataataactaggtcagtcgccaagttttaatttcttgattaaatggcattcccaatactgctatcttcttgacattgactaaacttaataagcaatgtagttgacacttcatatctcttacaggaaatacttcctctcattattaaaaaatacagagtgttaaacatagctagcaaaaattaaatcatttgacattttattagagaaaacttttaagacaataatagtaactgatggcagttattaccaaaaatacctaaagatttggaactaccttttgaattgttagggtggtgacattatattcagtgtatttttagtatatgctttgctttattttagttctttttcagtgtcaggtgctcattcgtggtgtaaataacaattctgtgttaggcaggttttcctatttgatcacgtgtgtgggttggattagaaaatagacattaaataaattgattgctgtctgtggcccttgtccttggcagggtggattccttctgaaaggatattgcagtgtccagggaatgaaggggttgagcagatgagacctccctagctgatgcagcaagcctgaaaggagagggaatgaattccagagatgtgtcagaaaggggagtggcatggagggctttgtgatacctgaacaggtttgggctgtccatgaacttgagatttaaacccaacttttccctttgaattggctgatgttttccttggagtcagtagcaatagtgttttcttaaaaaaattgtttgaataaacatacctataaaattggcttttgaaaccaaatacagtacctatgcctattacatgccattttttttggtttccccacatcaaaggactgctaacgtcttttaaaatcttcatgctatcattgtgtctctgctaacactgcccctcaattctgtgaagatttattcagtgtccattacacagtcatgaagaggacaaaaagaacaatcgttccatggtgcatatggtgtagtggtgctcaccataggcctgggatgtgtttcttttttgcgcttgtgaaataattattataagtcccttcctttgcacttgagggaactgttacccaaagaggtggtgtaatcaaattctttgctgttggggctcagatgtagamccagatcagttcaattccaaagctcagatttttctacttgaagctgtactgttgtttctcattcatcacatggatgggcttatgctgagagcacaaggtgatagataaaaaaaaaaaaaaaaaaagaatgagatcgtcctgaaaaggaatgtgctaagcatgtaaatgtctctataataacatagtagagaaagtataaaattatttactcttcccctccagaaaaattcatggtggttgaaacgagaaagagaatgaatttgattgaaagattaaaaatgtttcttggagacagtggtttcaaaggtgggataggatcacaggaagaaaggacaaatgctggaggaagtaacagcaacagccaagctacaaagaaagcaatgggggatgacttaggggacaggtcctatgttctccattttggctgctgtgttttggtgcatcttatrtaacacccaagtaagtttgtattttatttggtgtccagggaagccactggagattttgaatagagaaatggcataaatcaatagttttttaggaagttcatgctacaaaccgtactctcattttatttttctgttggtactagttacttcccaaatatatcctgtatattttgtgtgtgtgttgtctaccctttcctcttcattgtaagctgtttgagggctgaagctgggtcagatcaggcacacacctttcctgttgtcctccagcactctctctctcggagctctgcgctgctgtgtaagttgtctgactacactgagagtgccacactgaagggccctgtgcagaagctgtgactcagagtcccagctgagtacctctttccacccattctataaggtgccaaacatgtaagtgaagctgtcctggaccatccagaccagccaaaccataggtcagagtgccatctactgacctacggcaatgtcacatggaacatgggttctcccagcttggtcctgcccaattcctaacccacaaaattgtgagataaccattgcagtttgaagccacctagattgggggtagcttgttatgcagcagtagataaggggaaccaataaggtcagttcacctcagcttagggcatggaccagagctggggtggggtgcagggctctctgttatactcgatatgcagtcaaaaaagtagctgattgaacattggatgtgaaggagtcaaaatgaccaaatctaaatgataagagtaggtggtggtaagaggagattttaggtgtgagaagttgatgggatattgtgttgacaatattaaattgattaaaatcttgatatcccttggaatgtctaactaatatcacaaaattaaatttatgatctttactagtccattttcacattgctgataaagacatacccgagactgggtaatttttaatggacccacagttctatgtggctakggaggcctcaccatcatggtggaaggcaaaaggcatgtcttacatggcagcaggcaagagagaatgagmgccaagtgaaaggggtttccccttataaaaccattagatctcatgagacttactcactactatgagaacagtatgggggaaccacccccatgattcagttatctcccactgggtccttcccacaacacrtgggaattatgggagctacaattcaagatgagatttgggtggcgacacagccaaaccatatcattatctttccttctaaagggaatttctttcatatggtctccttcatctcacataatgtcagctggaggtctgtagttacctgggtcagacacctgggagtgctccctcctgagtcttttttctcatgtcccatatggatgcgtcctaagtccagtaagcttcacattaaagcagagtcagtatccaccttccttgttgttcaaagtaagccactttctccaggctgttagtttcattttctcctgtccctaaagccctccacaagcctccgtctaattctgtgcttctttgattcacggcgtgtgcacaggtgttgcaagctattggtagaggctctgcagagcaggtacaaggtgtatttgggatgaagtccctgagaatgcagacacctatggtttttcagaaagaagctacacagatcctttttaattaccatgtttttatttttactgaggtgttacttatatgctgcaaagtatgtgaatgttaggatgacagttttacagctcaatgaaattttacatatgtgtgtgtatagatagatctataaatatatagcagttccaaattatttcagaagaaatcctcctttctcttagcttagaatatatgtaatggggctggctatcttgggagtttcattgaagagggggtgttacatttgcatgttttttaacctatgcttactgaaaggtcaatgaaatttggggaaagaagatcctagacatctagacattcttcattgatatgtcattggagaaaatcttggaaaataaaaagtctattttctaccttccagatgaccccaactatatgagtcctacctctttaaaatagcttttcctccttttagcactargaatctttattatgtgccagtaatgattaaaacattttaagatgaaattctttattactgctgctatgataaattattagcaatataagacaaatgtttatctatgactgctttgaatattaacttcagccatatcttatatatttttttcttagtaaartcctcaagatatgcctccaagttttctttttgttataacctcatgtggtggcctgtggaatattatttttatttttattcatatagtcccagacttgtttgtacatagcaactaatatctatagagcattttctatgtgcccaacccaccctagatcccttacacattaacttatttattcatttcagcagctctagtgagaaaggtgatatcagcacccctttttacaggtgaaaccgaggcacaaggtgttaagtgctttgccaaggctacactgccagtgcatggcagagcctgcttttaagccctgccaggccagctccagagcctctgtctctaatcactgtgctatcctacctcgcaatgagcatttggaagagaagtgaaaacaccacagtccccctagraagccacagactggctgctagagcccatcatttaaggaggctggtgaatttaatgagtttctcttgactgtattttcaaggtaaaaatgtaaataatagagtccacatcatttcaaattgaatcagggccaactgtaatttcaggaatgaaaaaaaataatagcaagtaacaagcacaccatgcttttgtgtgcccgacagcattctcatggaggactttcacttgctcaatcctcacacccaccccatgaggcacagacagttcctgaattaggatttttcagcttcatgatggtgttaaagtggtatgcatttagtagaaaccatccttccttcatgatgctgggcagtgccagcatcctcgtcagcctggtcagccacgcatttttgaattaggatattttcaatttaccctgggcttatcgggatgtaaccccattgtaagtggacaagcacctgcccttgtttggagataagagagagcttaagtgaattgccaaaatgccagccagttcatggcaaatccaggctgctaacccagatagtggcttcgaacctgtgctcttaaccgctcagctatcttgcctcttaaaacaacaatgacaacaaacaggttcataacttacagagaagcagaactcttggatgctgatagcccttgaggcatcagccaactatgtttttatccaagctccctcttctcctacacttccaggcaattgccctttctctgcagggtgcatgaggcctgacaagtgcttagtgtccaggaagctttggtgattactgtcagcattgaccgccgtggagaagggtccccacgtgaccatggaccggcgggccattttgtgcatacatgcaacttgtgctaactggccttcagagttcttatgacttttttatccagctttgaatcctcagatttctgcctctggaaaaaattctgtgctttgccagtgtttcctgataaatggcttttgtggagaaggaaataatttataggatctttctaacaaaaataagtggaattttcaaagaaacacttatttttatattcatttgtatttaaaactccttgagaagactgtcatattcctctctctctacagtctcttagaggatagggcatatgataaaataaatcattgctgcatggatatttccttaatgatgttttctaatgcatattgggaaatagtttttctagaacttcatcttgacatttcagttggttaaatgatagtgcaaattgcttgagagaagtccaggtaagaatgaatgtagattaacaaaaatatcgccactttatgcaaatacaatgaaaagaaaaactgctggtttataaaccataattccataagaagaacagtcaaatgaacttcccgttttctttaaatattataaaaatatccatgcgtgatctgtgtgtggtattgattatagagactgttatagttgtccttcaggggaagaattttaaaaaatcaatcccttccttataagtttgtatgatctcagtttaatcagaaatagggctaaatgccaacaaataaatcaatagccttttgaagaacatacttggggaggatcaaatttgatgagatgggatgatattggaattaaaatcggagacagggcatgagagacttacagaaaatgaggtgtaaatatatgaatgaaggactctttgtgaagtgttctttgaggaaagaacagtgatggacttggctaggccaggacattcctaaagaaaagctgcccagtaggagagaagaaaaagcattcttaaataatttgggcacatttcttatcagttygagagctaaatgatagatcaaatatattcatttgtattgccattgaaggtatgattctgtgattgttttttcagttttatggagtataattattaatttttttgcgattataaaacttggttaatactatgtcaccaatcacaaaagtttgttagctgaaaaaggaagaggctaatggtgggtgggtgggaaattattgctctgaatttgtatcttgctgcttagctaaaaccctcctatttatctgccaggtctagaagttagcataaaaggcaagggcatagaggccgtgaattcactctattgcaaaaattctattactttgtgacttcaggccagacatttaaactcctcatgttttcaagtcattggaaaccaaatgctaaaatgactgtttaaataaataacaccttcaaaaaatgtttgagtagttcatgtcygggaaaagttatgatgtaatttttcaacagccttgtaaattcatgccaaagctatatcactccacagtatttgattaacccatattgtccttacaaggtcaaggcagaagagtggtcaaatctgccttcttctttattttattatagtaatgtagccgtaagtgagtggttacttttatgacaatttccattttctgggaattttaataagtagcattcatttatttcttgattataaatgtaacctaggcttttttgcagaaaatttataacccaggcaaaagaccaacattaaaaaaataaaatgaccaattatctaaccagccattcttaagtactattaattttttagtgttaagatgcagtagtttctgctttatacaatatgtgtgactrtatgagtacattcatttttatacatttaaaactgtgatcacaaaatttatttatactatatggttaatattctactcattatagatgataatcttaataatattcttctgacatgaatggctctatcctatttgtcataacgtaacagtcctttattgtgcatcacctgactaacttccagtctttctctaaacctgcctatatatatagagggagagagagtatatatatgtttcatatatatatctcccagatcatttcatagaataaaattctgtaagtgctatttctaggagaaagagcttgcacattttttttaagctttggctttagttttatttcatttatcctattctgatgtttgacatttcaaatcctttcttattattctatggtttttttgcctgttcattctagtttatttttcatgggtcacatgagaaacatttttctctaaattcatttataagttttattgtcattgcaaagcagctaaaagttaatttgggaataataacaaattcacaataataactcttcctatataagaacacagtgaaactttttatttatttttttatttattcattctttttttctgatttggtaaggctttgttgttttctatatgtactttctataggttttcattctgtttctctccagacccatcttattctcaaaatttacatgaggaaattttacccaaattttctgtcatcaattatattattaattttgtgcatattttaaataattggccaagttaactttatttatttgaaaacttgttcacttattttgattagtattctgaaaagataagtcttcattgactttccaatagttttatctcatgattttttttatcatcttattggtttgcctagatcttagagaacaataaatagcacaactgctagtggtgttactgtgttgtggtaatttttatggacatgcctctagaatttcatcaaatgtgaccaggatagtggttgttgattgtaattcaatatacagattctttagtgtttttgtctctcagggctcacttgttatttctgcatacatctcagcttctttctttttacattttgtttagctcttttagaattatttttattccttttttcatagatggctttttcatggattgtagtgaaagcacaaagtatgtattatctaatatatgtattagactataatattagactatagttttaattataattatatgaaactatatacatatattacaattaatatatgtatatattatatattatatacatttgactatataattgtatattaggctatttatatatagttttaaaaactactgtatatatgtgtgtgtgtgtgtgtgtgtgtttacaaatatatacattttaatggcccagaacatgttttattttgatgaatattccttctattggtaattaaagaaagaaagtatagtctaccattgttggatgaattgttctgtaaaggaattagggtaagttggttgatggtgttttttcaggtttctcctcattactgattttctgtctacttaatatattaattattcagacagaggtgttgatttttccaactacgatttgagtttatttgaagatgatcgatagcttttgctttatgaattttgaagctgtgttgctaagtgcatgcatgtttgtttcttatgccttcttcatgaatttgctcttttatcagtaagtaatgtccttttttattattaataatattcctcattccaaaatatactttgtctgacaaaatatagccactctagttttctttcaattagggtttatcttttttaaaattttttaacttttaccctatcaatgcctttatatttaaactgagtttcttatagacagcatacatcatgttgggtattactttcttatccaatctgtctggcttttaattggtgtgtctaactattttagagtgacataattattggaaaggttaaagactacaattttggtagctgttttctatttgttctttatgttcgtttggcatttaaaagtcctgtctgcctgtttcttgattatttttaatgatttaaaaaaatctcccattttggcttattatttatacctcttaaaatttttggtggatacccttaattatagtccacccttaaataattttatgtcccttcatatgcatttaaggcacttataacaatagactcccaatttgtccctcccatttttgtgctatttttatatatcttatttttacctatgctacaaatctataataygtggctatctttctatgataaaataaattatattttagarttattttaaaaggtaaaaatatgtttatgattatatattttacatttactttatttctggagatcttcatttgtttgtgtagatccaagtttctgtactgtagctctgctggtgataagttctntatgttttgcttgtctgaaaaaaagtgtcattttttccatcaatttgagagacattttcttctgtgtatattctgatttgacagctttttctcttcaatattttaaagatgctactccattgtttatgttcttgcatagtgtctaacaaggagtcaggtgtaattcttctctttgttcctccctctgtaatgtattttcaccttccctggaggcctctttttgtttttgttgtcttttttggttttgaatttcagtggcttgaaattgatgtgtttggattttatttcattttattttcacttatccaacttggttttctctgagcttcttggttgtattkacggcttgacatatttcattatctgtagaagaattctcagctattatgtcttttccttatgggattctgatcacataggttaggctgcttggtattgttgcacaactctggaatgcaatgttctatttgtttttctctggctttcttttccttgtgctcacataagattaatttgattagcctattttgatttcactgattcgtatctaaactttcttgaattcacttgtgratctatcaaaggcgtcttaaactctattttcatatttttatctctagcattgtaatttttctgtttcttatggctcctgaaattatccatatgtttatagaytttgcctaccttttccagtagtctttaatatattaatcatagacattttaaattccctttctgatatacatatataatatatgatgcaagggaaatatgcatatatatatgcaagtagatatatatatggtttatcttttatcaattcattttcccttgcattttcatgtgtctcataatttttgtttgaatgttaggctttatgaataggacagcagagaccgagacagatcaaatttatgcctagaaattagcatacctctcctttagctaggctggtagttttggaggactgatcaatcttgctaagaattctgcttggtttgggttttgtcttgcaatttcagtacaccacattctctaactttaccttgtccttagggtgtgttctgatttgttggttggtgagttttttaagtgttatactggttcctgctccactctcagctttaggcttctcctgtgtaccctttcccccagagagggtctctgtgtttactcctgcccttcctgagttggtttatacactgctcctacttgttactcagacttgcaagcccaatagtgggtctcagaggagggggattctttgttgtactggccctgcctcagtaataggcagtctctgtgttcctggaaccctgggatgggtttctcagtggtcctgcacctcccccagcataaggcacattcttataatctggatagaggatgctttcctgtcccttccccaggcataaagggtgtctaagtccatttatgttgttctaaaggaatacctgaggctgagtattttgtaaaaaacataagtttatttggcttacgattctgctggatgcacaagaagcatggcacccacatcttctggtgggggcctccagctgcttccaacatggcggaaggaataggaaagccagcatgtgcagacatcacatggtgagagagaagcaagagagagtggggggaggtgccaggctcttttgaacaagtagctgtggtgggaactaataggacaagaattcactcattatctcaaggactgcaccaggttatttttgaggaacccacccccatgacccaaacacctcccactaggccctgcctccaacattgggaataaaatgtcaacatgaaatttggaggggacaaatatccaaatcatatcagagggctcttttaaaatacctttacctttctcccaggtgtagtagatcttcacctgtaccctgggaatgacagggtatcatgccttttcttagcaatttaaggccttaacatgataaaggtcagtcctctgtttcctttctgcagtggtaggcattctcttctccctgacttgaactatcaagagagacttcaacctctttctcttctagctcccaacctttcttatgaatgcttggtggaggcctgtggagaaaagcctgtaaacaggaatgtgctcttcttacatctcaattcccagggttctctcctttcaggctagccytgggtcttagcagttcattaaagttgcagctgacatcttacctgcctgcatggtggccctgtcttccgtttgttcagccacaaatgagtcagtattcatgccattctcccctgggaagcagctgtctttcttaagattttaggccagttcattgctctgtgacctcagctctctgaagagttcaaggaatggtatgaatttgtaagttatcatgctttttctttgtgataggcttggagcaatgctctttacaggtaattgcattctaaccagaagccagagctcttacttacttaactttacattctcaatctattcattaactcatttgttgaacaaagcaagattgaacatgtaggaagctaggtacagagctttctcatgaagatactgcatacaaggacagacttggccctgctttatggtgctcacaaacatataagaaaataaagcaataatgcaatgaagggaaaaaatgggagtgctctgaaggagattaacaagatgctgtaatagggagtcaaaaggatctgatgtgggagagggagtgtactggacaatgctcttaaggagatgaaatggtgcagaaatctgaaggctgaaaagaagcaagccttaagagttgtggttgtggcagtttttggaagggattttggagacaattttccagacagaagatatcaaagaaacccagcgaggagactgctaaaggaatgaataaaaggccactgagccgggcagagagagcctctgaggagaagtgcaagacaggggcggcagagccaggttttgtagcttgtggaggtggtggaaagaaagaagcttgggttttactgtaagcacactgggaagtggctggtggattgtacaagaattcacatatcaactgggatcctaatggaaatagataacacctctctggtggggtggttggaaagtgttaatgaagccagtgttaacaaggcctaggccagtttaagagaaaataactcggatgatgcagcccccaggccagccacaatgggcagctgttaccagcctagcctgagtggggaagggtatccctggacctgggccacaagcgtccagagcgctcccgggaggcgtggctttggcaggagggtcgctggcctgggtgacccagcagggggagtcctcccacctcctgcctgggcctctggtgggaaactccatgggaagccaacatggaaaggaacccattggccagttctgacagctgcttctccagcacataggtgaagtgcggagagtggatatgaagagaaaaccggaagtgcaaagaccggaagtgcgaagaagatcagaggtaaagagaaaatcccaagtgggcagccctgaagtgaacaaggcctgaatctcctctgaggggtcrctgtatccgtggtctggagaatggagagggcggatgtgaagtcaggagcagggagaggtcctgtgctggaggacagggagaaacttgagatttttttttttttttagatagagtttcactcttgttgcccaggctggagtgcaatggcaccatctcggctcactgcaacctccgtcmcccgggtttgagagaktctcctgactcagcctcccaagtatctgggattacaggcacgcgccaacacgtctggccaatttttgtatttttagtagagacggagtttcgccacgttggccaggctgttctcgaacccctgacttctggcgatccacccgcctcggcctcccaaagtgttaggattacaggcatgagccactgcacccggcaagatgtatttttaaaggagaacaagcgtgacttgttgagtgagatttgaagggtgaggcaaagtcaagagcagctcccaggctttggaggagggcagaagcctgcactcctttccgaaatgaggagactgtggygggactgagttcgagggagaaagcttcagtgatgttttggagatctaaagtctgagtggactttggaacagccaagtggagatgtcatacttctaatatatacattcttctaattaaaaaaatcttctcatatgtgagtaatgtacttaatcagaactcatttttgaagttcaccatagtttttcaacccgttggtattaataatatcagagaggagtagacagacggtgacagcatgaaaagaaataccgcgtcttcctgtgctctgacacttctggtatcactgtaagcccaggaactttaaaagtacttcttgaaaacccattttagcactgaaaatacattttccacattcagtgaatctgctaaagcttgttccatatttagtaggagacgtctggatgggggtaaaaaaaaaaaagtatgaatgttggagcttggggctgggtgactgggtgagatcccccaggaagctaacatgggtggagaagacccagcccacaggccaggcctggtggatcccccacgcctggacattgttgtgggaggacatggagcagccagtgagacaggaggaaaacagcgtcctgtgagggaagtgtggggagttggcgatgccagagtggtcaacagagcccgaaactcctcagggactcaggaagaaagtcaaaatgtagccctggaacatgtgtgtgccctaaacactgggaactggcttcttctaggccccttccctttgggtgtcatcaggaactgtctcagtgtaaggccaccagtcttctcccaagtttagttcccagtgacctgccgatggagacccctgaagagatccagatttcccaaaagccgcttctcagagctgattcttatggttctgtcttgtctacacaaggatggacaagatcaacagcaaatggatgatctccagaaatctcttcatttccacatttcaaaaagttccactgctcacattattctcttatttataagtcaatgtcttgttttctaatatataagcaaaaatattgtgcatctaattgagaacatttatgaagttcaccatctttgctttttgcaactcagtaataatatcagacaggagtagccaaactttggaggagcagaaaaagaaatattgtgtcttgcttttctttgacacctagaatattactttgtgtccaagaaacttaagagtacttcttgaaaaccataaaattttagctctgcgaatacgttctccagcatctagtaaagcttgttccacacgtaacattacctcgctcttgttcttatagttatatttatctccagtttcttctctgtttcctctaatgataatggattataaaggcagaaggatccttttgcagaaaggacttgatgtttttttttaaaagagacccccattaaaagagccaggctaaatcaagagacagaaaatattgaatttttaaatgaaaatagaaaagctatttaatatccttaattctagcctagtttctcatatgccctcactatgtgctttagagtattgtctgcatattctggaactgtcaattttaaaggaatacatagatgaagtggtgcattcatttatattctacttgcagaattgtcaaccttgagttggaaggtaaactagaaatagaggagctcttctctagttcaccatctagtacctgctgtcagtcacatagcaggtgccagaaaagacagcacctgagaggaaatctctaagcttgcatacttctgtttagcaccttaagtgtgcaccagagacagctcaggccattcctaaaggccctggtgtttttctttagataacttttgaagatttgctcttatccagtcttcagtttacatgcatttctgtgtttttagataaaatacctttgtgtaaaatattgtttgaggcctaatcagaactaagtctagagaattgaaaccatctctgggggaaattaactgatgtgaacgggaattgaacctgtcatcgtcgccgtatcactgctctactcttaacatctagtgatttaaataaagcaagaaaaatatttaattacatcagatatatgcatttaccctggtggcagtaattactttttgtgaatggacacagctgtgaacctaggggcatttacttcactgtatttagtcttttaacccacatggtgtctggaagatttaaaataaccggaaagattttcttgactgactgactaaatgaatataaaatattggttgataaaagtgacagtggtgtggtatttctgtaactttgtacatttactttatcaatatcgcagactcagggcttatttattaatatctccttctggggttctgtgggcagttataacctactgcttccaggtgagcagggttgtctttgtgggttctctctctgaactgttgggtacactctaggcctagttgaccgataacaaaagggttaacaaggatctgggttctgctaaaacaaacatgtaaactaatgtggccattaactagcatatgcaattgaagcagcatatgaggaaatgttattccatataaaaatagtgtcaccttttacattaatttctcrtatgtgtacttacacatttttgtgtatacataagtgtgtatatataaactctttataattacagaatatacttaacataccagaaactcaaatatctgttgaatgaatgttgtatctttgctgtttaataaatgtttattgaaccatttgaatgaaaggggaaacatatttgataaggtaatattgttttgtcagctaatgttttatggtaaggctaatctttgaaagcacacaaaggcacctctatttgtacaggattactaaactcaacacacactgatgtttttttaaagggaaagttcctggcctgaaaaacaactgataccgaaagtgtgtttattttgcactgatgatgcattagaatcatccaaagggatgatagattttacattatgtattrgagtcatagtaaaacactaatccttctatatgaccacagctgcatacaggacatttagtaacagtctgtgatccagcatgaatgtgcatgcttttaagtttaatttgatagttcagcgtgtcatttatacaggtaaaatgcctgaatttagaattaataagctcttatagaattaaatatttatcttttattttataaaggcataacttttttcgctcatattattgtcagtgtttggatgattaaaacttggcaagaaccatagatttgcgatgtattattggtgatatccttggaatctaaagtagattattatatacttgrttcatgaattatagttcatgcattggtgcgtttaggggttaaaatccagcatgaggaggtctggaataaaagtataacttcttaaaaaggggcacgtttgaataagagtgataagattataaataaaccatggtgtcgcagaaacactgtactggctcattctttatgattcaggtgctgggatcataacgttatttactcaaatgtaagaagaaaatccaacaactgtctcaagagttatctgattttagctacagtctcacagcttagtaaatctgttccatcaataataaaatggaggaatcattatattttattttaatttttaatttttgtgggtacataggtatatatatttatgggttatgtggtatattttgatataggcatgcaatgcataataaccacatcagggtaaatggggtatctatcaccccaaggatttatcttttgtgttacaaacaatcaaattgtactcttatagttattttaaaatgtacaattaaaattttttttttttactatagtcaccctgttgtgctagcaaatactaggtcttatttattctttaagtaatttttgtacccattatccatacccagtgtcccgtaaatccccccagttacccttcccagcctctggtggtcatccttttactctctagcttcatgagttcaattgttttaatttttagttgccacaaatgggtgagaaygtgcaaagttagtgtttctgttcctggcttatttcatgtaacataataatgaccagttccttaaacaaatttactagaaaaaacaaaccaccccattaaaaattgggaaaaggacatgaacagatacttttcaaaagaagatatgcttgcagctaataatcatatgaaaaaaagctcaacatcactgatcattagagaaatacaaatcaaaaccacaatgagataccatctcacataagtcaggatggctactattaaacagtcaaaaaataacagatgctggcaagtttacagagaaaaaagagtgcttatacactgttagtgggtgtgtaaatgagttcaaccactgtggaagacagtgtggtgattcctcagagacctaaagacagaaataycaatctcattactgggtatatacccaaaggaatataaatcgttccattataaggacacatgtattggagtattcattgcatcactgtctgcaatagcaaagacactgaatcaacctaaatgcccaataatgatagactggataaagaaaatatggtacatatgtaccatggaatactgtgtagcaataaaaaagaatgagatcatgtcctttgcagggatatggatggacctggagaccattatccttagaagactaatacatgaacagaaaaccaaataccataggttctcacttataaatgggagctgaattatgagaacacatggacacatagaggggaacaacacacacgggggcctattggagggtgaagagtgggagaagggggaggatccggaaaaatgactgatgggtaataggcttaatacctgggtsatgaaataatctgtacaacaaacccccatgacacaagtttacctatataacaaacctgcacatgtacccctgaacttaaaataaaagttgaattaaaaatagtaatgagttccttccacattgttgcaaatgacagagatataattcttttttgtggctgaatagtactccattatgtatatgtaccacattttctttatccattcatctgctgatgggcacttgggttgcgtccaaatcttggctatagtggatagtgctgcaataaacatgggaatgcagatatctctttggcatgccaattttctctttttggggtatatactgaggagtaggattgctggatcatatggtaactctatttttagtttttgaggaccctttatgctgttctccatagtggttggactaatttatgttttcaccaacattttacaagggtttccctttctccacatccttgccagcatctgttatttcctctcttaaggatagtagccattttaactggggtgagatgatatctcactgcagttttgatttgcatttctccgataatgaatgatgttgagtaccttttctgttttttgttgttgctgttgttgttcttttgggacagagtctcsctctgtcacccaggctggagtgcagtggcacgatctcggctcactgcaagctccgcctcccgggttcacgccattctctcgcctcagcttcctgagcagctgggactacaggcgcctgccaccacgcctggctaattttttgtattttttagtagagacggggtttcactgtgttagtcaggatggtctcgatctcttgacctcatgatccgcttgcctcrgcctcccaaagtgctgggattacaggcgtgagccaccacgcctggcctatgttgagtaccttttcatatgcctattagccatttgtayatcttcttttgagaaattattcaaatcatttgcccatttttcaattggattattagattctctccaatagagttgtttgttattctggttattaattccttgtcagaacagcagtctgtatatatcttctgccatccaatgagttgtctcttcaccatgctgatttgtgtgtgtgtgtgtgtgtgtgtgcagaagctttttaacttgatgtaatcctatttgtccatttttttgctttgattgcctgtgcttgtgaggtattactcaagaaacctttgcacaatgtcctggagtgtttcccccatgtttttctttagtagttttatagtttgaggcactatattttatttctaaatttatttctaagatggtccaattactataggaagttagtttgagatgaagttctgaaagtcatgatttacggtgaattattatagctctaagtctgtcactatgtgtattttccctcctgactcagaaatggtataagatttaaattttcaaaaagtattgatctggggttagatggcatctcattgtggttttgatttgcatttacccaacagtgacactgagcattttttccataaacctgttgttcacttgtatgtatccttttgagaaatgtctactcagatcctttacccaattcttatgggattattattattttacttcattttttgctgttgggttgtttgagttctttttgtattctggatattagtcccttgtcagatgaatagtttgcaaataatttctctcattcttcaggttgtttctcattcttgatcatttcctttgctatacagaatcttgttagtttaaaatagtcctattagtctatttcattattgttgcctgtgcttgaagatgtggagcaaactcttatgtactgttggtgggaacttttatgtactgttgatgtaaattagcacactcattatgcacaacagtatggaggtttctcaaaaaactaaaactagaactaccatacaatctaacaatcccactactgggtatttatccaaggaaaagaaatccttatatcaaagagatacctgcaccttgatgtttattgtagcactattcctaatagccatgatatggaacccacctaagtgtctatcagctgatgaatggataaagaaaatgtgatatatatatatatatatatatatayacacacacatacatatatacatatatgtataatgaaatgctattcagtcataaagataattaaatcctctcatttgcagcaacgtggatggaactggaggttcaatgacataagccgggcacagaaagacgaataccacatgttctcactcttatgtgggagctaaaaacattgatctcatggagtagagtgtggaatgatagtaagcagaggctgggaagggtgtgagggaagagggatgaagagacattggttaatgggtacaaacatacagttagatacaaggaataagctctagtgcccagtaacacagtagcgttactgtagttaacagtaatttattgtatatttctaaatagttagaagagaagaattagaatatttccaacaaaaaatgacaaatgtttgaggtaatagatatcctaactatcctgatttgattattatatattatatgcatgtatcagaatgtcacatgtaccccattagtatgtacaattattatgtatcgaaaaattttgagagtagtcatctgctgggactgtgattcaagaatttgcaggttaggtaatccttcagagaacatgctagcctttcagtgatgattgaaaactgcagtacataaaaaaaaaaaagcatttcatcttagagagaccagtggcatttgtttcattattaaccagagtactgaaaacatttcatttcatgaatgtcatgtaaaaatgtaagagggtcaccaacaaattaaagtaatatattttgaaagcttcttcacattaagacttttttgtactgttctgacatgacctcgggtgtttggagcccagggagatgacatggcatgggagtgccgggtggaaggtgctagaatgtgccattgagtgacattttagaggggctgccttgctggccctgtccacagtctcaggcactcccactggaatacaccatctgtgcctcctctccttcctcctatgaatggcctcctatttcatcttttcctcnccaaatctggttcaatacacaaaatgcgattcagttgtcttttactctatcaagccttrctaatctgcagttctcgctcttaagtaatattaataatttccagtattatttgcttgcatattactgggaaatttacaaacatttttatgaaaatcttatgttattgagctccgattgatactatctcatcatcagttaatattgatagactagattttatctttcaaggtgaggaaacccaggttccaagaagttaaatgatgctcttgtaagacatcaatatttactttaatccatctgtcaattgatgaaatagtcttcctcttgacaaaatacaatgttaaatcaattataatgtcccaagcttttattctacttatatactacggagttgaaaatatgattatgggtgctttgagaggtcttctaagtgaccagctaaataaacaacaaatatacagcattcagaatttattcataatatagtaatacccaattagaaaatggattagggaaaaataatccaatttgcaggacctacaaggtttttaaaaaatgcattttataacaaatgtgcatcatcttcccagggaaaataatgaaattgtgtgagtgtgcctgttgatctaaaggaagccttgaatgaatggagcactgctgcagagagacccaagctccattagccttcctggaactgcccagaaagtaactgccttcaaaggacaattccacgtcttctctcctctctttgtctattctcattcccagatgatgactttgttttttatcctatgtcactggaaagttttaagcaatctgaagagcttccaccaccacatccaaataactacacttctatcctctttctttctatcataaactatgacatgcctgtggctctccgatcttgggccagcttctcttgggtaccagttttcaggtattctcagctacccagctgtttttgttttcctttctcttctgcatcctaaaaatctctctgctagatgttttccttcagtacacttacattttacttcttacatgttaaaattcagcacttcagacccgatttcccataaactgccatcccattcctctcttctcattgataacaaactctttgaaagaattgtctgtgctccttggtcccagtcttccgtagaccccatgccaatctggagtggatgacatcagaaaggaggtaagaggagccagaggagagtacaggtcacagaatgagcccattcagcgaaactacacttaaggtcatcttgacaaggtcaccagtaacttacatgtcactaactaaattcagtggaccaattatcagccctctttatacctgctgtacacagggagttcctttctccctccgaaacttgaatagatatggctatgcagacatttaaaacttttataagtctaagtagaaaacatagacatataaagaattttaataaactatcaattggaaaaagtatatgaaagttatctgagaggcaaaaggttaacattcttgacatatagagagctttttatgtttaataataaaatcaaaataaaatagacaaagacatgaatgtaaaattcgtggaacaaaaaaagcatgaaaaaattaagtttaatttcagcaataataaataaattcaaactaacatgtcagggatatgacatgctttcaaaacagaaagaattataatgcaaagcagaagagatacacacatattttgctgatggagtgaaggttgctacaaattcatgaaaaggattttggtgattttttttcttacatcttaaaatgtgcatttcctttgacatattagtttctcatctggtgaactatcctaagaacataattatataaatatgcaaaatatataactgagtcttcattggaagcattctgcagtagagaagcactacattttaaaaaactatgacacattagcataaactatgatataaagttttattaacattctagttgtgatacatcattacagaactatatatgtggtacaatcttgtttttgttctttatattagaaaaacagataggaggagaaatatccagataataaaaggagtgatctatggctgtggatgttaaagatatttacagtgatagtccccctcatttgaatcttttacatttattttaataaatatctatttttatgargataaagtaataaaatagaataaaacacgacattcttataagggaaagttctgagtttaaatccaaggtgacaatatatgtgatattattcattacgaacaaataagatgagagaaactgaatgagttcctggggaaactttgtctctaggtgcaggtgggcattcaaagtgtgcactgcccgactgtcgctatctcttcattatagtgctgttgcaaattttaaagagtttcatgaagtatcgtaatagtcaaagtttatacacagacgtgatacacagttgtgaatgggcacacaaatgtacatatatttccatgcttatacacacaggagttaacatgcacacacataaatatgtacatacacgtatttctagttgagtcttctggcacatccctgatacttggtttataaactttctgtgcgartttctccaagttatttttaacatgaattttaagggcagttaaaacaaagcttttgtgttagaaactgagagtttcagacagtgtttagggaagggcaacacccgctctttgcagtagctgatagctgcatgagcaactgtgaatgtctctggcctatctaggctgatcatcactgtggaaacagaccttgctttataggaaatggggtagggtgcctgaagtatcatgcttagcttcaccttgctcacatagcaacttccatttcttgcctccataaattctgacattttacaaagagaaatttacaaaaaaagaaaaaaatactgactttggagcacatactgccattggagcaagctgacttgcaggtaaaatgagatcgatcagaagtttgttagatgtgagctaaaattgagacacagtgcctggcagtgactgcacaggtccaaggtaggcaagtcagaataaagtggcatgtgcgttggaggtcagggttccttgataaggccagttcctggaagggaatggcctcagtctcccatgcggtggaagacaacatgcctctggggaccagacaccatgctaaggtggcagtgtcatggacacaggcttcctcccagtggtttcaaagcattagttcgagttcatgcctgtgaatgaaagatctgtctttcaagatgtcttaaaaaggctatgtgtgtgattgcttggcctgggccttcaggaaagtattatggtccttgatatgagacagctgtccacccatgctggatctctggaattcagattcaccccttctccagaccatcacagccaagggcctgcccatcctgtcagtcccagtgcctgcttgtcatgctatgggtcataccctccacattctcagaggagccttctctgaaatgacccccaccatcaccactgccacacccaaacatgaaggtccacattcctctcccaatgccgtttgttatcatagcacaccattttccttttatgggcctcatcataaacagataacctatgtctttggttatcatttgttaaaagaaagtctcctcttcctgtctagaagctttgtgaaggcagaagcgatctctcctttgccacccagagcctgacagagtctaacacagagaaagctttccactgtgggtgaggcgactgctgatgagccatgttggatcttcttcatgtactcagcycctagataacacatttggtttgttcagtggcaaagcacttggttccccatgaagtcattattttcttcccattttcccaatgagacatttaaaatatgttgtctgaggtcatggtgctgggagaagatgaagattattccacttttgatgagaataacccatctgacatgaaaccatttaaaatatggtacttttgagtcatcatctaaattgatttctttgttttctttcaggaccaaaatatacattcttatgtgacaagttcagactgtttatttagagattcttttattggaaagctctgagtggtgtaggtgaaaacttgtgtattcaaaacacacatcattaaaagggctttttaatgtttggattcctactgaaaggaaagaaaaaaacattatgatattaatcataaaagttaaaagtaaccaagtggtcttgtggtatggtttggctgtgtccccacccaaatctcaccttgaattgtaataatccccatgtgtaaagggaggggccaggtggagatgactgactcatgggggcagtttccctcatactgtaatatgggagtgaatgaatctcatgggatctgatggttttataaatagagttcccctgcacaagctctcttgccggccaccatgtaagacacccgtttgctcttccttcgtcttccaccatgattgtgaggcctccccagccatgtcgagctgtgagtccattaaacctctttccttgataaattacccagtcttgggtatgtctaatacatcttgactaatacatcttgccaggatttccaggtggtatgtgggcttgggggtcactgactccctccatccctctgtcttgtggggaattccttgtgcccctgtccctcaagcatgtttctaagggacttgcacttctcctacttagctctccctcagaacttctgcttccattaaatttttaaccctcctgtatcaaggctgcattgcatagtggcttttcttttgtctgctcattttttaggggcaatggagagagtgtgacagatgacactggggagcacgttgaagtggaagttaggtgatcaaaagggcctgaccaccaatgggaatttctcccaaggcccttcccacgaggccagtgtcctgagcattctcgcccctagatccctttgcccatttcttctagaatcccaaagcccctcgtcagtgcccagcccacaacaccaagattcctgggagaggttaagctgcagatctcctcctcaggctcatttgcggtccagacctgcctgtgcaaccccgagggacccatgaatgagcctcccctgaagaatgagtcatctgtccctcatcagtaactgacacgtagacattgctctgatgtgagctgattcaaatagctgggtcctgccttctccccagtttaccatttctgcaagaaaaatatgcaaaacacagactttcctgccctgcccagagcactcctgaggcccggctctcccactcccatttctactgtgaaacatgcgtcttgggtgtcttggatacccccctttgctgcagactttccaaaattacgcatctgagtctctgagacctgttagcagagttctcacaagaaacatacaaggacaagtaggacagcagggcccctagcactcctaggtggcactcgccaatccagggactattgcaccctccactgtcttctttctttttgacacacttacatattgagtgttgcagtttccctggttcaccttgccactcagcccttccttgggttgcttcttcaactgggactgttttcttgttcctcatctcttggctcatcctggggccactgctgggtcatcttggcatgattctatcacatccctgtgcctggctaggcatatggtagtgagtgagtctcacaagatctgatagttttatagagttcccctgcacgagctctcttgcctgccgccatgtaagacattcctttgctctaccttcatcttccaccatgattgtgaggcctccccagccatgtcgaactgtgagtaaattaaacctctttccttgataaattagccagccttgggtatgcatctccaaccccaactggaggagggacatttggactgagagtacccaggatgtaaaacatagaatatcctcaatgcagtgccctctgcacttgcctttgctatttctgcttcagtgtgtgtgtgtgtgtggcaggaggttcactcttggagacccaggttagcagacctgagctgtcccgtgatgacttaagatggggtgactgatgtggagacttgagctgcgtatagcttcagcattagaattctatcctgttattcctgatttttgtgctttttggttgaattttgaatacagacttaacatttcatttaatgcagaagtaaagactctaaggaatgtagtggtaaaaattatcattcttggtgggctggggtactatttctgagaagaggcaatgtgctatgtgattggaggttcattattactatgacagtaagaaagttttcatagattaaaatatacataattgacattagttctttttcttattacaactagtaggtgttgtttaataagaatagcttctataagcgttgttcttttattccattaataccatggtttatatctttaagaagttactttccatgatattaaattgaactattttcaaaggagagtatttaactgtttgtaattcattgcaagctgattactgtgtgcctcacccactcatgacccctgtagggtgaataggaaacaatgcatgaacagagatatgcctgccactgagaggtagaatggccttgatgaggtgaatttagcactagacattaggagcaatgaggccacagaggctttagtacatacacagacatggaaattctcctagtctgattttattgtcccaatctgaaaaataaatgtaaagaatagaaatgtaccttataggtaatcagcacatgtatttcaaaggctctagccagtaaacacacacgcacacacacacatgcatgcatgcacacacacacatgcatgcacacacacacaggcacaccatcattttggggatggtattgcctgacagatggttaagtgtcttaaatctacttggtttaaggtatgccaagcaacctttccaaagaccacctgaacagacatgtcacttaactggaaatttagagaagacccattaaaaatgttataaatcacagtcaccgtaagtcaggtgtctgttaaataatggtgtcatttaatatgatacaagtaagaaatagaaactctgaaaatgaaatatacgtaattgaggacataaacttgagggaaaggatgatgctattgcattaaaaaataacatgctccttacaattaaaatactagtaagaaaatcacaaaatgcacacaattagattaattatgttacatggccatccaagaggtacaaaattaaataaggggaatgccttactataattgataaatggtagctgagtgttttacttggtttatcaacaaattataattttatctatttaataacttgaattctatgatactcaggatgtattctcacatatctgtgcttggttcaaaaatgatctaattaaaaatgatttttttttttttgagacacagtcttgctctgttgcccaggctggagtgcaatggcaccatctcaattcactgcaacctccgcctcctggcttcaagccattctccctgcctcagcctcctgagcagctgggattacaggctcaaaatgatatatattttttatcacattacctactttcttccatttatctttgtgtttgtaagaggacttagaaactaataaaaatgctaattatataaaattgatccctggtgaatctcataagggaacaagttaacccattattatttttactttgaagaatcattttttgttcttttctttttgtgcattatatatagaaaaacagtttatataattttggtagataatttagaacataagccattgatatttttaggtctaaaatagatgttaaaatcactactttatgtaacatataagttatagcccctaactgggttgttgacatcatattataatatgaaactaattttttatattattaatgtttatctttctttaatgattactatttccatttgggaaaatttagaatgtgttttttataagcacaaaacaaccaaacaagttgttctgttttattcatctatctattactatattctgtttccatgttccacattgtggtcatttattaaattttaaaaagaactaactgaacttcctgtgtgtgccaggctgtctgttgcacagcactgagtaacacaggggctctgccctgaaagagcacaggtgtcacggggtggagggcacatgggccagggtgccaggtgctgtagatgtctgcttctcagcagcagggatcaccctcctgcactggacttgggttttcagtaggaaattcttgaccaggttgaaagggcacaggggaacctagaaagggaccatcacaaggatggaggtgagaaggacacaaatcactgtgtcatgctgtgaccacaggacagggcgtatgttggtcagtgacatgtttggaagtgggaccacaatgataggtggaggtgcgattgtaaagacctgtagtgtcacaccacaggatggaatgttttgcattagcattgattaatcatccaatcttttgggggcattggaggaatgtgatcatatccatgtttcagcagttttgccatggggaagttagattgcaggacgttaagaccagcccctgggagctcagttagaaaatgactgtaataagccatcagaagatgaacagatattaaaggaaggactgtaggagtcaagaaagggagccagaggcaatggatatttggagaattgaatcatcgagctgccagatcttatagatcagttagatgtgggagcaactctgagattcctaagttaaacactggggaggaaggtggtgcctttaacagagatttgcatctgagaggagaaaaaggccagaggagggaggttaatggagtgacttgcagagtcgtttggggaggttaacggagtggcttgcagagtccagtttggggaggtgaaggtgttataatagtaatgaagggtaaatagaagacactatagttctggaagtcagaggagggtgagctgcagttatagattggggctcttccacctgcattcagtggtgcagtagtgatgctgtggctgtgatgagacccctgctaaggaaaaaggacatagtgaggagctgtgagggcccgggctgcatcctgagttcatggccattgctcttgtgctcagccggggttctgagctatgtcctgggaagagtgtggctgtggggagacagcttgacttcctcagtgyctcagggcagtggctaatggcaaagagattgcaaaccattgatgtaagagaaggtcaaggagttaaaaaatgaagaaaaagaaagcagaagtaaagtaagaggtatgggaggaaagccaggagtcagcactgatctgtaagtttggaaggaaagacagtgaagagaaagcctgggtccatctctccatgagctgtcaatgagggcatgggcagccttccaaaaggttctcagcagggctttgagggtagcagctcttctatgaatggagtggcaggaagatgaataagaggaagtgagtgcctgttactcctctaagaagaggacaggggagtgaaggagagaggagagggggtatcgggtgcctttatatagaaagaaagaaacataagcctgtttttaaactgtaaggatctgaaaatggacaccaacatggatggacaaggaataaataattgctggaactctgttgtttaaggctggaaacgacgatgtctacaatgtggggttagagggggatcccttcctagaagatgtgaagacagtaggcatgcagctttgggatggcaggagtgtgaatttgaggagattggctcttgctgtcctctgttttcttagtggagagagataggaccacacatagaaagtgatggagggatagtggagctgggagcttcaggagttcaatcacgggatacaacaactgctctgagatacacaaattgttgctgattcatcctaagtaaaagaggaagtcttccatctctagcaaccctggcctaggggaaggcaggttgaggcagaaaggaaactgagtcaaataagtgcaagtctgtacccctggctcaggtccataaacccagcagccagccctataacgctctctccccggtcccggtggaaaccagaggaggatcctctggaaaagccgagctgcagagaggaaaggtccccaggtccctcctgctctgtgcaatgtaggcttggttctgcctcagcagtcaaatatgtgcagacaggggcccccagtgatgagaggcacaagctggtgctgagctctggtgctgacatgcaccctgctttgctggcagccctcaggtgcttttttccattcggtccacccatccaggggaatcacctgcttcctgctgttgccctatctccagctcaagcctctgcaacccagtctcaccagggcggataatcttactaaaactccagtgtggtcaaatcccactccctgcttggaacccttctgtagctcctcatacccctgatcaattctaaacttcttgctgaagctcatgaatctgcaggtgctttggcttccccttctctctctgctctcaactctacgctttccctccctctgcacatgctgcactctactttgaagtctttgcatgggacattgtgcttcttgtagtattttccctgttattcaaaactgagctgggtacttcttacatgtgctcaaatttcaccatccttaacccatcctagtgagcaaggtctggatcctgtttccaagggctcctccaggcctggcagatggtgggggctcaaggctagtgggagtgaactctttaattagtgttagtggttacggaggcagagactctcagctccattttaatgccacagtaaggacttggtaatgctgttgtaggtttccagcaaagtgtgaattgcctggagacctaccaaggtgtcaagtaacagaattcaacaaggtgttaagaacaagaaaaagaaacagacttcattttgattagttgaacttgtaggtttgactaaactttagacagtggaaagggtgttgtaactgttggctccatccttccaaaccaagcttctctgagagaacaccggaccagctgccatgttgtggatgtgccagtggctgcacccaaggcttggccacaccctgtctggggaattgtccagcttttcctcatctctgctgtcactttgcttttaccatttcttgctcaaattttccatgtctcaaagataaaacaaaactcaggcaaacccatatttaatatcctggtgactatctttagtgcagtctagtctataagccatgtttaggtgcctgcacatgtatgttagccctaatcacccccgtgcctcacctccatgttctgcatctgacttcactcctgaatatgctctaaataaaaggagttaaattggcttcgtgggaacttgtgcccttgttccttgtgtgccaggaaacgcctgtatctctgtgtcaggaatttcgagcttcattgcatcatcaagctcttttgtttggaagactctagtctgctaccatgaactcttaagataggataaattaattagctttggaaattaatgctataagcataaaacgggatattattgcagaagaatagcagaccttaatatcagaaattttgttttgttcccagaaaatgaatctaaatctatttgcaaaggaggatagttatttttgcacaaaatgacctaaaatgagtgtatttatgaattgcttttaatcttgaggagactaagttatttcatctattggtaataaaagtttcttcttaaatagtgttttatttccaatgcagttggtctcattacaagtaaacctggaacaatcatactgtacctttttttccctctggaacgttatgcgagtatgctaaatctgaacattttgacatccttatctaaaaatagtctgtgaaatacttttcatttcttaaatttagaaatagatttggaggcactttcaatgaattatttagccagtcagtggaaagttttcattttagaaaaaggagtaatcacgtagaagatgactgaatttataaaaataattttctttcacgcctaccaatacatgtgtgttctttctctgcaaagtaacccattgtaagtgcagttctcctaggcaagcactgaagggtggttgttgctgctgcatagtccaagattaaagtgtgaatggcctgtttaaaatgtaagaaccaaagattggaactatcaggggttgtctaagacttatgatttttcattaaatatttgattttgaaggcaaacaacacaccatgcaaaagggcatgctgaataatagttctgataaatccactctaatttataggggagaaactcttagcaagataaaaaatcaaaaggaaatttcctatacactttataaaatgtttataaaagcaacaacattttaataaaaatcgctaactccaaattcttaggaatgtaacattggaggaattatcattaagacgaagactaaagagggtgtgtgctcttaattctgttgggtaacactgtacttaaccaagctggttgaacaaggagaaaaatgaaagtatacagaaaggataagaaaaaatgatcactaattgtggctattacacattgaccttgatatataatagctgaatgaattcggccatgttatttaacctctctaagctttaatatttaatttttcaattgagaatattaataccatatacttcacaattttgttgttaaaataaattggataatgcatataagattattattttacaatagttgacagagagtatgccctctgtaaattttagtcatttttagtattagctcctgataaacgagagactcaattgaaaaccactagcattaatggagggattaattacgttaggagtgaagcttaactactttccaatatataaggaacaaaaagttagcaaatataatggggcaataactttatttacatgaataatatatctaggaatattttatatgaatatatcagcaataatatatctaggaataaacataagcaatggtcagaatttccttggcattaatcgttttaggtcagttttctcaggtacttaattgacccttaaatatatagactcaggtccttattaatttcccaactacacttgaattgttcagaatttcttgaagaaaactatcaaactttaaggaatgccataagagaagctatcaatgcatccaaagataaagcacattcccacttatgaagatgcaatgttctttaaaaagtatcaaatttcccatctttaatctctcaaatgaaggcagtctcaaccaaaatacacatgcaagtatgggaagattaatcacatgtcactaacagtatggaagatacacaaacaagaataaccagggcagttatataaagcagatctgtagagaattacttgaatttttgtgatattaaaatgtatatggtttataattaaaagaataaaaatggatagctggaacagaaatagtttcaagtataaatgtgtcatttcgaatcagtgggaaattaatttgagccttcaaaaaaagtgttagctaaccatttgggaataaaaacaggaaattacagtttccagtttcagtattctagtgtcagtaatatctagttgaggcggcctcataatctaaattttttcacacatccctccaaaaaaattgcatcaataaggagagcaaatgaaagcatccaaaagtcattcataattcatccataatgaggagagagaaattagcaagcacctatgtaatttttatgttgagaaataaactttcacatacaagctaccagcagagccggatatggaaaccatgcccaggtggaattaggaagaaattgcaccgaaaaaaaaaagttgcctgaactaaacaatgttcttagtgaaataatgtatttaatttggcacaagtttcttatatttatttaaccagttaccagtcggtagacaacactttcagtagcaccagactgaaggaccagaattatctaagaagaaatgactgaaaaacatagacaaaaggacttagggtgtccattgaataagtgaatatactgagttctgcagtgtattcattgaaactggaagcatgggtgaacatttacagtgttttctaggacaccttcattttgtaaaacaaaaacaacaataatagtaaaaacaatattatctcttttcaaactttatggatactctgtagatccgagagtaaaatgaaagtagagacaagtgtgggagaacagtatatgtaaatgttataatttctgaaaatatagagataatcaaacttataaatgggagtagtattgacaaggatatagagtaagtaaaactctttttcttttttcgtttttttttttttttttttttttttttaagacagagtctcgctctatcgcccaggctggggtgcagtggcacaatcttggctcactgcaaactccacctcccaggttcacgccattctcctgcctcagcctcccaagtagctgggactacaggcgccccccaccgcacctggctaattttttgtatttttagtagagacggggtttcaccgtgttaaccaggatggtctcgatctcctgacctcgtgatccgcctgcttcagcctcccaaagtgctgggattacaggcgtgagccaccgtgcccggccaagtaaaactcttatacaatgcttttgataatgtaaattggttcaactacttgaaaaactgtaaattagtatctactatagttcaacatgtgcacagcctactgcacagcaatttcattcctcagtttatattcaacataaatgttaaaatatattcatcaaagatatgtacaagaatgttcacagcarcactgtggtagtagtttaaattagaaaactacctacatgtccactagcagaagaacaatgaaataaagtgtgctatatttacacaatgggatgctagacagtgatgacaatgaagcaaccataatgattacattcagagacatggccaaatgtcacaagtataatgttggccagaaaaagccaagcataaaaggatatatgttgtatgagtccattcatataaatcttaaaaatagccaaaattatccatggggtttgaaatcagagagtgttttgttgttgttgttgttgagatggagtcccgctttgtctccaggctggagtgcagtggtgccatctcagctcactgtaacctctgcctcccgggttcaagcaattctcctgcctgagcttccccagtagatgggactacaggcatgcgccaccacagccagctaatttttgcattttcagtagagatggggtttcaccatgttcgccagggatggtctcgnnnnnnnnnnnnnnnnnnnnnnnnnnnnnnnnnnnnnnnnnnnnnnnnnnnnnnnnnnnnnnnnnnnnnnnnnnnnnnnnnnnnnnnnnnnnnnnnnnnnnnnnnnnnnnnnnnnnnnnnnnnnnnnnnnnnnnnnnnnnnnnnnnnnnnnnnnnnnnnnnnnnnnnnnnnnnnnnnnnnnnnnnnnnnnnnnnnnnnnnnnnnnnnnnnnnnnnnnnnnnnnnnnnnnnnnnnnnnnnnnnnnnnnnnnnnnnnnnnnnnnnnnnnnnnnnnnnnnnnnnnnnnnnnnnnnnnnnnnnnnnnnnnnnnnnnnnnnnnnnnnnnnnnnnnnnnnnnnnnnnnnnnnnnnnnnnnnnnnnnnnnnnnnnnnnnnnnnnnnnnnnnncaaataagtataatgaaaaagcaaagaaaactgcccatatagagaaaaaacacagtaaatgcagtattatatacacagtaaaattaagataaactacttggccaagttggaaactttcaatcatatcattaaatgtaaatgggcttaactcacttataaaagaaaatttaaaaaactacaaaataaaacttaactctatgctttttacaagagactcaaagtgattccggaaggctaacaaagaagaactctcagttgtctcctatgttttgttcctttcacatgcctcattattgtgggattatttgtgtttgtttttatgcacttacttgcactataagaggctcacagctgatcttggatgtttcttgccccagtcctagaatcagccatttctccaaggagagtcaaagctagaagtatttgaacaccattgggttataatcatgagtccacactgaaataaacaagtgattaaatagataaatgaggagaatagtcaactctttcctgcagaagaattccaaataattcatgtagatactctgtttttaaggaaagagagcagaaccgctcactccttaagtatgggcttcacagggtaacttactaccaaagagtacagtggaaagtgaggggaaaaaggataatttacagtggagaactctgacmagcattacatcagcccattaaccaaggtcaacaccaacagcaaaaactcatgttgacagtgtgtccccgtgctatgatgtgatgagaatggcactttacccaggtagtctttctccgtcaagcacaaaatcccagtaaaatcaggagaaaaaacaccaggcaactttcagtagaggaatattctacaaaataccttattagtgttcttcccaactgtaaaggtcatcaaaaatgaggaaagcctgggaaattgtcaggaccaggaggatgatccggaaacatgaggactaaatggaatgcagttatttctaataaatatttacatatgtgtttcttagctgtggccctagaaagtgaatggaaaaacatggcaccctggggaaaggtcactccacacacctagctcctgcttaaatatttttccccttaaagaaactgggatccttgcagaagttcttgatttaggtctgagatgaaaaagcattctttgaaaatgatcaacacaagcttcatcaacagggagagctgtgtctctgaagtgggtaagtattctaagttcgtcaagtgatttcacagttggaatgatggtgcagggtttctgaaaacgtctttatgtgtgttttmaargatgattttcagcatcttttttttgttcgcaagtaacagctacaatttaaataaaagcttttttttwaaaaaaaaaaaaaaggtctacattttcttccttcattggacttcctgctgaggctgttgacaagatgttttgtttagtgcttgttctattctatttttccatatgaagcaagaggaatacagaagccaaagtcaaacctggctgctttccctagaggtcctaagcacacatgcacagcatgaactcgatggaaacacttaagcatgcagaaggatttctaaagattaacaaccttgaggcataagatggtgtcattcaacaaaagaaattattaagatattgatgcttttcaatcagaatcatggatctttttcaatgtcaacttttttgacattttttagttacatttttaaatggtgtaatctggcttgggaagaagtttagttttgatatagaataaaaaatcagaaataatttttaggaaactcagtggatgagagaccatgaggaatgataatgacataggattagatgtttcctcatatcccatcaaaaaagaatgagattcccccctccccccccccccccgccagtaacttcaagttatgttacaaaggaaaaagaatgttgcagggggaagtgagtggggacttttgaagagagagggctcacttggccttgagtccaccttcagccttggttggcctggaagtccaaggggcgtccaccaggcagggagcctgcaggatcagtggattatttgcttcctcctcctgccctcaggctaggtccactaacaggaggacccacactctcgtcatttcaacacccgggcatcacactaaatggttccttcatccagacgcagagagtctctttcctaagctggggaaatactattcacgatcaatgggagactttcaacatggctgatctacctgggaaggaaaccagacacaaccacgctgtaccctggagaaggaactaggctggtggatgaattaaaagccactctctggtcctgatgtgtgccttgtgattacagagcagtgtttacaaccacacttcttcaaagacagcaacaatggtgagaaaaaaggatgtgatccctgatgaaaaccacacacaccaaatgcaagtgggactctgccctccctctgcctaagcacactatgctatttacttggtggcagtccccagattaaggcagggcagcattagaggctgttccccaccgagccccacatatgaggccagggagcagcccctgctatggacactttcgtcagccagtgatgaccaaacccctccagtccagagagtggagaaggcatccatcatctcacactgccttcctcaccttgaagccacctcttactcccaccgtggaccaggacagagaggcaggcttcaggctgccactttcctcagcatcacaaggccctcttctgtgcttccgggctgatctcttggccctgatggccgatgataccaagagaaagagatgggcttaaggaaaaaggaaattaagttttggggtcattcaaatatgtgttcattagagactagttagtggaatgctcgtgttctgtgaattcatggttttacatttctcttccaggataatttgcccacacatttttctagcagctcctttgaagcttttcaggagaagtgtgaatgaccctgatactcatctagcttttcccaatactgtgcttgacactagtaaaatcacccagtgtccttggatgtcagtagagcaaaatcgtttcatgtgaagaatctctagcacgatgctttgcaggcatcgtgcctctccctagaaagttcttcctgaggcagttgtattgatatggtattgatatgataaaactgttgtccttctgagttcctgtggcactccctgcggataatctgcaactcctgtgcctttgtcrgagctgtttgtctggtgcctactgcagccccagctccatgagattgagattcgctttcctttgctccccttgtatccagtgtggaatgcagagctgggcacacagaaggtgcttgataaatgtggtttaatgaatgaagaaatgaaatgacgtctgatctcactggacttcatctttacccagagtatttgttccttgatttccatgaattcatgtcagtctcatataagtgcttttaattgttcttaacactctcctctcaagattttagaagtgcctgagaagtatgcagtraattaggtattaaaatacttggccattcaagtgcatcaccacagatgcagaggtgaatgtttataagtagaggtgacaatgagaaaccaatcgctcgcacccctacctctgcatactctttcagatgattattaatatatttgaactttttaagtaagacaggcttcatcttaaagtcatgtcagtttaataactgcatgtgagttttaggctgagcatagggacaagaaagctgccagactcccaggttttgacccacatgctgccgcctgccgttggggggatctggacaaggtgcttcacctctggattctgtttccttatccattaaatagctcataggactgttgcacagttatgtcagctgtgtcgatgactattaacatagagaggaagaaagcatggcccacgcagctgtggtgaaatggaaaagtgtttcgatagtagagatcagcgccaatgtgcatgtgggcactcacgcaacaagagcacattgcatggacacctggttcaacccacagtcaaagacaagtctttaacatcatttaaccactttttaaaaagaaggcaggggtggcatttcaaggagagagaacagaatgcaggaaagcacaggctttttcgagagcagcagacacacccgctcactgtcctgggtttgtcctttgcgggagtttaccaccgcagaaagcaatcagtgaaaggcatgtttcactgaggttttggctgtgctcctgatgtaggtgcattcttatgtgaagaggtatttcagctgccctggcttctgggattgagaaaaacatctggtgggcttccataaataatatcagccgaaggcattctgactcccagagcttcatgttgttccgggtatgggttaaatgtgtgctcacggctacctcttaaatgaagaacctgtttgtgaaacgacagagccaaaatcccttatgaaccagaaaaagataaataaataaaaataaaatggatccaaacacaaacccaaatatcaaatgttacagaatctagaacacaatattccttttgataaaaccaactgagtctatttcaacatctgccttttaaaagggatagaattgtgaaaatacgcagtgtgaaattttcccatttctctagttaatgttggactctggaacacaacgcctatgaaggcaggaatttatatacacctattaatatttaggtaatagtaaagtcattatcaccttaaaattaacactgttcagcaagaagtaccattttttcttatctttgaagtgatttctttctttctctctctctttcttttttctttctttttttttttttttgacagggtcttgctctgttgcctgggctggagtgcagtggtgcgatcttgggtggttgcagagacagggtttaactgtgtttcctaggctgggcttgaactcctgggctcaaaagatccacctgtctgtacctctcaaagtgctgggactacakgtgtgagccaccatgcctgaccaaaaattgcagccttattattattattattttttaaagtatactactgcattcagaggaagagagggtttatttatttttttaagacaggctctcatttagtcacccaggctggaatggagtacagtggcaccatcacagcttactgcagcctcagcctcccaggcacaagtgatcctcccaccccagcctcccgagtaactgggaccacaggcgcacaccaccatgcctttctgtggctaatttttgtggtttttgtagagatgaggttccatcatrttacccaggctggtctcgaactcctgggctcaagcaattcttctaccttggcctcccaaagtgctaggattacargtgtgagccaccgtgcctggcctgaagtgattttaaagtaatgcaaagcctgttaagtgtgtagtttttattggttttcatgatagcagtgattgaatctcattgttttaaatagcatggtacatgtcatgtcgtaagggtgttataaacctgaaacttaatcctgggtgtaaataaggcttagaaagaccacgtcccgtgcaaatcatggagtcccatataaatgcgagggagctgctggtgcagtaggcagtggtgctttaattattgtcaggcagtggacttgctcattagaggcccagtttgcacgaacatacaggggagagcacaaggtttcaggcgaccatccccctgatgggttggagccgaggactgtgcaggaagatgttatgtaattcaagaaagccccactgagccaacgcagatgctaaaataattcatgttcgtagctcacggatatgcatctttcctattgagattgtcctctttcagtaaggagaaaagcaaacaaaggcatttagaacttggagggtcttattgtggtaagagcccattctacaatacactgctccactagatgctgatttatgtctttgttgaatacacaagtataaaacggagtcccaaaacaatatttgtttttaaatgaataattcactcattttccctgcatgagcttttctcatctgaagcgctggcctttcagattaaataaatttaatgtttcaaaagaatatggacatgaatattcataaggaccaaaacagtgaatataaataaaagcccttttatataacattttatttttttttttatgaagaccttaccttttttttttccccacttctgagatggtacaattcaaagcaattttccaggacatcatttcttctacaaagccaacctgttattgagggcgtgatcacttattttccaaattgtttcatgcatcactattttcctttacatacatagaaataaggtagtatttgccaatggcatagtctattagccatagattcagcctagtatggtgccaaacactcaacaaagtgtgtaaacagttggaagaatgccaaatatgaagttaaaaaatcatgtaccttcaaaaatgtataactagtttttacatataaaatatgcagactatttttagatgtttttatatataggccagtgatttaaaagttaaaagccgtcatacatacaacacttatgttattatatactggataaacaagcagcaaagattcccttatctccccagtccttaacagtaggatgaaacagctggcatttgaacagaaaaagaaagataaataaaaatgaaggccatggttaccattgcccgagaaaaaaatggtttaagaaaagccagggcactgtgatatttgattatttgttttgatggaatcgtcagtgtattcctatttaagtaattcctaagtccgagtgtattgttttataatactagctacctaagtgctgtaactttctctttgaacacgtgggcttagaataaatccttgatttaatggcagtgtattgtataatttgaatctgaatactaatgaaagtgaagttggaatatttgcgatagaaaggggtaaatgtgtgatgcgttgctctttttttttttttttttttttttttttttgctctgtcacccaggctggagtgcagtggcacaatctcggctcactgcaagccccgcctcccgggttcacgccattctcctgcctcagcctcctgagtagctgggactacgggcacccgccaccatgcccggctaattttttgtatttttagtacagacggggtttcaccgtgttagccaggatggtctcgatctcctgacctcgtgatccacccgccttgttcttgactgatgtctacacgccaagttacagaggtggggatttcttcacacgcgggagggcttgtgttcttccagtgcacatcgaaagggagccagnnnnnnnnnnnnnnnnnnnnnnnnnnnnnnnnnnnnnnnnnnnnnnnnnnnnnnnnnnnnnnnnnnnnnnnnnnnnnnnnnnnnnnnnnnnnnnnnnnnnnnnccgagatcataccactgcactccagcctgggcgacagagcgagactccgtctcaaaaaaaaaaaaaaaaaaaatggtaacaaagccacttttgtaaaaacctagggtagaaagttatttactaccttctgaaataaatgattaaaaaatcattacaaggtacattattttctcctaattatgtaactagaaaaataagaaggaggcactttctgataaacattgctttacctcgttgcttccaaataaactttctttctttgcatttgatgagaaaggtaatttttaaggaaaaggacctcctggtgttggaacgaggtgtttttgttaggacagatggattctcaaggttctgtgtattttgaacaacatgaataccccgtgtactgagtgagcttacctcatggtgttccattaaccttcagggattatgtatgaataatgttcgacttcagcagatcatggcctctttttatgttgccttatgactttaggcgactacttaacccctcagtaccttgtttttcccaattgtaaaattaaaaaaaaacttgccaataaagcctgcttataaaatattttcaggtagacaaaagataattttaagctgacaattttttttttctatatactgagagatatttgtgtaatatttcacttttttcagttcttcttctgatgtttctaaagactttatcatacaattcaaagagcttgggaagcctggacattatgggtaaatggctaccttagaagctgctgtttaccaattatttttccaatgggtaaacattttgcctaagtccttctttgccagtcacgagcataattaccaatttttaggtttgtgttaccgtaacatcttacttctgaccaaagttttattagttaggtttctgctctgataaataatactgaataacaagccccaaatctcagtggctattgcaatataatttatttcatatttcacaccccctcgtcttcaggtcggctgagtttgtctgatctgtgttagccttctccacaagctcagcaggaaggatgaactccagaatttggtttgggtccagatctgctccatgtgtatttaacccaggactcagttgaagagatgtgactttctggaccacaactgtctcattgtggaaatccagagctccaagagggctggcaaaaatatggactgaggcttctaaaagccccagttctgaactggcaaggtgttgttgccacccatattctattactcaatgtgagtcacacagccaggtccatgcccaggtgggtggggagcacacttcacctgccggcttccatggccgggtgaggaaggagaaggaactgtggtctgatcaggcattccaccacatcttctacattaggaaaccgaggaaaatgcaaggaaggggcattgtgttttcgtcctcatgttggccaagaaaaccccctccaaaagaagtctttcacaatctgaataggtactgggggacacaggagtactatgtgggaatggtgcactatgattccaggcccaaggaacagagtttgctttaactacgaagatggagatgatagcccacattcagtcataagacagtcatttgttaattattggtagaaagtttgcagactttaactaaacaaattaggctttcagagagatcctgaagttaataatgtttgtgttagggaaaaaaagaaggtttgggaaatcagtggacaagtttggaaatagggcttcactctggaagacttcagagctcttaagagcagggagcttgtgctatctctaatagctaagaaaatgcatgtatattgtagagttaaaaccagtactggtgaataaatgaatgcatgcatggtgaatggagagggaagatgacacatatggtatatggatattcacagcaaaagaaggaatcaggattaggagaagaggaggagaaatggggtcagaatccacagccaccgtcctttcgcacagcgtagaggctgagggttcagaacagatgaagagctggagaagacagtcagccgtctgtattccctcaggacacccattttttttaatgttatatcctactattctttttctcaagctttttaaaatgcatgacatacctcctacctattttaaattttaaaaagcacagtgaaagttattgttttacctctgattccatcatcaatctctctaactctgaataacattttcagaagaagaatgaaagctacccagtgattcatgatttgatcgttactcttttgaagccctggctttccatcaaagaacataatatgtattcttttgcttaataatataacatttaaagaaatattttcacattctatagagttgatattctaagcctaaggtaactgtatgggaaagataaaatcttttatacaatctagtcatcaacatgttcctgagcttttatttttaattatgatcataaaaggttttattaagtagtgtaaagtgaatttccaagaatttccaattatgcttttcacygtaagaaagatggcattctacttaagatggtcaggtattgaataagaggtattatttggtgatgcaaacggacagtttggttaccttttctgaaacaagagctctccgtcagtaaaacagaagtagcagaatggggtaatgatgacacagagaaggtctgaaaaaggccagagtctcatgtcctctgtaattgttgatgtggtcctttttcttattaagtagaaatgaaatttaaaggaaatatgtattttttcaatggtttttattttaaaatcaacttggtttggaggtgtcaagaaatagaaactagtaaccaagtcaaaagatgcataattattcttcctagttcactgattcattgatttagtcaaygtttatttagcgccagactttgagtagaactgcatggcagagctgaatgaatgatccttatctggttggaatattggaaactcccctgcagtggctgtcactatagcaagagtaactctgatcacaggactcactgacaacccttcggagcagtgtgggtcacaggcacagcacctgggaagcagggttaccatagaggctgattcagtcaatttagggyggggtccaagagagtatattcctaacaagttcccaggtgtggctaggctcaggcccaagcaccatacttggtggtaacaaagatcttgagctccacaaaatcaaataggatgcagtgtcattgttgttccaggaaatcatgggaagtactgaggatgctggtacctcccactctgtcagtgaactggggagaaaagggcagatggtgcagctctccaggtaaaagtcatgagacccaggttaccaaatgtacagaacatacagtggatgcaaaggagttgatttaattttcattacttgttctaaggtggttttacttacttacrgtgtgtgtgtgtcttttagtgaagaacacgatatgaagagttgtgatactctgctttgttactgcaaagaggttaagatgagcmgggataaaatgactgccatcgaggtgctgcctgaggcactagggaattaacacgtgtgtgcagcacctgacacatgccctggacttccacgtcgctgagaacctgcctctgctcagtcagcctccttggggcttccctactcataaccttcaagtgttactatgcctgaagtgtttccttccttctttcagcaaatcttcattgaggttttttaggtgctgggtagaattcacaaatgcagggacccatcccaacagtgtccttgtccccatagagcctgcatatatatgggggaagacagaagataaaaattttcaaaaatataaaaaaaattaaaaatgtaaaaataaacattctaattgcaataatgatataaagaatgtaggggccaggggcggtgcctcacgcctgtaatcccagtactttgggaggccgagatgggcagatcacgaggtcaggagatcgagaccatcctggccaacatggtgaaaccccgtctctactaaaaatacaaaaaattagccgggtgtggtggtgcacacctgtagtcccagctactcaggaggctgaggcaggagaattgtttgaacctgggaggcagaggctgcagtgagctgagatcgcaccactgcactccagcctgggtgacagagtaagactctgtctcaaaaaagaaaaaaaaatgtagtgtgattagcaagaaagaaaacgaggggttttttagatagggagatcagggggattctctctggggaggtgacaattgagtggtaagcttgaatgacaagaaacagccagccaaggaaagatttggggaaggactttggggcagaaaaacaaccactgcaaaggtcttgcagttgctcagggaccagcaggagggccggtgtagagggagtatgaacatggcagtgatgggagttggtaggatgggagactggagatagcaccaggactagatcatgagagacccttattggcatgataaggactttgaatttattctaagtgttacagaaaatcattggaggggccagacgctgtggctcacacctgtaatcccagcactttgggaggctgaggtgggcagattacttgaggccaggagttcaagaccagcctggacaacatggtgaaaccccatctctactaaatatacaaacattagccaggcgtggtggtgcacacctgtaattctagctatttgggaagctgaggcaggagaatcatttgaacctgggagatgaaggttgcagtgaacgaagatcacgccatcacactccagcctgggcagtagagcatgactccatcaaaaaaaaaaaaaaaaaaaaaaaaaaaaaaaaagaaaaccatcagagggctataaacagaggaggattactgttatcagatttaactttttaacatattgttttgacttctgtgtggaaaattcattctaggggacactggtgtaagaaaggctgtttggatgctgttgtaggaatccagggatgatcatgtgatttggatgatgttgtagccacaggcaggagggagtacatgggctctggatgtttttgtagggatggaaagaatgaggaagagaaaactattaagaatagttcctaggtttggggattaggggttttattaaatgagatgggagagagtacaagaaggacagagattcattggagttggggcataaaatattccttgtgaaaattgcatccacatattccaggcctgttttgataatctagagtctctgtgtcatgtcttcctgtaaataatattaacaatttggtcataaggtctgtgtaatccactatggtatatgaacatgggaattaggagttcgaccttagagctgagccagtggagctcagcctgcagccccatgtgaagttctgtgaagcctggggaagccagagtcattgaaaagagaatggaatctaagagacctgtggaagcatctggaagcattgagacctgaactgctgctgaaacctggtccagagatccagacctctgtagaggagatgaggagatgtcagactggagacacagtagaccctctcttggttgtatacttgtgggtccgcctgggtctttgacatgggaagaggtgatttctcaactgaaccagagctgggatgtgatggaatttcagtgagggagaatatgtggaaaatacatgacacacacacacacacacacacacacacagagagagagagagagagagagagcaagagagagagagagaaagatctggggagagaggagaagagaaaagaagttaaacttgagaaatagggtaatcataaagagatactcaaagaatctgtaacactgacagtttagcattagacattgggatggatgaggttcccccaattaaacagaagatggctttacacagttgtgatatttgtatgaaaagaacttgtgactcagagtaatccttatgtgaagtattatcaaggaacaagataagaaaataatcatctaggtgaaaacatgtttattgttttgcagattttgttatcgaaaatgttaaagtacatttccactatacagctttctagttatgtttccagaaagtttaaacaatgtacctaattaataaatggtatcaaagtcatcagtattctcaaagtcatcaattctttgagatatagatgacatccaatgagaaaacattactttgaacttagaacttaccattaagaatgctcaattagattaatatgtttaagaattctaaatttccttggactatttttactaaattttggcatttctagttgtattctgcaacaacaatgagatacaatgtataagaactataytgcggtactrttgttggaaggtataattcctgtggtttttggtaaaatctgtgtctttgaaaattaagttactactgtaaatacaatggtatttctaatttcttagattttttggagagaaaaatgattttaattgctctgcctttggttataaaatacattatgttcactgagatgttatttcctttaatgttactagcctaacaaaaataggaagtatttctctgatggtgtgttctccacagaaccactgtgctttctgtagctaatcttgattagcttgctgattctgcttgcttatacattccagggaagaatgcaacaaatggaaactctccattcatacattagagttgagtgtcatttgaaagataaaaccagaagcttcatcttttaatctatgattggcatatttgggaatattttggcctgtcattgcactctgaaagaaatactgagccacactgtgaaagtccatggaccttgaagcagaggcctgagacagagtggaaccctgatagacctgatgtgtgtagaatcaagtcaggacctatccatgaccgtgatctacatttgcttaagctgtacctcaactcttctccattttcatagtaattttatgtccaaaaagtaaaaatagaatatttctatcaaattagtttggatttataaattgtaagtaaccttgatattatagacacttgcctttcatgtctgactcaggaatggaacatgggatgtgaagtgggcagaaaatacttgagatctaaaccctggtttgcttacagcataaacctgatgttatgggttgaattgtgttctccmagaaacatatattgaagtcctaatccgcagtacttgtgaatgtgacccttatttgaaaatagggtctttgcagatgtcatcaggttaagatgaagtcatactggatttaggatcagtcccaaatccaatgactggggtctttatagcaagagggaaatttggacagagatacacggagaagagaacgctgtgcagaggcacagacacatgggagcaaggccatgtaagatggcagtggagtgatcagaggttgctcaggattgctgggagccaccagaatctgcaatagattcttcctcaaagcctccaggaggaacaaaccctgctgacaccttgattttaaatttttagcctcccaactgtgagagaaaaattttttattgtttaaagccacccactttgtgataatttgttacatcagcctcaagaagctaatgcacttgacacatgatctgaagaagccatgaaatcattggagcagctcgtcttccaagtcctatgctttctgcagcctgcctttgaagagatggattaaatggtcccttccactctacctttgttcggctgcacaattatgccactgccttttaaaaaattcagctcagaatctcattagcacaaggagctcttactgcacactcacccagggggttatgcccaccctccagaaagaagatgagcttgagcttggctccacaaaagagctttcttcatgaaaaagtggtgacagtgttcatgttctccttgcctagtgagtttttgttgtatcaaactcttcaaaaatggccttctttggaagatcttatgttttggggtaggcaggagcagatgtgctgagtcaagagagttgagtgggggatttgcaaggggccagcttctctgggctgagaacacgggctgcccaaactgagcctgctcctgattcaacccagtatctgctgttgcctgccataggcatctgacaaatgtctgtccagttgagtgtttcagtgtaattgatctactaaataaagaaatggtaatttgaagattagcatgtctatagctaatggcgagtccagttggaacaaggaggatgttggaatgtttttagagatgcatttggtgagtagatgctaatgaggtggtcatggcttggttcatattaggatgtataatagtctttcctgcagacagcaaatattcatgaggcatctaccatatgtgaggtactgtcctgggcactggggtctcggctatgagtgaatcaagttcctggttttgtcactatgcttacccatgtcaagggagaaaattaacaaataaatggggactttaaatgctgtgaataagtaaagccaatgaagaggactagagggtgtgggtggaggcaggggagggttttccattttgtgcaggtggtctgaggcaagctacaggaggttttcatccaagggagaaacacgtgagacctgtgcattcagaatcatgcatctggcagtagaatgctatctggattagagaaaggatggtgttggagcaaggaagaactgaaggagcattactgcagcagcattagacaagggctcccatcctgccaggagggagagcatcagtggggaaatactagagtcaaagatggtgcacccattgccatggaatattttgcagctagtaaaaagtaaataatatatttgtgattatagacctggaaagaggcccatgatgtatagttgattgaaaaaatgcaaattgcagagtattatatataaaagcacccaatttttataaatatgacatcagtaagacatcccatgagtgtgggtgtgtgtttctgtaaacttgatatcagtcaggactagttgaactgtgcttaggaattccgggcttaacatcacaaaggaytgtcaccactcacatgaacacaggtttgtgtgggtcagctgagagactgtgctgctcagtctgggtctggggacccagaatggtagaagcctcaactccatgtttccatggttgccagggaggcaagaggacatggctaacagtgcataagattttaaagtttccactcgcccctcacctaactgaaatgacaatagtgaaatgcaattatattacatgcccagaaggaagaaagcaatagttatttgtaaagagtcctgatggttacccgaggcttggagaaaggcatggaatggacacgaaggaggaagggtacacactctgtttcccttgtttgcagcagggcaaagagggaaagagtatagaactctatttcctaacaaacagaaacrccagtaaccagctcagtgaggtcaggatggagagaagcagacagacagagacaacccactggtctggaatcctaaaatgagaagaccctgtttttgagtgtggctgtgaggagagaattttcaaaggtgactttcaaggatttgcatctgggtttttggagacagaggcattatgggcagacttgagttatcctgcaagacaaacaggtttaagaacataaagaagctcttggttgatttgaaacttgtggagcttgagatgcaagtagaagatacgtaggaagataggcatgtcttgcaaaaggcaagtgcggagctggagttaagagacacacttgaaacttttattggaatgagtgctgttgcctcagctattgtgcaaacttggggtttctgcagaggatcacaggaatgagatccctggctctgcactctttagcctctggacagaggtacatctaaggggaatgkcatccatggggaatgtccccatggtaacatggaaacccaagagatagcattcgactatctggagctttttacccacacattctttacatgtgccaaatccattttagttttacatatggccctatttgaagttgcattggaaagcaggcttaaaaaaaatgagaactctttgagattaataaggagtgaagaacattctccctatgggactcgaagctgcagttgagtttcttcctccctgtcctgcctgccgaacactccccaagcaccactagccaaactcctgaaatgctaccacggaaacctctgatttgatttaatgcaatttgcgcaattgacccttgaaaattaattttgccatctcataatgaatacttaacagggacttctgtattcagaaaactgaagatctattttccatttggttattgtggataagccttccacagacttccatttcaaggctcaaaatatttgccgaagtatattttaatggagacggtattagaattttaaagttatccaaaattaagctactcaaaagttatgataattttaaagaaatgctaaaggtttttgcatagaagcaaatatgtaatcataaaagagaggttctcttttgtaattgtcaactctggtacctgaaattattcatttaatacctgttgtgggatataagattttacataaatgttatgtgtagaaaaaacagtatcttaatcgaacatactttctgtaaattgggagggcaacacagagattccaaagtaaatttcatttgctcaataagctataaatacacaacaattgattttcccattcctaaagaaacctttctgatagctcagtggttctcagtcagattcgttggagacctgggaaaggatctgcacagcacaccaccagtgtgtgctggtggtagctcttagtggctttggaagatgattttggggctagaactcatgcatgttccttccttgggaagatgaagtgagggaggtgccccagcctgcctgtgtagatagagcatcgcttactacaggtccctccaaaggcatgcctgatatgtcttcccagccaaactttgcatttttatacataaacggtctaagacaatactttttgccttggtttcacatcccaaatatggaatggaacaagtggaatgcatatgatgctaaataataatgctttactgaaaaaaccttcagagtctttatttttaaagaggtgaaagaaaaaatatttaccagaaaaaaatattgctatggcaatgtgttcccccacagtttttggcctgagggcccttttaaatatagattgaatgggaggagacgggggcatgaagcagatggtccatgcccaatctaggcttcctgatgaggattccgggtcatttttcccactcacagtgggtttctcctggctgttgtcccaagacggctggactcagaagaattagagaaggtgctcagagtccaccctgttgtctcctcccggtgagggcaggtgcccttctctcaggacgcagactgtgagatgacagctgcttgtatgaccatctcttctgctgggccctgaggcccctgagagctggggctctgtcctgcaccctccacctccagaacctggctgcatttacaggagcttcacacaggcttgcagaatgaatgcttcttcaggtcggagtgccttaataagcattcattcagcaagcctattccaaaaagcctggagtgccaaatcgaagagtgcctcttcaggacccacgtttatttttaggctatgtctcctgaatctttcctgtgctcttttgtgtatgacaattacataaatacagctgatcagacaccaccctggaatagtgaagtggtgacagrtggttcttttcaggttgtaatacgtggtgcagattcccaggagagaagaagcctggttttctcccaggcttccctctttaaatccgtcaggagcctagcttattgcccacattcttctcaggagctcacatccatacttggtaccagaagcgctggcgtgattgcaccacgtccttccagctgtgcagcgcttgagcgtccccttcaggtgacacaggtcacactgaaagtggggcatgctttccttagcttcccttctgcttggagtcaagagccgcatgggaagctggccacatgtcccattccctatttccctgacctcagtcccttccaactggattgttcacctttcatcctttttgatgttcttctatctctgctccttttgtaatgaaaatgatcgttttttattacctactaaaccattttctttttcatgccaaacatttctttgagaggtttcrtgttgattgttttgattgagctgaaattcacacaacataaattacccaatttaagttggcatttccaatgttgtgcaaccaacacctcatctggtttcagagaagttttcatcatccccgaaggaaaccgtgcacctagtcagcagctactctccgttccccagccagtccccttcccccagctcctggcaacccccaatctgctttccatccctatgggtttacttattctggatatttgatgtaaaaggaatcatacactatgaggtcttttgcccagattttattcacttagcatgtttttgaggttcccctgtatggtagcatgcattcgcatcttactccatgttaaggctgaacaatattctattgtgtggatataccacatattgtttattcatcctgtgataaacatttgtgtttccaccttggggttgtttgctaggaaaatgatgttatgaaatgggtgtacatttatctgtttcagtacgtgttttcaattctattggaaatatacacaggagtagaactgctgtgtatgtttaacttcgaggaattgccactctgagttccctggcagctgagccatccacaggctgttttattttgtttgttacatacccgtgctctcggcatctgctttcactaactccccttgatgacacctgcccctcctccatgggtctccaccctgtccacccccgtccccgatgatgcctgtccctcctctgtgggtctccctttgcagtttggtagatcacttcaagaatcctcagtgcatgttctaaagcaaagatacagaaccctgatagtttaggaccagctttgcatccatactcatggagtggtttggataccaaagtgaagtcccaaaattttgaaaacaaacttttctccatcacaacgattagtctgttattgtaatccagtggacttatttgcatcgactgccctattttgkctatagattatttctaaaatgagcrtgtctcatgctgttctatgcagcctttagtggcatggaaacaggaggctcttagaaaccagaatatttggtgactcttattgttcttcttctctgcccgtaggtatcgttcttcctcttcatcatcttcgtgktgtacaccatgctgcccttcaacatgcgagacgccatcattgccagcrtcctcacctcctcctcccacaccatcgtgcttagcgtctgcctgtctgcaacaccgggaggcaaggagcacctggtctggcaggtgggtgcacctccacatccatggagaatgactttccacatcccaccagggggtgaggcaggtgctgctgrcccattcagggtgtgtgtagtgtggtacctgcagctgttccctttctgccccttgagactgaccccctataacactgaggrgccagccccactccactgccattggtgggatcaacagtcacttagcaattagcaactgtaaaagtaatggtagcaggaaagttggatgtgacaattctattttgtgattgctgaatggtggtatgattttgatggtcaaaaggtgttcttatatgttataattcaatactcatttttatagtgaagtaacttatacgattaatttcatagtttgttcccacctttgctctaccttgatattcaaaaccctctttacaaagataaaaattttctttattttaaaattttctatcaggtctatgagcattaaaaaaaaagtaattctttaaaatggtacaacaacaaatttttccttactaataaatagcatttcaaagaagccattctatttaattagttacaagcattttaaacgctgtttgatttctaattatgtacacctataaacatgaggatgatttggagttattcctaacattctctgttttacctattaaaagtgcatttaatttgctctgtggagatcaactgcagcaaatgcagccatgacataaaatgcagtggggctgagaaaattgcagttgtgacaacactgtgccattctaaaggaactttaggcataggtcacctaagccctgctgggtctgagaaaccagtttttctttcacgtgatgtgctatttcatttggaaacttgaggtggaagtgaaggctcactcttgagtctatagtagtctctctcagttggaaagctttctgcggatcacttttttcaatgctcatctcctactgcttatcacatcacattcattaagagtagccaggaaaacctgcattcattaagcatcctgtatccacactgactgtagaggcagtggcctctaattttacacagtgggctagagtttcaccctggcttgtttggatattactaagaagcatccactcccaggaagaggaggaaggccatatggctcctctctgcattgcctttgacacatgctaggaacctgcaccacctgagacagacagaggccagccagtaactaatccaatgrgagaatgaaggtgggtgttttatgtttattttataatatttaaatgacaaattaaggtggtatgtattcaaggtgtgcaacattacggtttgctatatgtatgcattgtgtaatggttgtcacatttagattaatgaacacatccatcaccacccatgctgtacattacatccccagcacttattcatcttatcacagaaagtgtgtatcctttgaccaacttttccccattttccccaacccctagcccctggaaaccacccttctactcaaaagaacaatctagccttgcctgggatgaagtgcaagaaacactcctgtggatacaatctctaccccagccttcacttcctgtttctgcacttcagagcctctcctgtggggcatttctcctttctcctataagttccactcttccatcttctcgtttatttgagctgttaagctcaacattaggtgttcacatatgggtcagggtggtgagcatgtttttgcagtagaaatgagaaaacagctgggcacggtggctcacgcctgtaatcccagcattttgggaggccgaggcaggcggatcacaaggtcaggagatcaagaccatcctggctaacacggtgaaaccccatctctacttaaaaaaaaaaaaaaaaattagccgggcgtggtggtgggcgcctgtagtcccagctactcgggagtctgaggcagcagaatggcgtgaacccaggaggcggagcttgcagtgagccgagatcgcgccactgcactccagcctgggcgactgagcaaaactccgtctcaaaaaaaaacaaaaaaaaacaaagaaatgagaaaacaatttgctcagccactgtgggaaatcccttctcacatgagcaatcagacastcaaacatgccatggctcacagcaccttcactatttggggtaccctggaacacatcccttgtacttatcctttctgctccttcaggaataaatgaagtatctgctggtgcagayrtaataggacaaaaaatatttcagaagaagaggttttaatacctgtctgtaagaatcaaacagggttaaaacaaaaaagggaaaaggaagtactgcatgaagaactttatgtattgcaggtcactgaatactgtattctttattgagctgggttttttgtttaagcatttttattttcctgcattggtaaaaaaaaaaaaaaaaaagtgggaaagatggaatcttaaatttttatttactcagtttcaaaaaccgacaaagaaaaatacatcttatcagcaaacagccagagatgcgataattctaaaatagcaccaagaataaaaatgcttcactccatagtattttataaaggaacaacacccaaaagaacagaataacatgaagtccatttcccattttctcagaaacaatttcacagtaattccaagagctgggaaaggtggaacatgcgaacagatttgaaatgggaggtttgtaggtaaacatcacagtaatgaagaaaggagctttcagtacccttggccactgttggaaatataacctaaaaataccactggtttgaggttccagaaaaacactttattgaattctttttatgcatggtgtatataaattagaatgttacaaatttggtggttgtattgctgcagtgtaattgttgaatgtaacactatgtaaaataaggatactggcctgatatgaagaaagaggttgcccgcaaactatagtcaatatcaccctgccttctaagccaccaaaggaaggaagagtgcattttgtttcgcacagatccatgttaagaagtttttgtttcattttatttctttgaacattggcaatccacttatagcacgtagaacttatctgttaatcaaaatattcacttaagataaatccatattctccttccctgctgcataagagagttcattgttctcgggaaattcattttaccagcatttgccttgaagtagaaggcattctcaggccatgatgtatcacctaattaaggaaatttaattaataactgaaaattatggatggtattccttaacacattttcaacctgaagtgtaatcactaatatattttgtaacttttgttttgaaacaataacagacttaccaataagttgcaaatagagtacagagaattattttttttgctaagccatttagaggtaagttgccaatctgatgccccaccaccccaaaagctttagtgtgtattactacagtaccattctcctacattaactacaagacacctgcaaacactgggaagtccacattgctctatgactgctatctgatgcccggaccctgttcaagttcctccagctttccctacaatgtctttcatcacaaaaggacctagctcagaagcatggcatgacacatggcaatgtgttctccagtctctttgatcttctacaggatggaacaattctttagtggttctttggccctatgatcctaacacttttgaagattgcaggaccgttattttgtaatatgtctttcaacttgagtttgtctgatgcttcctcatgaatagattccggttctgcatctttggcaagaatcacagagcggtggtgggtgcatcctcccggagcgcaatcagggctgtgttgcttctctttgtctccttacctatggtgttcacttgtatgatggctctgtccatccaactctttcacatagaaattactcttttcctctttataattaagacatattttgtggaaaggcactttgaaactaggcatctaacttgtttcaatttatttatttattcatatctatacagtcttgtattttcctattttattaaatcaattatacaccattagcatcactattttatttatttatttatttattttttagagatggagtctcgctctgtcacccaggctggagtgcagtggtgtaatctcggcctgctgcaacctccacctcccgagttcaagcaattctcctgtctcagcctcccaagtcgctgggactacaggcacacgctgccatgcctggctaatttcttttttgtattttagtggagacagggtttcaccatgttgcccaggctggtctcgaactcctgagctcaggcaatccgccagccttggccttccaaagtgctaggattacaggcatgagccactgcgcttggccaccatcgctatttattttgatgtccacattgtctctggtttgtgcagtgggcgcctcttcaagctggcctctgtgtcctcttgacacattcccaccatctttggagccctttcctgctttctagtggaacaagatctttctggctgatcttattcctgtctgctccaggcctaaaatcaaccctctctgattttagggtcctgattctgatgaaagaatcgggagccctgactttttttctttttctttttttttagtgaacagcatttagaggcatgatctaggcattaggtgttgggtgtcactgcaccaaggtgaggcccacacacatttacatctacattatagatgtgtgtgtgtgtgtgtgtktttgtatatactaatagtcatgacttctcaaggacatttccacttccaagcaaccataggtttcactccagtttttgccctttcaattgcagctcccttgatcaaccgtaaaaaatacctagcttccatgatttatgatagatttcctttattggaccaattcgtgtctgtaaccagcctcctgtttctactgccatcccctcctcatgcacagatgcctcctcccttggctcctgctctgatccctgtacccagcttgtcccctgcaagcatgttcccctcccttgcccaggctctgacaccccacacatgtgtggatcccctcccctgtcccagctctgataccccttgcrtgtgtggctgcccctcacctgggtgtcctcttccctgtcccagctctgacacccacgcatgtggggctgccccgtgcctaggtgtcccctcctctgctcaggctctgtcctcctgcrgttggctttcccattctggatgcacctcacacacagctttgtcatctttggatgaatttggcctcccccatccactgctggtgcagatgcttccttacggggccttgtctgatggctttagggctgaatcatgcaggaaggaaggagaaggacaagaagaaaagggaaggctgggaagggaagcgggtggtaaaattggttcacaagtacaaaaatgcaggtagagagaaggataatttccagtgttcggtagtatggtagggaaattatagtttacaacaattcattatatatttcaaaatagttagtagagaagaattgtaatgttcccaacacaaaggaaggattaaggttggaggtgagggctaccttaagtaccctgatttaatcattacaccttgtaaacaagtatcgaaatatcatatatacccccaaaatatgtgcaactattatatatcaataaagaaaaaaagggagaaaaggtagaacaagaaagagaactaacacattttgaacacagcaattattagtgaaagaggaagagatatttttcagccactctctgatttatttcatactgttctttgcaagttttttaaataattgttttttctttgttatactaactgaatttcgaagaaacatttttctggaatctgggattatgaagacatgctggaatcccttaatgatgaagggaagacaatatttaattatcagaaaacttaaagagaagcagttttatattatccacgttaagaatatatcatttctatatgatacatctagcgtaaaaaccaaaagcccttagtaattcatgattaagtagaaaataaaaattttacttatatcataggataacatgcatttgactgtaagttccatgatagaagcaaggagtcttttttgcttaccatcatatcaaggcaaagggaaattgggactaggaaaagaagatgtgaaacccttctctccacccacctcatgttgtggtggctgcctcctgcctggtccccaggggtggtggcagtggtgtggccctcagaggatatcagaggctgggatcatgccttccagccaggctcagtgggtccaaaggtcaggagccttggtccagcccaaagcttgtgcgtgtttagtgcttatttcatcgtacatatacatcgtgcctgttcttcatttgctgtacttttgtaggttagtatcactgttggcataataatgagccaacctcaaggaatttccatatattcctatktatacatcatgattgcactttgtatttgaaactcacttttcttacacttttatttccttggtattcatagcacgttctgaattttcgtttcatatatcttttattttcccttgagagggaggataatttgaatatagatttacttaagcaagccagttatgcaagaatccatatttattaaagaagcaaagctaaggagtgcttattgattttataacaggattacttatatgttagataaattttataggatgtgtttacactgtggatgctttaatatatttaagttgtgatacaatttgaaaaattttagattgcacctaatacagcaaatcatctatgccaagtgtgtaatcaatagcaatgtggatttgttatgtaactgagtctttttaagtataattcagaaagtgtatattggagtctggaattaaattgcatttaggatctaatctgagaagctcaaaggaaaaacagcaggttaccagctgcccggtttctggctgtgggagagactaattgttaggaatttggatctctgttctgactgtttgtcttcagggaacatagggtattaatttttttccacaggaaaagaaaaaggagactgtaccattgtccattctgtatagcatgaagctattgattgagtagaatccatctcttaggtttcgcaagccattgcttacctctttcaaaggcattaaaattggaaggaatgggagtaaggattgggaggagctaaaaataggaaagtgcctaaggtgactaaatcctaaagcaaatctaaatgcatttctcaccctgctttcctttctcctccctggtcccttcccaggcctgacacctataccttggtagagttttggtagggccagtgaacaaaacaccagcattaacatttaatgcaggacatcagactttaaaaatgcaatggcaatttctagaacaaaaatacaagaaagttagagacatggaactttcatgttggtaactaacaatttgactgtaatgaatggtagaatgagacctaggttcatcttcagcattttggagctgttttgtggagggcattgggagaacagaggtacagggaagccctatcataacatgaatttctcttggagatttgatcaaaggagcataaaaaagaagaatttatttaaaaataaaaagtgacagccatccattaactgtctctatcctcttcttgattccatcatctgtaccctgtattctgtttattctaagcaatgggtttatgtcgaatatgatactttaagttgattaaatgttggctagaggcaycactcactaatgtttcacttggcatcttggcagtgatttttctcttaatttccccaatccktgcatgtttgatccattacttacaaagataacgaggctctgctcattccaaatgtttgttttttagggagggggtagtttgtgaaagatactaattctaggcatctattaaaccaccagtaatcaatctttgaaaccgtgtaagacaatgagaaaatcagcatccccaatgagagtcacacaggacagactcctcctatgttcttgcagcacagaatgaggaatctgctaagttatatgaactgaagagaatcatatatctgtagcttgacttcaacaagagcactgctccggttctaagagattctctttaaagagtaaggagaaacccagtgagttggtgccatggaaggaggatgtacacatcatcacttggagacagtccagggagagacagagctgggctgatcctagttatctgtaaaacagaaatgattatcatggcctcttcctagggcagcaggaatgaggaaatgagggayaaatgaaaaggacttaagtgggccaggtgcatagttagtgctcagaagcatcaggtattaaaaataataactactggatggtaggccacaacattattatgttttcagggtgcaacaagctgggcaggctgggagcagagggaggggatgtgctttctgtttttgcagcaataatcacagcatgctttctttgagaataatgtgcatcaatttttacctttcctaggagatgagagatcccaatggccagactctgggctagttatttttgaaacccctctcagcatctcgtgaatgtctggacatggaaatgaatgtgagagggtgggaagagcaagcattttggcctcaggcagaatctgggttggcctctgcttctcctacttcacagctgtctgcagtgaagtagatgtcccaggtacccctcaagtaaacattggcttcctggccattaagagtgttgtctgcagctggctttcagccatcagcttctttggggaatgcttgaaaacacctgccagcctgaggttgtgcccttgtgagggtggcccacatccatgactgatagagttgagggtataaactccttccattttgatcaattgcaggcaattctgacagccgtttcagttccagggtgtctgtgagtttgctagttgttggacttgcatagcaggttagcttctccctgtgcccagcaccacttctgtctttccctacaggaactgatcctgagggcactccctaataaacacaacctcatttcagaatctgcttcctggagaacccaagctgcaacactgcatgagcttagcctaattatttagcttgctcagttttccaatctgtaaaatggcagcagcaatggccaacctccttgtttggttgctggccttggtgctgattagatgtgatgacctctaaaaagaacctggaatcaagctaatctggtgcttagccatcagtgagtagtaggcagcagcagcagcagtaatgtattttgctaaatttgcataattttagataagcttttagaaatggtgtaaaaatgctttgggaaatatgttcctaatcaaaacccaaatgacctatgaattgagtaaggcaagagttggatcatacatgtgtaagactgtcagagcccaagtctggttctgattgactgccctgacactcaggctggaagacaatggcatgatcatagctcactgcagtcttgaactcctggcctcaagcgatcctcccagcttggcctcccaaaggaggaatcttggctgggattgtaggtatgacccactgccgcgaagctgttttaaatgacacatctcagagccaagtctcccagccccagtacctcatccagataaccatctatccaaraaacaactctgatcacttcactctctgcctgaaattcctggtggcttcatcctctgaggatgatttcattcatcctcagaatgaaatcctggttcctctgtggacccttcagtagcctcgatgtaccttcctagccttgtcttctattcwccctgccatgggagccccaacagtgccatgctcgttctcgtctccacgtatttacacatgctgtaccctctgcccagagtgcctttcctaccccttccctgcctggcaaactcctattcaaccctcaggacctggttcacaggaatggcttctcaggtcgcaaggagctcccataggaccccatacatgtacaaatatccctcagtcatggctgaacttcatcctagcaagatactggaagcctacgctacactgatgagtgcagttagaaagttctgctaatgcctgagggtctgagctcctgaaggttaatggaatagcagcctttgaaaacccttgagacacagttcctcaaatcactccttggcataagtaagagggaaaaatacaagagtaggcatatagagagctsgttatcttagattatcatgccactctttgtctagagtgttttgtttcttagagaagcccacttctgctacccaggcgacctggasggccgccgttttcctctaactctgaccagcttcatggtaccttgataatatggatccgaccatgctacatctaagttttgtggtcttgaagaaatgcacttctacagctccatgtctttgaatctcttcgaccaccccccagatgagaaacggtattggtttccaagggctgctctaacaaattactacaaacttggatgcttgaaacaacagagatttataaattctgacatttattatctcacagaaatcaaaaccaaggtgttagcaggggtggttccctctggaggttatgagggagactgcttttatgcctctctcctagcttctggtggcagccagcagtcctcggcatgcctttgcctcagtcttcataggtcctatctatgcccctgtcttcacgtgtccttcttctctttgtccctgcactttcctctcttctgtctctcataaggacatgattcattgtatttaggggccactctaaatccaagatgatctcattgcagcatacttaattatttctgcaaagaccttattccaaaagagtcatattttgaggtttccagtggacataacttttgagcgagtctacttttcaacccaacacggatactaacacccacagttggactgcacttgtacttctttccctccatgggttattgcagactgttccatgtattctttaaggccagagagtctgtggggtttcccttctcttgcctgcttaggcattactaagctctgtagtgtacaacatatgaagatagcttcttggtaagtatttatggtaacataggaaaataaagcaaaactacaaaaattcagagtgragaaacatatgggaatttcacccttgttgaaacaaaactatcatccatagagcaaacagagaaagtgttcttgccggacgattgcagataggtaaggcaactgaacttctattcttgatactccttgcctagtttacaaacaggtgatatgttcacattaaagagaaagaaagagagagagagtttcataggattttcagtgcatacacttttcctctagccacttgtgaattctctcattgtttgtagaagtttttcatttgatccccttaggttttccgggtaagtagtcatgtcattttcaagtagatttccactttacatattttaaaactttcttctctttccaactgctttgccttgttcctccaggaagaaaagaattatcaaggcagtcatagtagacacatttgtctaattttttatttagtaggactaatgttttccctttaagctttctcctagcttttgggttaggttaattaagtgttatactgcgaaggaagtagccattggttcttatttagggactcctttgtttttgtttttgtttttttaagtgtaaatctagaactgtatcaaaagactttttaaaacaaatcattcgtggacaagactgtatgatttctctccttttgtaatgtgggacaattcttggattttcagaattctcctcaataggtcatgttgtgtttttctttaattcgtggcttgatccttttgagcaataactcaataaggattttgcacatatctcaataataataataacaaacacttatgcagctctggccatgggtcagagatgattctgagtgctttattcatgagcttctttaatctcaaatgtttttatatacacatttatatgtaaatatgtgtatataaacatttgatatgtatacatatatwtgtatatatgtatataaacatttgatatatatacatttgatatatacatatataaacatatatgtatatatacatgtatatatacacatatatacatatatgcatatacacactatattaaatattgttttctatttttcctgtgaaaatatttctgtttagacttactttctcttcaggacgttgtttttgtcaaagatattttcatataaatgcagtctctttcattcaaggtttaaattgtatttcataaagttgagtaatctcttctcaatgttaattccctctgtatttgcgcttgattttgcctggttagtttcttatttttgggatttgctctttctccattgattcatgattcatctggctgatgatttgtttgttttactttatttcttcaagaaatgaatttgggatatatttattatttttattgttttaccatttttatcttgattttttaattaatgttttcattttggttctcttttgttctgtatttctaacatcttaggttagatgcttaacacacatttttttctytcccatttatttacataaatattgtggctatacatttttcttcaaaaatagctctccctctatgtgtctgatgagctcattatcattattttctatatattttgctaatttggttgggatttacttttgacataaagaaacctgtattttattttcaggcaataggagatttattttctgtttttattattaattttagttttactgcatcaagattagaaattgtctatgtcctttctttttgtcaatgtgttcttatcatatgaactacatgttggtatgaccgttgctgcttattttcaccattagcaccagaacttagtgagcatttattgtgtgtaaatccccatatcacatggtgctcatcagtcctagtggttcccatagccaatggagatgctgactgtggratcttcatgctgctgagatagactgtctcctgcagatattccttgataatgtcattttctctggagtccagcytcctgagtctcctgaatccagcaggggctcctgccagcgttcataccattgtcaactcrttgacttggctttcctacctctgggcaggcccctcactttggacaagcacatctctgctccctactgacacctgccttctaatctgtgttctcttctagtgtcttttcttggcttctactcctgggcactgctagcttttggtagccatcacacccatgctggtggctgagggttctgtcaattatgtaatgttgttggaaacataaattgcatgcatgtttctcattctctttcgtgttctgaataattcccacatggagaagaggaaatgttgtctttgtgtgtttaactggaaatggtttttaaccttttctttagtttcttaaaaatttattttttatgccatgtctgaacctcaaactctagaccgagatattaaacataagatgagggagggatgaagaaaagcaaagataaagagagtgagcagagttttatcataatttaagatacttttctaagatctctagccattggctggtttatctggtttagtagaagtttagcaggtttgagtctcagcgttgttttaaggastyatgcagctcagcctgatgttctaatccctgggcattcctgctttcttttcctcttttgaattgcatctgccagaagacagacctgtttctgggcagacgagaagcagagctaaggcagtgtggcggtgtcagtgtccstggacttaagtggccagtggtaaatcactgatcagaagataaaggttgatgtggtgggggcctccccctgttatattcctgctgtaacctgctcttggttattattagtttctacaggacccctcgtatcatagtcatatcatatttcactctgcttatttctatgtgtttcccacctctccttctgttgcacattccctgggccttgagatgagcttctgagatctttggcagaaaccaaagctttgcttttgtttgtttgtttgttttggagatggagttttgcttttgtcacccaggctagagtgcaatggcgcaatcacggctcaccgcaacctccgcctctcaggtacaagtgattctcctgcctcagcctcctgagtagctgggattataggcacctgccaccacrcccagctaatttttttgtattattaatagagacggggtttcaccatgttggccaggctggtcttgaactcctgacctcaggtgatacacccrccttggcctcccgaagtgaccaaagctttataacagttttatttgcagtgagtacacatagtattaaatggatgcatgattgactaaatctrgagtgtttgaataaatgcatcactctaatgcatgatcaaatgtagacaaataaaaagcctctaggtgtcttcagaatctccaaaccagggcaataataggcagttctttcttgttgcattcaccatctccaagcatgacagctaaatgtaaagtagctgagttagtggcatcctttaaaggtaatcatgaaaaatgaccacgcttccggcatcctcaaactttgatgttattctcttgttttcttcaagatgagtcagatccatacatggatttacatctctttctgagctcttcacatttatartattatagaaggattggagggaggatacgaaggtgattgaaacaataagaaatcggatatgcaaagagaagttcaaagatctgggatttcttgtcactggcagaaaaatgagctaagtttgaactgttgctaatgatattaacatgacccatagaaagtatcgtggctggtgtgtgattccaagcagcccccgcgatgtttgtctctggaacaatagagatcacctaactttagctatttaaccagtcagagaaggtcgccattttgatttcctattaatatggaataaaaggcattttcaaaaatactataggagatgctgagggcattaattggaagtaaactgtcctacatctagctcaagaagttttgtcagtgcagtattttactgctccaagctgtggcttataaaactctgatgtaaggcttattaacaggttgaagactgtgtttcctgatttagtacaaaggagtttctctgaggcaaagctgggctttcttctggccaatcctccagactttccctgctgaagattatccagacctttatggggtggaagtcctatattgcagacatgggggtgcccccagtggaacacatttccaccctcagaccaatcgtgtagggcagatttggccattacagtaytggagatgatagtcgtttagacaggggtggatggatcccagccaagaacaagaggcgacttgaaactctcacctgtgcaggtggagtgcaccactcgtcactgtcatcccccccacatgccccagagtcggttcaggaacagtggggtcagttgattctcaccttgattgattgcctcccttgaagaattttctcagatgactttaggaactgggatcttacccatgcaatacctcaatatatcattgcaaattagtttcccaacatttttagttctttttgttgcttgatcttctgtatatcaaaacccattctagatttttgactcagctggagtttacctttacctacttacctagcagtgtttttcattctcagcgaactatcacagaaaaccaaacaccacatgttctcactcataagtgggagtcgaacaaggagaacacagggacacagggaggggaacatcacacaccggggcttgtcagggggtggggggctaggggagggatagtattaggagaaatacctaatgtaggtgatgggttgatgggtgcaggaatagtttttttcttataaataaggtttcacgttgatctaacatatttagagtaagaacagtcatttctaatcaaaatttgacttaaagtaatcaataaatcacagttatttactgtctttaattctgtatcctatagaaataaaagaattttgtggattttgattaaaagtctcactgactgtgtagaaattttattctggttttagattcttataggaaatcttacaaactattttgaacttacattttggaccaatttaaaattctcatttcttatttactatgttttaaaatctaatattcataacatctgcaaagtaaaaacatttccatttaattacaggacttttgatttatacataatttaaaattcatttttattcctggctccaggtttcaatacatgtttgtcttaagtgttagaaaactcattgtctccacttcagtgtcccataagctttcaaattaagcatttcccaaagtcaactcagtattttcctgctcaagtgtcctctgtctctgtagatggcaccaccatcctctgtacttcccagcctttcartggagacccacttgtcgcctcctccatcacactcacccctccatcttgttaggcaccagattctgtttattgcacattctttgctgtcctcccaagtcactttcctgctattcatcctctgcctctgccctgggtcagaatgcatcacttactgcctggggagctgcgggaacccccagcctcatcctttgctttccaggtgctcattctaaaactcaagtctgcctttagaatccttcaatagctttctagtacctgcagaacaaagtagtccacatctcttggtgcggcatgcaaggccctgtaggacatggccctgcagcctccacagcctggcccctcccttcccttgcatggattctgagctctgcagatgctgggctcctcacagggccctgattgtgcttggccattcctctcctcactgttgttaagtctgttctatctccatctggggcatgccagcactgtcacctggccagtgcctaggtgtcacccacagaaagtctttgatagcccacgagccyatcccaggagctcacattcgagctctcagagcagtcataattctcctctcacctgaataacactggactctctttcctgactccatctaccctgggagctccgtgagggaaggaactttgtctttgatctcgggyacatagcagatactgcttactggtcagacataatataaaatattttttgttgactctcccagaayaaaaatacatgtttccctttttcaaagatagcatgatccataatagaaacagctttaattttggagccaggaagacttgagctccaatcccagttctgcatgaattggttgtatgaattttagtaagtgatttagcttctctggccatctgtttacttatcggtaaaagaggaccaataatggaatacgactgaggattagggattgggagtatgtaattcccagctaaatgcttggctcatgttaagtgtccaataaacggtggctgtttattaggttatggctttctttctctctggcttattttttgtttatttttcagtaacacacacattatcagcctttaaggttaggaaagaacttctgcttgaaatatttaaatgggagaaaacatttgagttttctcatttaaactttaacattttaaatgttaatacatttaaacatcaagcaagatatcccataatggttttctagaacagctaattgattaatcatataaaccttaatgggaagaaatgcaacattatgtcaattagatcaacagttaaatgtccaaaactgcagaaaccattatgtagcatgaaaggcaarcagaaagagtagttcactggttttcaacacaaattttttgaatataaatttcttttttctttttttcttttctttttttttttttttttgagacagagtctcactctgtcacccagactggagtgcagtggcacgatctcagctcactgcaacctctgcctcccgggttcaagtgattctcttgcctcagcctcctgagtagctaggactacaggcacatgtcaccacacccagctaattttttatctttagtagagacagggtttcaccatgttggccaggctggtctcaaactcctgacctcaggtgacccacctgcctcggtctcccaaagtgctgggatkacaggtgtgagtcactgtgctcagcctcttgagtataaattttagcyacattgtatttttacaaatcagagtacagttttgataaatctgtctcttgttaattaagataattcattacattgatgtcaattgcaagttcattgagctatccagcagacatattttaagcaactgctatattccagtacttttcaaaggactaccaaaatgcatgggattaaaaaaaaaaaaataaaacctcatgcaccttagcatctactaggaaacctgtgttcttaacctccagaaatgtggattcactacagtttgcagacagtaactgcttcctttataatagaattgttcactaaataattagccatagtcaagtcatgcatactgtaccagattctgcatttagaacccagaggatgccttaaagtaatattgggtctttccaatcactcaactgtgaagttgtcartaggtatttcgagtgagattatgagcagcaatggaagatttgtgcatgttccagaacagggattgacagtcattttctgggaagagtcagaaaggagacattttcagactgtgggccatctagtgtaggtggctactactcagcttggctctaggaacagctaaggacagcacgtcagcaaatggtgtgactgttggccaacaaaactttatgtacaaacataggcagtgttcgggcttggcccatgggcctgctctaggataataaaccgtaatcgtatttccactttcaggagaataatttatcaccccacaaagtccttgactctctgctgttaaaattatgttactaaacacagttaattattgtttcaaaaayttataatatgcaacttccaaaacaactctttctcttgaaaatatactcctcgcaacatggatggagctggaggccattatccttagcaaactaatgcaggaacagaaaactgaataccacgtgttctcacttatcagtgggagctaaatgatgagaacacatggacacatagagggaaacaacacacactggggcctctcagagggtggaggttgagaggaaggagaggatcaggaaaaataactaatgggtactaggccaggtgatgaaataatctgcacaacaaacccgcatggcccatgtttacctatgtaacaaaccaaaaaaaaaaagaaagaaaacataccctcatctgtttgttctttgagtctcagaataagctcacttgtgttaaatccctggtggatgtgaggttagtttttatctaattggtctcaacacctccactctggctgtaagatttttatcctttttccatctctaatttccgcaataccccaaatgtgtctgaacatcctctgctggattttaagcagatgcttcggatttcatgaagcacatttacatttttcgacactgttgaagtgtctgggcaatttaggcacacatgccataatttttcagcttgcaggggactgttaaatatttccccaaagagtctccaaagagcagaatgaatattctgaatattccaggacacactggtgagcatttctcccagttcttgtcccggctggggtctgcattggaagaagacaggctcctgtcagtgaaataagactgctctttatttyactaaagcattgctgactcacagtgcttctcctgctttcccaccttctattctctcatttgaatttggtccggattcagggggtgggagcaagggaagatcagagacttcttaagatgaaaaggcactcgaggacttccgtcctgtactttggagttgtcacagcagtctgcttgttcagcctcaggtttcactctctcagctgagaacgttctcctaatgctgtgcttcccrtacaatggcccrcctatagtcaaccctcctgaccagtgtgcatgatctcggcacagcgtatcagctactggagccgtttacatttgcatcaactycagtttctctcttcatgaaataagcaagtgattctaagtgacttaagctcctgagtcacaatccagtttcatggggtcttaaaagaccgttgagatattttgtacagaatatctgaaaatgtagcctgcagggttttcatggtctgcccaaagctgggtctaaaaataaaatctaagctgactggcagcatgagaagtgcccaaatcagcagatggtgtgaaatgcaagacttgtgaaatgaaaatatattcaccagaatacacatcctttcccatttattaaaggtctgatgggaacacatgctcctggtagacacacagtgggctgtttaatcaggggaatgtcagaggtagagggtgtctgtctttgagcaacattcttgatgagatcacacacgagcttcccaaggacaagacattagtgtagctgggaaggctgtgtcaccaggggacctggccccaatggaccaggtggcccacaatggtcaggtgacccatatccatgtgaaggggaattttcaggtacacctttcaggcgtcacccttggttctaactgccctgcatttgagatcaaaggcttgttgggtgacggaggagaggctgagagcagccctagagcagctagtgatgtcacaagtctggaagagatactaaatctgatggaaatggaatacagagtccaaagagatttcatccagttagaacatgtgacaaattgttgaagattagaacaaaaataataaaaatacatgtaaaagaaataatataaactgaagagcctctatcttaatgttgttactatgaaatgcaactatttccacgaaatggatggataataatgagtgggttaacattcactcattagttagcattgagctgacttatgttaactagcatttacttttccaagcactttacacatcctgactcatgtgatcatccacactctacacagaaggacatgtcgccccttctacttcagagggagtggccaaagatgactcagtggctcagcttataagtggaagatgtagaatctgaacttagacaggctggctgcagagtcccccccatcaacctactctcctgatgttccaaatggtccaaataggagactcagctttctcagaactcatgtgttgaaagtaaaatgttacatgatttatgtgactttaatggcagactggggatgagttttatttttgtcacagggtccataactgggttatactttacaagaaagacaggtaaaatattacagaaaaaaaaaaatggatctcttcgaggccattgagccattgccagtgtccctgattcaattatgtttgtgaagccctgagcaaataccctcatatttaaaatgaggagtttggagaaaatgatcctgagctctgttccaattctgtcctttcatgatttgctaaacaaagtgtagtgcatttatgtaaaaactgtgtaaaaaaggaagatggaagaaactcatggtccactgagaagtgaaaggcctgtggtagcagtatggctatgaaatgatagcaccctggcattcgccacgcagcagcgctgagaaactgcaatgttgccctcaaggccttcagctgatttggtgaggcctaccttcattatcaagggtagccatttttacttaaagtcaaactgattgtaagtgtcaatcacttctgcacaatacctccacarcaacacctagataattgtttgagaataattaggtagcatagccttgccaagtggacacataaaactatcacattccaccccttgtcaactggacactcaggcacatccactttaaaccatttctctagacaaagacagtaacaaagccatgtttcttcatagcatgaaacaactggcctgcatactactgaaaatacactgacatcaccagaggggtgtgcagactctgtggagtgctgttcacttttttatatcctgtaacttgaatattgtgctatcattaatacatcctatgttatatgataagatgataaaagtggaaataaaaatatgcatatatatgtttgtgtatagatatatacaaacacatacaacacgtatgtggagtacaatcttcttataaggtatcaagcaaatttttattacattgcttggtgtacatcatattcaaaggcatcattaaaataaatatgttcaccataatgctattatagtacagtatctgaatctaattaatattttaatctaattaatatctcaattgattaatattttaattaattggattagtattgtatttcaatattttgatttactttgtttctttgaaaaaataaatcttcttatttgagttgacccttttagatcaattagtaatatgtaawtcctaaattttattttcactctaaaatgctttaaacctgaagtgagttcagctgccagtcctaggttccccaacasttagtgagtcccttcacacatgtgaaaccgatgaaggttttattaggttggtgcaagagtaattgcaaaaaccacaattacctttgcaccaacttaatagaggtgcatatcatcttagatctctcttccaaaaccaagggagagatgcactcataaatagcagggatagagataaaaatgtccccattggccaggcacagtggctcactgtggcctgtaatcccagcactttgggaggccgaggtgggcggatcacaaggtcaggagattgagaccatcctggctaacatggtgaaaccccgtctctactaaaaatacaaaaaaattagctgggcgtgatggagggtacctgtagttccacctactcgggaggctgaggcaggagratggcrtgaacccgggagtcggaggttgcagtgagccaggatagcaccactgcactccagcctgggtgacagagcgagactccgtctcaaaaaaaaaaaaaaaaaaaaaaagattgtccccattaggcctgagagcaagtcagctccctagcacttaacccccatcctttccctgccccactctgggttgagccccttccccatgacaaagagcccacccatcagaacattagctccccatggaaaagaaacaggcagatcctgcagagctattgaggaccagctgaggccagcaggcagcattggtttccaaagctgctataacaaattaccacaagcttggtggcctgaaacaatacacattttacagtgttggacgccagaaatacaaagccagtttcattggggtaaagtcaaggtgttggcagggctggttccttctggagactttatgagagaatctctatccttgccttttccagcctccaaaggctgctgcgttcctcaatcattccacccctttcttctaccctcacgtctccaatttcctctttcatactcctgcctccatcttacgagaacccctgtgattaactggacccacctgtgtcatccaggatgctctctccatctcaagctcctgaggttcatcacgtgtgcaaagtcccttttgccatggaaggcagcatccacaggttccagggattaggatgtgaacaacattggaggggccatggctcagctcacccctggggattagaacgtggacatcttgtggggagattgttctgctcatgctcaggcccacaccctcctgggaggagaggtgagtaaaataaaggaaaagagtgggagagagtttccagggaagtccctcctcctggagacatgagaaaagggaatcatgcagaaataaaaaaggaatgaaacccaggagtaacctggctgtccccacccgactgactcccatggagaaagcacaaggaaccctgagtgtttgatgggtatgcactggggccaggcctgggcctacctgccctgagtccatccatgaagcagctggcttcctctgggctagcaaggaagaggtctgcagagaccagcgagagagcgagcataggagcaagatgggagccgtagtctgtggagcctaatctggccagtgacatctgacccgtcacttttgcctattctggtcataagaaggaggttactgggtctcacccttaagtggatgggataacatcagaacacagatatcagtaggaggtggatcttgggcaccatccaggaaactggctgcacagatgcatgcccctccacttggtgtcctcacgcatccctctctacagtgcttctgggaaccatattggatttaccagggtcagtatccactaatgtggtgcctttggtttctctcctttctacaaggaaaagaaaaataatttattagagaacctgtttcctactggtgagtgtttgagtgtcctggatacttaaaaaccagggtaagtttcaccttcctgttaatgaaagagctggttatgggaggatctctgtgcctgtgtggccaaggaacaagcacccattctgctctcgacgtgtagaagtttccagtgaatgaacactttgtccagacctatctgcccccgccccaaagtcacagcttagaaaaggggtttatttctacagtgtttatttttaaagtgtcgacgattttgtgcttggagaagctggcctgtccttcagaggggcagttagttctttctgaaggtcattctgacagtgacatggcagtccttcagcatgcggtcggtgggttacacgccaaccgataaacagcccttttgcttcttccttctttcccacaattgcacttcccaggtaatcccttccstatgggcagttcagctatggtaactggaggctgggagattgaatgtactgtcagagccaccacagcttctccaggcargttgtctgcgctgggtgtgtgcagacggggattactgcagaccagacatttgaagaaatttctacttcctaatgatcattttccagaactattgacagaaattcacttcttctgtcttaggaagccatcccttaaagataagcttcttccctcccatcagtaactcctttcacctattccaatactgatgccatacagccctccgttaggggacacaaaatgttttcggaaaagtaccctaataaggttatgttttcttgtgcggattcctatggtcctttctttacaagacagaacagaaatccagttcatctaatgctttcttttaggtctttattttcccagctatgtccagagttggctttgaatgaatggtaacgcatgactaaatacatcgatgataatagagatggtggctgacaacagcatttattcagggcttcctatctggagcaagcagtttccaaggtgtttgacacgttctgttctgttaaatcctggtaataagatccctacctccttttttctggtgtgaagaccgagcctgggagagatgaagcgactggcccagggcacacagtgtggaagtggcagagctggattcgggggcaggcatgtagatgccacctcctgcacccacagccaatgattcccctttccccagagcattcaatcaggctccaagtctgggtcattccagaatataccatgaggctccatacttgctttcttccctcacgccttcacttagatcttgcaaaagcaggctggatcatgtgttatgcttaagatgcacaacctgctagactaaaatcaaaatgcctttgcaaggccgtccgtgggctgtgccttctccagctcgcctctctttcagctgtcttctccttctttcgtttacagaaggcaccacacctcctccaatgcagcatttcctggctccttcttcttccttggggctcagctttaaattgtcacctccttagagaaaccttactttatggcccaggcaagtccccatgttccttctcctgagcccgtttggcattcaccataaacaactttacatcattatttgttcagtgtctttcttcccatcattttttaaagttccatgggtatatgagagtgggatctactctcagaatatgctactcctgcacactctcaaatggtgaatagcagagctgctgctactgatgaggaactacacataaataggatgttcctcaagggaaggctgggggtgtcacaccacaagtgggtaaaagcaggacccacagcagagactgctggctttcttacttgatttattctctcatccaatgctatggtgcctgggcttcaatacagactcaggaaatactctgtgtctctatgaattcataacctaatggacaagacagacatacttggataattacagtagtcccctttctttccctgctgatgaaattgagcaccaggcctgggtggcatgggtggagaggccctaatgcagtccaggagatcctgaaaagcttaatggagcagtcataggtatgggtctcgcatcctgtctttcttacctgaggacacacgctggcagatgggcgtgtccggggagaccaggacctgccaggtgcccctggttcagatgcagaaaggtgggctttccaggaatttcttacaagccttcagaattaaagagcttctgagcttgcctgtctccttgttccctgtgttatcaatggcgtgcctggcatacccagttccaagcaggtgatctttacctgtgcctctctcagggttgacacgcaacgttttgtagtgagtagatgtgtcagcaggggctgacctgctgtctactttcagtcacttctctcatggttttgtttttgacaatggagctgctccttcccacaccctcaccatgtcagacttcttgcggagggactatgcaagtcgtccgtcctggagggactttcccacagctcactgctttccactggtgaagcccatggacagcattacactatttcctgtgctctgagattcaggagtcttagttatggtagtggccccagcatgctgctcctcctttataaattcctcctagtttctgggaaccccatattctccctctgggatccatgcaagttaagctgaaactgctgctgcttccantgacacctgcccatttcagggctgaatctgagcggcatttgtgaaactgttttcttttctgtatagggccgaattaaacaaacatatcatgtcagttttgtctgggaagtgcaaatattagctagagaagtttgtataggtgaactatttctttttaaattaatttttgtcttcagtataaaaagaaaaaatagcattatctacttaaagtagtcatgaagggtctactttgtaaatatatttttatatattactatagtatagataatatataaatttatgttgtaaattgtgtgtatatataggagtgtgtgtatgtacaggtatatatatcataatgtaaaagccaataatttaaaactgggtgagaaaataaaatgccacatagaaatcattgtaagagtaaagatttgtagcraatttttttagaacagctggcagagtgagcatgaacctgcctgtcattgtgttgtatgtctgtgtctgcatgaacaacttctatttcagttttgcaccagcaactcctaattattctgtcccttcaagaataagctattacaatctcagtgtttgccagtaactttaatggtttttttcttaatagcagtggatctgaaatgttttttcaggctgaagtgctctaattcctgaaatatgttgaaagtggagtcgagtygacacagtatgtccatactttaggccctgaagaatcttcttggcagcttgcctagaaccccaaagccatctgtgatttgcatacaaatgaacattgtgaaattaaaaataaacatgcaaccataatatttacttgtctgcctttgtttctcactctgggaggagagatagtaggctgagtgcattcatttgtcctgaaaccccagggctgagtcgttcatctgctgttagcagcagataattacaggtggtgtttttggaggcgaggataatgatactgaaaaacaagttagaaagacattcatgaagctggtagtgttacataactgctatagcctctgtcctgttcacattttcttctagttcttacaagggaccatcagtgccatgaagttggcatatgaagcaggagtggtgaggtgatgctgctgtaacaaatgaccctgagatccctgtgactgacagcagagctgcttcctgttgctacattaggtttctgttgtggatagtgggctgcagttctcacaccatcctctttcctccagatccctggcgaaggcagcactcccatctggagcattgctgggctcatggmaaatggaagggagatggcagaatcctgtgatgtccctaaagcttctgctcagaaggggctctggtcactttcactgatcatactttagccaaactttatgtcagctgggcaggaaaatgtaattccccgaataggaaggggatcacaagtcacaggaccatgcctgaagaaaatgggatgggaaggtatcaccctctcaaattttctttgcattttaagacactttcacaagcaagtgctcatttgctgctgatcttggcttcaccaccacttgaatctgaagagttctctccctgtgattatgactcctttggctaaattttgatagtcttgttttaagtgccaacattcgtttctcatttttagggccctacgaagtagcccggatattttcccttcaaaaattctcattgtgcaggaacatgagatgcagtcccccgacaagaggccaggcagcgtgtgagtggtgggatgtagccctaggtcrtacccggaagtggctttctccagccactatccacaggatcctggatagactaaactttctgtcagctcctscttcagataagtctatttccagtacttgcatgatttatttttctcacagcttccctctttggaattcagaatgttctcatctagtggcccaacaactggctgctgtgtctctccacttggttttcctgggaccccagggatattttgcagatagaaccctgaggtcctgttttggcattccagccttccaaaagtaagaatacagattaatcctcacccactatggccctctctaaaattctctctattgaattgagtggctcacctttcactcaaatgacaaccaggaactttttcactattaaaattggaacccaagccttctttgttttgtgaattgatgaagaactttttttaaagaacgaaacacatcttgatttttctataaattcccttttacttattactgagaaagttaaccattaacagtctactgggtctaaaaatccctgtccccagaagtatcattaaagaagaagtatgagtctggaatgagcatcactgtggaaaatgagactttgactctcccattgttctatgggaatatctcaatggcagtgaccctgaagtgaaaattgcatcatatgaagaagtactttggataaacatttcttctctagacatctctgtcaactttgggatgaccaagcctgttgtcaggaccccatgaaatgtctatgtccctcttggccatgaactgtattttctcctgccttctattattctggaagagtgttcttgccccacagccagcatccctgtgtcttgtctccctgcctctgggcccagtccactccctgcattacaccttggtgggccctcatcacttacctgaggcagcgcccatcccagcatggtatcccatgcccttcatcctcacctgtgcggttccactcacactcagcatctcagccacactgatctgcttagaaatgcctgagccacctgctccctggggcccctggaatctgatagtggacactccatggcattctctcttgtctttgtacccttcttttctcacaatttctrttcatcattttaaaatcagcttgagagtcacttgatttaagaagcatttcttgacaactcacaaggagagctaggcctcccttcttccctccctccctccctccctcccttcctcccttccttccttccttccttctctttttccttgacccacacataccaaaaattgaaaatcttctgcaaaagttttaaccttctgatccttgtgttcaagggtcataattgcttttaatgaatagagcttccttgtcttcaaaaatcagtcttccctgcatcaaatttcactctcttggtggctctaaaaatcttatttggggttgggagatgcaaaggaaagaaaactattctgagttcatgacagttaggattcagagcctgcactatttatgttcacagttcttttaatcctcctgacaatcgataaagttactattattgtcccattgtaaatattgacaaactgaacttcagagggttgaaatgactcaaccaagtctccattgcagggaagcgtcaagatcagtgttcttattttgcattgtcctgtaactcagtagacacaggcttccatataaagactcaaaagtacttagaaataatatctatgattttcctttaagaatacattaataattttatctatgtgttcttttacttattccaaatatttaggaaagtctacagtgtatcaggtactagtgattcccaagggttgaattatcaacctccaaagggttgaacagccaacactgatatccaaacaaaaccagtatcagtgttaatcagcaatggcagattgtatttttgtaggaagcttatttcaagagatgccatagatcttttttatcacatactactagatatgtttctttgaatgcccagtatgtaattattaactggttgaaaaagatttggagagacctacagaggtcacagatgcctttgaaagccactccataactaaaccttgtctaaacttatgcccaatatcttttttctgtatgtatatgcctgtgggaaatgtattatttgttcattgtgtatatttaattttattacctgaacaatatgtcagctaaaaataatgaaatcagtacagagttgtgccatttaattaaaattactatcaatggcttaatgagaatcctataatatttggaggtagatttttaatagacctatcgattggaaagagtaataaattggccataattgctttcagtgaacagagcttcctatcaggtatagaaagggttctttcatgaaaccagctgaagtactgggataaacctcttcaaataaactgacttgttaagacagtggaaaacaaacttttctccttaatctacattttaattacattgttttttaaaaaatccatctgaaaatgagggcctgggattctgagtctttcatcagtgagaagcagtattttgatggttgacagactctttcagcctctctgcacatgtcaggactaaggagaagctgtatttctttattgcaaatcttttttctttcttttgctgaggaaataaaatcatccacatactgtatttaagaatattagaagaaattttatctgttgtgcctaacttgcttgggagactttgaatacagtaacgttagtcttgttagaaatatttattgaacacgatacttgttaaaactgttctgtggcaacttcttctgatccccaaaaatcacttttaggtcattcaagtaaaatggtagaaagagctctgaagaaagaagggttaagtagattctcataatattttgttattttgaattatgaatgtaccaaataacttggccttattaacttttaggagatctcagcgtttgtaaaaaaggctatattttttcttaggttgcccttgtactaaagctttagaacctgtatggtatttttaaatatttttctgataatacattatttattattactctttttaagtgggaggaccttctatggccaccctccatcctactagtaaagaaaaaggctgctgttgtgctggccaagcctggggctttaaactggccactcaggggacaggttagctattgttttgtagtctgaccactttttgtttctttcagtgcccttttcctttctggaaagcctgataagactcagactcacacaagttcagtattctcaacagatgcttaagcccaaaaacatgctggtaagagaagatggccacagaaccatttaagttagcatttcagtgtgaacccacgatctctgtactcattagggaaatgttccatatcttgactgttctggtgcctaaataggatcccagattcatcaaaactcatcaaaaagcacatgtaaagtgttgcagctcattacatgtgaggttaaccacagtggcgttcactgcagtcttcggaggagcgcagttctgaaggctgctggcctttgacctggccctgtggaaggcccttccrggctctctacttaggtcaaagaaaaggcttgagcatcagttgtgcagactcaacttgtgttaggaaagtctgggccttcttttcaggcttcccagaaaggaaaaagaaagaaaaataaggaaaaagtgggcagactacaaaacaatagctcacctgcccygttgcttccagatggtcttaaattaaactaaagtcagttgggcctgggtaatgattttgagagaagcatcaccaagaccctgcagacaagcatgacattgctgcagataagctgaggggacagaagcagggagggtatggtggctattaactgtggggtgccccagggcttggcgagatggccttgctcccactgtgcatgaaccctggggtcagggactgaaggtttctctctccccagccagtgcttgggagcacccaatcctctgattcaatccagagcaccttacccagggtgttcccagtgggacacagagctagaagcacgagagcaacctctatttccttctcaatatggaaaggaaaatgtgagggaatagcaaacatgttaaggttagaaaaatgagttcttgctggagttactttgaaaatcccactatggcatgaattatttaagaaacatggaaggcttagaagttatacaagtgaaaatcagccattcaagcatcttgtgtctttaaaaaaagggcattggagaaaaagggcaggtttaaataaacagacaagcaaataaataggaatttgtttattagtgatttcacttctgaaagtagttatgccaaggccgaccaaagaaaagaaaatgattagtcaaatgttttcaaatgtgcttaaatttagattttctttcaaacgaaaagtaagtaaataaagggatttgtcttgatttttcaatagaggcattagttattctgagcacttttgtcccacatgagagaacttgagggttccaatgacattctaaacagtaaacatacttttgcattttaaccataatggggacaatatgctattcttaataaagaagtggttatttgggagctggaagtacatatttgattttaattataatcaacaaatgtttacttgccataaataagagtctaggtggggtttggttgtgcatttccatattgtggttcttttaaaaaaatatatgtactaagctctttgtaagctcatgagactgcagatttgatcatttaaggccaaaaagcatgtctgttcagtggccagatcaacttcctttaatcatcaagttttttgtgttgttttgttttaagttccagtaaagagggtcttgggtcaaatctgccttgttttgcaggtcaagtgtcaggctctggctagaaattcaagcctggagcacatggttcatgatagatttcataggatctaggaaccttctgaaattctgtgaaatattttatatatatgcaaatgtctcaacagtttttgttagctattcatagaggtaagtgactatccccagaatgtgaaggaacgggaactatgctgtttctttgcaacctggtcctctctcagcttcccaggtgtcatccagaatgtatcctttccacctccccacaagatgcttgaaggaaggaagtggcagtttcataagcagttcatcctcagatcaaaagtcatgccttctttatgccatgaatacgtgagtgggtgtgcactgaattcatcaatgtccctttctatatttgaactgttttaagatacatcttgacaatcatgtatccaacttactgttatatgatggccctgttgaatctgcctgtggcctacaaggatctcttccttggaaagtttcatcstacagggagttagatgcatcttgcactcagttaccgccattcattcgttcagcaaacatccattgaacgcctgctacatatttgaatgtttgctttcaagaacctattctagtaaaaattatgaaaacttaagtggcacttgatatttatgttttgcaatatttgtgcttgtttgtgttttcgggtaggaatggatttttggcaaattgttcagatctttagcttttacaytggtgaaagttaattcatggtataatttccgttgcttcactctagatagaacacaagttttatttggtaactgtttgtatgttacagatatttatttaartataattgtatatgtccatagtcaaaaagcactttaaatacacagggagctaatttgaaagatgaacttaaaatgagagggttaggtactttcgaagcatgtataatttattttaggaatatgacattcccataactttaggctccatttgtatcttataaatttatgtggttgcaccatttgcatgtatcttttcatgtatctttttgaattatacatatgttttcataatgagacttaattttaaattctaattcaactcaggaaaatcagtgatctcccttcttttacagacacatgtgagcgcacacacacacacacacacacacacacacagacatgattcttgggtgataaacaataaaattcaaatgaatataacaaaaactttgcattgtatctcatgtgatagacctgtactgcacaatatggtagccactagacaaatgtggctatttaaaattaaatttaagataaaaatgataaaaaacttagtttcacaaccacatataccacttatttgtggtgagcagctaccatattgggtgcttgaagaatataatttatgtaacccaccgccaatagctatggatttaggtaattcccactatttcaatattctaaataattctgtaatgaacaaccttatatataaatttttacacatattgattgcatctcctttgtgtgcagtaattcattcatcagtcagtgaatagtgtagagaagtcattatgtccctagaactgctctacaggaataaataaaaaatagttgcagatctctggtaccatgagacttatgttctagaaaataaacaacagagtaaaaatgaatgaatgaatgaacagtaaatttgtgaataaatttgcatcacaagagttcttactaggtatgtattagttgagccattattgtgattgtaaacatctgttctcagtatgtcaagctttaattctgccagtggtaacttttttcatacgggaagtttcaacattatatgttttgagtttaaaatattttccattatggcttatgcttttgagggaactttagaccaggggtccctgtccccagggctgcagactggtactggtccatggcctgttagaaactggggcgcacggcatcaggtgggcagcaggcgagctcgctttactgtctaagctccgcctctgttacaacagcagcagcatgaaattctcataagagcgggaaccctattatgaactgcacgtgcaagggatctaggttgtgtgctccttgtgataatccaatacctgatattctgaggtggaacagtttcatcccgaaaccaacccccctgccccacctcatccgtggaaaaattgtcttccacaaaaccggcctctggtgtcaaaaagagtgggttctgctgcattagacccaaagagcaccaactacaaagaaacgatagatgattttagttcactaaaattaaaaattttatttgtgcaaagatgccattttaaaagtaaagaaacaatcaggaccaggagaggatgttttcaatgaatacagctaataaaagttatctcacctataaatcatgaagcaaaaacagtttatatatatatataaactttatagatatatataataatcacacatattakatatrtgatatatatdactcaagtgagtgtatctaaatgacaagtaaacaggggaagagatgctcaacctccctagtaatcagaagaatgcaaattgaataacgaggaggtataattgcacaaccatgggactggtaacatgttaaagtctgacatacctgaaatrgcctcacaacatgtttgtttgttttttagcttttmttttaagttcaggggtacatgtgtaggtttgttatataggtaaacttgtgtcctggggttttgttgtacagattatttcatcacccaggtattaagcctagtacccattagttatttatcctaatcctctccctcctcccaccctccatcctccaataggccccagagtgtgttcccctctttgtgtccatgtgttctcatttagctctcagttataagtgagagcatgaggtatttgtttttctgttcttgtgttagtttgctaaggataatggcctccagcttcatccctgtccctgcataaggacacgatcttgttctttttatggctgcatagtattccacaatgtaccacattttctttatccagtctaccactgrtgggcrtttaggttgattccatgttgttgctattgtgaatagtgctgcaatgaacatacatgtgcatctgtcctcatagtagaatgatttctattcctttgagtatatacccagatacccagtaatgggattgctaggtcgaatggtatgtctgtatttaggtctttgcagaattgccacattgtcttggttgaactcatttacactctcaccaactgtgtataagcattcctttttctccacaacctcaccagcatctgttgttttgttttgttttgkttttggttttatttttttttttgagatggagtctcactctgttgcccaggctgtagtgcagtggcacaatctcggctcactgcaacccctgccacccgggtttaagtgattcttgtgcctcaacctccagagtagctggggttacaggtgcacgccaccacacctggctaatttttgtgcttttagtagagatggggttttgccatgttgccgaggctggtctggagctccagggatcaaggagtccacctgcctcattctcccaaagtgctgggattacaggcactttgtgcctggcctgtttgtttttactttttaataatagccattctaactagtgtgagatggtatcttattgtggttttgatttgcatttctctaatatcagtgatgttgagctttttattatatgattgttggctgcatgtatatcttctttygaaaagggtatgttcatgtcctttgcccactttttaatggggtggtttgtttttttcttgtacatttgtttargttccttatagatgctggatrttagacctctrttggatgcrtagtttgcagaaattttctcccattctatagtttgttttctccattgatagtttcttctgctatggaaaagcttttaagtttaattagattccatttttcaatttttgcttctgttgtgattgcttttggcatcatcatcatgaaatatttgcyagtttctatggccagaatggtattgcctaggtagtcttccagggttttcatagttttgggttttacatttaagtctttaatgcatcttgagttaatttttttgtgtggtgtaatgaaggggtctggtttcaatcttctgcatatggctagccagttatccyagcaccatttatggaatcctttccccattgcttgtttttgtcaggtttgtcaaagatcagacagttgcaggtgtgtggtcttatttcaggttttctattctgttccattggtctgtgtgtctgtttttgtaccagtaccatgctgttttgattactgtagccctgtagtatagcttgaagtcaggtaacatgatgcctccagctttgttatttttggttaggattgctttggctatttgggctcttttggggtttaatatgaattttaaaacagttatttctagttttgtgaagaatctcagtggtagtttaactggaatagcaatgaatctataaatggctttaggcaatatggccattttaatgatattgattcttcctatccagragcatggaatgtttttccatttgtttgtgtcayctctgatttctttgagcagtattttgtagttctccttgtagagatctttcaccttcatagttagctgtattcctaggtattttatactttttgtggcaattgtgaatgggagtttgtttgtgatttggctctcagcttgaccgttgttggtgtataggaatgctagtgactattgcacattgattttatatcctgagactttgctgaagttatttatcagcttaagaagcttttggactgagtctgtggggtttcctagatrtacgatcatgttgtctgcaaacagggatagtttgaattcccctcttcctatttggatgcctttatttctttctgttgcctgttagccctggccagagcttctaatgctatgttgaatagaagtggtgagagaggacatmcttttcttgtgctgattttcaaggggaatgcttctggctttctcacatatgaagaagcaagaaagaccatactgctgttgggggtgaaaatgaaaaagcctacttcagaaagataaaacttttatgaaaatttggagcagaaatggcacttgcctgttatacctggaaagagtagtgagttctcccaaggagatagattttagaatatttattttagcatcatttatgatagtaaactactgataacaactaataagtgtccattgataggaaagtgaataatcagttgtggtttattcaaagacaagagcattaatcagagattgatgccatgaactagacatatgtgcactaacagagacagttattcaaaacagcaaattgagtaaaaatagcccattgctggaaactgggtaaatgtcaagatgccattttgtaaaattaagacatagataacagccctgcrttttgtttatgatgagatccacataaggtgaatgtgtggaaagagactggatgccagttgcctctctggagagagggacgctaggtgttgctcactaactggtgtggtactgtgtggtgtgtcatttttaaagatggtatgatagcaagtttaaggtgtttgctatattattttttctgtactcttctgccttttgaatgttttcaattttaaaaagcaattaaaaaatagtaacaaattttctagtgcaakggagaaaatgscacttaaaawtgtctttatctcatatctacctggaaataactgcctgcatttttttaatagtgttgaccctttatgcacatgtctgatattcatgtatcattttgagctttatttttttgaaatttgtggtcttgagacttctgcaccagcctgaattgaaggtgttcacatatgtttcttatgcagaacagtaatgtgaaaaaagtctgtccaaattcactaacaggttttttttttgagacagattcttgctctgtcacccaggctggagtgcagtggtgccatgtcagctcactgcaacctccacctccgagattcaagcgattctcctgtctcagcctcctgagtagccaagattacaggcatgcaccaccatgcctggctaaattctgtatttttagtagagacaggttttgccatgttggccaggctggtctcgaactcctgacctcaagtgatccacctgcctcagcctcccaaagtactggaattacaggtgtgagccactgggcccagcctgcttattctttcttcttaaaaatatgttcgtagtttgttttcattgttgatattttgttcccactcacttttaaccgttcataaggaaaggttacgattatgattaagcatgacctgaagacacatgcttgcatgcttgggctccttctgaaacttgatactatttagtgattttcattttttatgtttctattttttcaatgcttttaacagatatattcaaatattgtcatgaattgtttgatggcagggatgtgttctgagaaatgcatcrttaggcaatttcatcattgtgcgaacatcatagcatgtacttacgcaaacctaaatggtgtagcctgctacacacctaggctgtgtggcacagcttcttgctcctaggctataaacatatgcagcatgttgctgttctgaatgctgtaggcagttgtaacacaatggtaagcgtttgggtatctaatcatagaaaaggtacaataaaatacaatattatacttttatgaaactatcattgtatatgtgatttgtcattgattgaaactttcttatgcagtgcatggccgtataaaatgtgaacttttagaatgtgaagacaaataataaatatgtatctttgcagtaatgttaaaatgtataaataatttccgaatgcacatatttgcaaggtgttgaaacatggttattgtaacataatggagaatgcctgctttagctattacacaagytatatgtttggcatctaagaagatacacgtcactgtgttggggactcattctgttttaggaataaactgttcatrttgttgccatgatgccattgcagctrccttyatgccttgctgtcttccctctaaccagacggaattattcagattctccaagttgccaatttggttaggtctaagctaattttgattctctataatactaagtcttcacactcaggaatatcrtattgcacatttagcattgtatttgcatgatgttttctgtatacatccatagactccgtagtatgtatgtaggccttatagatttcttgttaatttctgagtgttttatatagttttgttgattcyatgaatgggtttataattttctaaaattatgtttttaactaattattgttgatatatatataagaaaaactctcaattttagtatttggagcttctaacaagtcaactagttgaacttttagtaatcctattgtttttgttctgttttttccacatagatgaacatgtctgtgaattatgacatggtataattatattatcatttataataatttttaatatttatatccctgattttatttttttatttacatctatgtatctgacgaagttaaactctgggaaagatattaaataaaagtggtgagagtgagcatccttatagcatctgataataatggaagggactctcttgcttatcttcagtatgatctttgtagaattttatttaccatgacaactcattgtttagggccattgttgtacaaaatgactagtgtcattttctgtgctgaacaggaaatgtagtagtcctttatatttcacttaaagagtttacacaagtaatttctttgaatcatttccatcctggagcatgcatgcacagacacacacgtgtacacagacagacagacatagacagacacacacacacacggccttagtagtgggaaacagacgacattgatgaacacaggtttcaaaatagcaaaggctgttagtttagctagaaactacaagactttaagtttttaccaaatgctgtccttttctttattctcagtgggtttatgaactgctttctagactgagcctgggactccattaataagtcatcagattttattttctctatttgctagaaccacctttgtagggcaatattaggttctcatttcagttaaggaaaatggcaagacattcttattaactacatttcctttattttatttttttaaattctgtatctcaggtttaatcagcttattttgctatcctgctcattgttttaaatgcattatattggtcttgttctcattcctgacatcttggagacaaatttagtgtttgatcccaccatatttgggatctacttatgaaagaggtgatctctgatatttatttttaagaaagtagagttaaaaggaattagcaggttacatggttttaatggaaccaacatgaacttgctatgtatgaataccactccatctstatcctctgtctttgtractgagggaaatccttaattttccacagtcctctagggtgcagcaatatagaacttcacagcaggtgagtaaaaaataaaatatgcagaggaaactagcgatgagcataccctgcaaaagaaagctgctgatcataccctgaggcgcccctgagtccacagaagcttctgtgagcctggcaggctctggagacttgggctatgaaggtctgctccaaaggcactcgtttttttggaatcacttgcttcattcttaagatcaaaatgtgcaggctgcatgtattgcagtcttcctgataacacattcatagcagtcctaatcatgaatatggagtagagtggaacttcatatatagagctttgtattacctagacaaaaagtagcatatccctgtgagggtgcaccttgggtcctcctgaaaagcacaaggcagaggtatcgtatatgagaacacaggaactttatagctttttaaggcatccagtgcttactttgcaagttcctggcctcaattttactttctatcttaaaacgtattgctgttggttctcttcatgtcctaaggtttagrggagtaaggacacttagtaaccttgcagcaccttacccgttgtttatgttccataaatattgattgtgtgagtgcatgatcaaataggctgggtactacagttgatttaaacaaagactcctcttgcttttatcataagtaccatcccaatcacttcccatatggaaattgcacatttagactaattctggtcacatgcaatgcttatgtccttattcttatttgatttgcaagtgaatttaattaaacagatcatttgtttgaagattaattctgtaaaacatagtctttgtaaatatattcaagaccttcttttctccccttgaacatggtagctttagttacttagataacacctttcccccaaaagcagttaactagggttggttatctgttggtctagtgctatttcttcctattctgtgagccaccatagccatgaagcatgaggacacatttatatgctaggttaaggagatggcaaatttaatattctcttcttattgtaatgagggatgtattatgatatgagtaatgtacttactgagaagttcaagggattcattgtgatctaagtgcaaacaataaccatggcctaytacagggtttccrgcatgctgggcacttttcttagccctctgcatatattaacccattcactcctcacaggaggcctgggaggcatggagagggtgactgattccttcaaggccacccagctggcgggtattaaaactggaagcccatcctgtgtgccatgtccctgcctgtgatcttcatagttgcatcagcctacttctgcaaactcaaatcgctctctgctcatagttattgtttctctagattatgaactagtttttcctgcacctgaaatgctcatcctgccaccctgcctgctaagggccttgggctttgaggaaaggtacattataaatcacttgggtcccgggcaccgccactacctaacagagctcaaataaagcatagcgaatgtcaccccaaagcaagcggaaggttttgttctgttcttgaggattcacaaaaataacagcctaatggtatacaagactattaccaagagataatgaaaaagcatcatcggagacaacagatcgtggtgaattcaagaacacacatcattacataaaggtttctctaaggtttatgcaaattgcctagcagtcatgcacatgtaacagtcatcactttatttatcacttaacaaatakaaatgctgaagcaggtggatgtgaacttgctcatctccaggccactcagagcctggaataaacgcacatgggctgtaaagccctcatgccggtggcccagctcacatgctggactagaaggaaaagtttctcctttctccttgctgggctccttcagggtcagtctttttactttcagaagttaattgcaaattcagttgatattattcaagagcctttcaaagcacacataaatgaaacgctgggcaactcattaagacatttatcagaagtgctttcagtttcttttcaaagctagagaaatgaatgcagamttgagtagttctcattagacttatctttcttatatgctgaaataaccgcagaacttacagacacccttggttataataatttttatggcctccattttaatatcaatagggaagaaatgaagcctcggtaaacactattttgagccgcttattttctccaacatcagtttgcttcacaagatttggaaacagactgtggcaatcccaaagttcaaaaaacaaagtcatgctcacacaattgtagtttgagctacaaataaaattgattgtaggccagtggctgccttagcacagagtccagggggcrtgtgtctatataacaatgtagaccagtatctgccaaatgtgttcacagacccaagtctttgaggacacctctacaggcaaagagcctgtgtccagatggttctgggggatggccatatgctgtctgctcccctaagaaaccgcattgccaaatgacgattaacagcccttagaatcccagagcactgagtcctgagcaatccagcttttcccaaataaatgtatttgaccatgggaactttttccatttaacatctaatagtatccctagttctcagaaacctgctttgagaaagctcacttagcttttttccaaatgaaagaaaaagtatatctagccttatgttcataataatgagcaaaatgtactttgcaagaaggatttttctcttggagcaagggaaacggctacacagatgtttatcagggaggaagaacttgggttcagcaaggaattgcaccaagatgggtcagcacattctgaaggcagctgtcaaatactcatgtgcgaagatgccttcccatcaacgttgagaaagggacactgcgctgggcgcagtggcttaagcctgtaatcccaacactaggaggccaaggcagaaggatcacttgagctcaggagttcaagaccagctcggcaacatgatgagatcttgtctctacaaaaattaaaaaaaattaaaaaaattagccaggcatggtgatgcacatctgcagtcccagctacttgggtggccaaggtgggaggatcgcttgagcccaggagtttgaagctccagtgagatacgatcgagccactggactccaaccagggtgacagagctaagaacctgtctctaaaaagagaaagagagagagagagaaagggacgctattcttatgagtaacagactcataggacactcccaaactctgtttcttcttactaagtgtgtttgtagaaataagccccactttgtagatgtcaacttcgcaacagccaggagtcttggtgtcatgagatggcatgggatagaggggccagttccttctaggtgagatactaaatgtgtcaggttatgggacctcagattcctcagtggcaaaacaaacaaacaaagaaaaaacagaattagtaactgtatggttgtccacatgttctgggattttcccagtcaaattgcaaagtagcatttggaactttccaaatatcatagtgttttggcctgggggrgargtattaaaatggctaagaaaatagcaagtgttcattatagtttatttcaagtctgtcttgaccagtttcaagtgacttatttgtaaaatgcattttaaaataattctaagtagattatattgccaattcatcacttaatagatacctacatttgtgagattcttttcaatctgtgtctatcattggcatagtgttttcttagagacaatcatgatgtaaatataatttgttctccactttttggataacagtttagataaatttttgtatgtgtctaaatcacttattgcttaccattttattgctgcaggctttgattttttaaaggtttactactgtattatctttgaattgaggggcagtagttcttgatgcttatgtattttgaattagctcccaagaacaagtagaattagtttaaaagacttctctctggtttctgttgatccaagcacaataaacttatctgcaatggattttagcatttgcttattttttttccctaaaatgataagttaaaactgatacttcaggaatttgtgtcctttttcctttaattaccaatgaagctgacattttcttcaagggctgtgttcttctttgtagttctttttgtgtaaactttgatcttctggccttctttctagctgtatagcttcctttgtttgtgtgaagtataaattttttctcaatttttcagccatgaagtaatggactgggtgtgagtctaagttaatatggttgtgttgagtttagctttatttaagcagtwtggaaattcaaactctaccagtcatatttatttctgatgtttcccaattcctgtttggtcttggttttcttgggcttcactgtatagaagtacataacatttatataattgcctcatttccgtatttattcaacacacattttcttatttggtcagcatctatgaaagaattcagtatgttagatcacagaaacacaagaaaaatctaacctacactgaattatcaaaaagcaatggatgtacaaagctgagatgcaacaaagtgctctgtcgtcctctctttctctctctctctctctctctctctctctctgtcagatgtcttctgtctttaactgccttcttgttgtgtgctcacctttttcattagagctggttctatccatttaagagaaaacaacattctgggttttgtttttaatagtttgtgatctgatttttagaaatatttcactttttgttcatttggcactcaatgtagtatggaatgagagctcaaaatcaaactacagctttccttttattcacacacatttctccagcagcatttatttcatagccagttcatgtccacgtggtcctggcagtcctaattgatattatattaactgatttaaatatcttgggctctaatctttggcastccagcctttcagtcttgatacggtttaatcagatgcatacctcttaattaatccttagtaagatatatttaaaagaaagttgaagaagcatatggtattatccttaatgatggtaaaataattagctgtttgacagcccttttttttttaaagttatttctcttgggtcatggaaattttgttgtatgartgctttgtctcacttccagaggtgttccatagtttaatggtggaatttctcactgggagtgaaaacagagtccaagatgggaggtgttgatgcatgaccatagtgttggcttctaataaaggcaatggtttcacaccagataggctgtttgctgctgctgctaccagaactggaattttccccttcttggagataaaatacggcactttagaattttctagttaaatcaaaaattcaccacctctcctcacagcacagtgcataaccaaggtgaaattttatttcattctattcaactgacaactgttctagaaaatgtcttattctttgtagccgcgtagctttccttgcatgtgaagtacatttttttycctcagtttgtcagccatgatgacatggagctgcatgagtctaagtgaacatctgtagacttcccatcttttccaattaaactgggcagtaaaacctgcagtgtctgtacatgggctgtttgtcaaatagactaacaactatggtagactgcaatgtgctactgaaacagaagctattttgcattaagaggtttattctacttagtagctatagatgaagagctcatcatgcaggatccatatggcctcatggagggatagagatggaaatgagcaacccagttcagtgtagggcatgatgtgagcaaggcactacggacaccaaagaaagaacttttcaacacctaagcaacacctaaggcaggtggggatggttccaaagcagaggataccgcaggacagaatctggataacagagagatctaagaatgcaggtgtgttcaggaatctcacacctgctaagsgtgggttgacctggctgttggatgtggatgagtgcttgaggcttgaaaaagacttgggccaaatcatgaaaaacacacatagttcatccaaaataatttggccttcattatgggcactaaagagataattaattgctttaaacaatgtaaggatatgatccaggattgctgaggaacatgcctattcacctgtcatcgacacactccacagctgctgccctagaggtttatttagggttcttcagttaccagggtactccagatagttagctccctaatttccctccaaccctaggtcaccaagccagttggaatatacaagactttttcatattccatttgcctaacttcttgcctaatcattcctctgaactgtggcctcagtatgactctgacttcctgagctccaagcccatagttgaaatggtgaactgctcagacttaagagagacagaaagattggttttctgcctttggagaaggaaagaagactgatgtaattgacccaactggggttactgagcattgaatctcaacttaatttagctgtgctgtttcagtcttctactcacacgtgtatgggaaagttcattgtggtttgaaaatgaattttcaatggataaacattaattaattattaaaccattaataatcttgaaagtgcaagggaccttacatatctttaaaccagtatcattgattttctaaaaggaaactgattgactgaatgactagattaaggtcacacaatcactataagtgtaaccctatgacttctgcttgaaaatttcacttaagcttttccctgaatgattaaatttccaatcagatcataattgggatttgttgaggggctgtgactacaaattctgacagtcacatatttctaggggcaaaatgaaaacatagaaaatcttagatcaagccactggttggtgccttgacttttggaccagaacagctgaactgtgtgttaaatatcatcatgagaaacttaaatggaccaactaaaatattttaacatcctataattttgttgtaataaatgcagtttaaaaacctttttttcttcaacatttcatgtaaccactgaaatttaaacttctgtaagtctaggcaacattgagcaggtattccctcttaattcagtatgacgtgagaaagtgaagcagtgttttgtcgcctctggacatgggtaggagtgactaaaagtggaccagaaatgaggatgagatgaagaaaaaatgcagaaaaaaagaagataatacatagctatgtaagctaaggaggagtcaagggacaaaaaaaaaaaaaaaatgcttgtgtttgggagtaaaaaacagccacaaagagatgtctaaatatatttgaactccacactacagaatttcacactcccttcaagaatgtggcttctagaaactttctttcaagtcacaataaatttatcacaattcaaatattgtattggtttaacttaatttcatgggagtaaaactctgatgctatttatttgtgtttaaaattgtaacatagaagggcactgacatctgtccttggctgttgtcaatattctttcattatgaaaccctaggccttcaggtttgcaaggtttagaaacactctccttgttaatgcattgattgttgattctatcagaaataggctttgctgatatgttattagagacttactataaaaattggaagcaataacttacactttggtaaatatatgctatgggaattttttttggtatggaatctattagtcagggttctctagagaagcagagccaataggttctccagataaacagaagcagtatatattctggatatgtgtcagaagagatttattataagaattggcgcaggcagttatggaggctgagaarttccatgatctatcatctgcaagctggagatgcaagaaagccagtggtccaatttggtccaaaggcctggaaactaggaagccaagggtgttaagtcctgtttgtgtccaaaagcctgagaaggargagttctgatgtcaaacgactggagaagatggacatttcagctcaagcgaagggagaacgaatttgcccttcctccacctttctgttctgtttggaccctcagtggatttgatgatacccactcacattggtgaggatcatcttcattactcagcctgctaatttcagtgtgaatctcttccaaaaacacatgcatgcacacacccagaattaaaattttgtatagtttgttcttctgtattaaggattgtattaattattgctatggccagaattgtgtcacccctctcaaattttgtttgtcctttacttttaagttcatgggtatatgtacaaatttgttacataggtaaacgtgtgtcatgggagtttgttgtgcaaattattttatcacccaagtgttaagcttagtacctattatttttcctgatcctctccctcctcccaactcccaccctccaataggcgccagtgtctattgttcccctctgtatatccatgtgttctcatcatgtagctcctacttataagtgagaacatgcagtattcagttttctgtttttgcattagtttgctaaggataatggcctccagcttcatccatgtccctgcaaaaggacatgatcttattcttgtttatggctgcatagtattccatggtgtatatataccacattttctttatccagtctatcattgacgggcatttagtttgattccatgtctttgctcttgtcaatagtgctgcagtgaacatacacttgcatgtgtctttatgatggaacaatttatattcctgtgggtatatacctagtaatgggattgctgggttaaatggtatttctatcttcaggtatttgtggaattgccacactggttgaacatcatcttccacaatggttgaactaatttacactcccgtcaacagtgtataaatgtttctttttctccacaaacttgccagcatctgttactcttttgactttttaatagtagccattctgaatggtgttagatgatttttcattgtggttttcatttgcatttttttaatgatcagtgatgttgagctttttttcatatgatcgttggccacatgtatgtctcttttgggggagtgtctgttcatgtcctttgcccactttttaatgtgttttcttcttgtaaatttgtttaagttccttatagatgctggttattagacctttgtcagatgcatagtttgcaaaaattttctcccattctgtaggttgtctgtttactctgttggtgtgcagaagctctttagtttacttagatcccacttgtcaatttttgctttcgttgcaattacttttggcatcttcatcatgaaatctttgccagtgcctatgttctggatggtattgcctaggttgtcttctagggtttttatagtttagcgttatacatttaagtctttattccatcttgagttaattttgtatatggtgtaaggaaggggtccagtttcaatcttatgcatatgagtagccagttattccccacaaagtttatatgtagaagtcctaacccctagtccccataataggactatatttggagattgagtctttacagaagtaattaaggttaaacaaggtctttagrgtgggctgtaatctgatataactggcatcttcatttgaagagacaattaggacacagacacacacagaaggaagaccatgtgaagacaccagaagaagacggccatctacaatccaaggagagaggccctagaagaaaccaactctgcctacaccatgattgtggacttctagccttgaaaactgtgagaaaataaatttttgtgatttattctacctagtctgtggtacttcgttatgacaccactagcaaatcaatgcaataaggtttaatataagttttgcccttatttgaagtgaagcttgttttctttaaaattcaccttttgaaattagtgatataacaaagcacatggtaaacatgcaaattgatgttcacatgaagtgtgagcgaaggattgaaggtgttttccgtggagggtgactggagtgggtgtcaggggtgtgtgctcacatatttcagaggcatggatgcatggttctagaaagatagacacggggaaaagatgtgtatgtgactacatgattatttatatacattaaaattattctaatcaacaatataagttacataaaaaactgggaaaacatttgcagcctctgggatacagggttgattttctttttttttttttttttttttttttgagaaaaaaagctgcaggctttattgagcagagtgacagtacaaagcttccacagcgtggaaggggtcccgagcgggtagcaagagttagattgtgcagttgccttttaaactcttttttttgtttgtttttgtttttgkttttgtttttatttattatactttaagttttagggtacatgtgcacattgtgcaggttagatacatatgtatacatgtgccatgctggtgcactrcacccactaactcgtcatctagcattaggtatatctcccaatgctatccctcccccctccccccaccccacaacagtccccagagtgtgatattccccttcctgtgtccatgtgatctcattgttcaattcccacctatgagtgagaatatgcggtgtttggttttttgttcttgcgatagtttactgagaatgatgatttccaatttcatccatgtccctacaaaggacatgaactcatcattttttatggctgcatagtattccatggtgtatatgtgccacattttcttagtccagtctatcattgttggacatttgggttggttccaagtctttgctattgtgaataatgccgcagtaaacatacgtgtgcatgtgtctttatagcagcatgatttatagtcatttgggtatatacccagtaatgggatggctgggtcaaatggtatttccagttctagatccttgaggaatcgccacactgacttccacaatggttgaactagtttacagtcccaccaacagtgtaaaagtgttcctatttctccagggttgattttcttaatggctaaagaaatgtttccagaagattcctacaacaaggtaatggggcaagagaaaaaaaacaaacccatggcaatgggcatggagtacctggctctgtcacacgtacatataaataccgtagctaacagatgcaaatatcttctttacaatgtttaaattaaagcatccttaggcaaagtggcaaagcgttcaaatctatgtaatatctaaagttgatgagacccatacaagtggattctctcatatactacccctgacctttaaattagatcccagatgtagaggagaatctagtgaaacatagcaatgcttttcacatggaggacatcctttgagtcaccagggaagcctgtaatcatgtatccaagaagttccaatgaatgcatgcaaaaatttagtttctaagaatggttattgaattagaatggcaaagattagaaagaattaggtgtctgacaccagggagtggattagacacatttttttttacacccaaataaaataatataaagacagtgaagaccaacaatatgagaaaattcttatagtattgtatgaagaaaacaggttttaaaatgatagcagtagtacaattccatttgtgtaaacaaaagtgtctgtggcagggtgtggagactcatgcctgtaatcccagaactttgggaggctgaggcygaaggatcacttgaggccaggaatttcagaccagcctgaaaaacatagcaagattgtgtctctctataaaaaaaaatttttaaattaaaaaataaaaaggagaaaaatgtctgcattttaatataatctttggaaggatgcacattgaaataagatcaattattttggagtggtgacattattggtgattttttcttcttttggattgtctgtttcccgtgcattaaaataatgaaaaaaacacaaaactgttttttaaaaacctcaattttaatttatttaaatgtaagaaagatgttcaagaaacagtaatgtatgattgcttaggtttcataaagatgatttagaattttggaagtgcagtgcttttgcattcatttgccagcagtttattcattctttcattggttcattttttattggttccttttttgttcttgttttgttgatttaagtgaaaattatctcttattttaaatattctgaagatttaggacttcctcggtcctaaatattccacagtcctagatcctctcttgctgtgcatacctttgataaagccattcattttatatttacgcttttggaaaactgcaaaccttacatayccaattatggatcagttttttaaagtaatttaaactgtatttttatattcaaatatgtaccatcaaccaaccttaacaaaatgttctaacaccaatgctaaaaaaaacccctataatttagtgtaaataatcaagcttatgagaaaacaaaatctgcatctttaaaatgaattacctctaacataatattgctgtttttcagtaattaagaaatattaagtctgtctgtgaatgcgtgtgtgtgtatgtctgtgtatttttggcaactggagatacttcttttctattttctaaagcaacaaggaaggattatttagactgaaatattttgaaattggtgctctggctgggtatgatgttctgggttgcagacttctctaccagaaatctgtgtgtttgggcatcctctgccttccctcctcccagcccccattggagcggagccgaaaatgttttctttctggctcactgtgctgcacacaggccctcccaggaggcgggtggcagtaacagagctgtcacagggctgccacagatggttctgtgctaaatcttcagcctcggtttatgactccttgggggagggacagggttggctggaaagtgtattcatgtacactccagagatgctccagtaggtgaacgggcagaggcccgttaattacagatggaaaatgcttcccattcctctctgttgcatctgtgtttttccggttggcatttggaatggacaggacagtgacatgctagatgttttaggtgaaacaggcttatacaaactaaggcaacttttcatgataccttatgtaaaagctggtattataatccaagaattgcaagggctcttgggtaagtaataacaacaggccctttgaaagtgcttgctgtgtgccagacactagacaaggcaatattattcaacatattattttgttttaaatgaaccaaactgtgctgttttttctttgcagaatatgaaactgaggctcagataatttaaataacttgcttaaaggtcacacagcttgtaaatgaagatggaaaatgaaccattttacccacacccccttccccaccaacaccactgttaagagctttcctaactagaaatgtattctgagcacatccccaaacattaaacagaacttgcttaataagtagagctagcaacctatttaaaattggcagactattttaaagaaaatacatgtgcaagtctggttttcctgaatagacttatctttactgaaaaggtaactttcttacatcatagcattgcttaatgtatatcttaattaagcagtcccaacatctcaagatactcaattccttcctccctgatttgccctgagtatgattctgttttcctttagtttgtgatacgaagattgttagtttctctattattttttcatagactattggatattcgaaacattagtcagtctctgctacccagagaaatgtggttgttaaagtattccagggtggacagggaaagccttttaaagaggtgacatcttactcacactgcaggatcagaaagagtctttcaatttgaatttcatatcagatatattaccaaaaaaagtaagatagtcttaaagcatgtgcatgaagctgttctgtggtctgcagaggactttaaactggattgatcaatttataatgcactaaaaacaattttactatccatcaaatttgcaatttacatatgtatatgggattttgatactcatatagctaggatagagatgtattttaaaaggcaatggtgtgtatgatttgtacctaaggaataaagtaagttgatagtgaatttggcactgggggtggagccaacagctgggagaagtggtgagcctggctccagtcatgagtccaagaacagctgatgaaacttaggagaagactgtctcatgacattttaagtaccctctgcgtatgccgtgtcccctagactaattttttagaattaccagtgttaatgataataataataataaatcaatgacaacaaaacttacaaaattcaagggccatagtttacctctaaaacagtagaaaaggtgaaattttgagtttgttacttgactcccattgaccagcgaaaagaaaaatgtttggttaaaagcacttacagtttgattgctgacaagagtaaaaggaaagtcaaattmtggggcccaccaacgcagcgaaatgggcagcagagaaggacaagagattttcccacctcttggcttcrtcttaaccctataactgttatagctaaggcaggagggctggtgggaacacacttacctgtgtctgtcataggcatccttagttctcagaaaagacatcacattttcaacagagctccctccagctatctcaaataaaagccaacagactgaaggctccttgctgtgtatcttgtgcaaacttgcaaaatttatatgaacataatattcattgttgaaagatacatgaaaggagaatgcttttaatgtgaatgacttggtgttttgcttcttggcaygtaatgtctgagagcactttgagaaattccagccagaggaggccttctgaaatggcagctttgcattgatgtggtgccagtggtcaaattgaaacagaagtcttgagtgtgtttccagtgcttttttattgagaaagttatataaatacagcacggaggttcccccagtgtaaacacttagctctttattctcactgtttccacaccctgaaatatctttcacaccttcctatttgctgcctaggtatttttaaaagagaaattattctttttagcaagtttttgtttgttgatgtattttgcattttgttgttatggtggtggtttaggtwtttttgcaataaattttctgtttgtttatctgatatctgtgaagaaataaaatattttggaatcgtgggcatcttattttaggagcttacttttacctaactccaaagtaggaactgtcttaaagctaggaggctcctctgtatttctagttttcatatttgaacagtcaatgtgtcaacccacggtgcctgacatcccctactcccattcctgatgctcctcgatgctcccaacagagtaagttccttgcaaacctgtggtgggaggtctttcatggtgggcacacagccactctgagtccaaatacggtccatcctggttggctagtttgagtaatgggaacccagacagcgtgctgggttaggactagggcaaacagagatggactccacgtaagccactcagacatatctcctattgaattgagaaagtcattgtctttaaatataaaaatctcatcttggaatgataagtcttaggaaagtcatttattctctgtgtctcagtctcttcatttttccagtggggtaatatagtttcacttccgtcaagccaatcattctatacctaacaatacatatcctggacaaaatataaaacaaaaccacctgaaggcactgsaaagtggcccaaaagaaacagagctaygtwggagtcaatacttaaaggagacaaacagcacctggatgacctttctctttttatagattttggccttaggggaaaccccactcagtgccagttgggatggataamattttaaaaaggaaatctatgttttccctggattatactactggaagaaagagttcaacatcactacagtagctaaatatgagggaaaaccctaaaaaaaagagatccacagagacagagagagagagagagaacagccaatactgcatataaactctacacctgagactggctgttgaaataagcatgatccagccagcatcccaggaggacggatgagaggataaaataacagaatggagatttcagctgctgcccgctgtgggagagaccagatatggagtttgactcctactaaaatgaaacaaaacaatcaatattctccagaggaatgtgacagaatgtaaggtctctataacatgtcattcataatgcttagtctacaattcaaaattaaaataaataacaggaaacaaggaaaaaatgaccatgttaaaaaagagacaatcagtggaaaccaataggaccattacacagaatctataatgagcatgcaaggaattttaaagtggctataaccacagtatcaaagacatgggaatcacctaagtggccaccagcattggattggacaaagaaaaggtggtatatttacagcattgaattccacagagccataaacaagaacaaaatcatgtgttttgcagcaacgtggatgcaggtggaggccatgatcctaagtgaatcgacatagaagcagataagcaaataacaaacattctcagtaataagtgggagctaaacattgggtattcattgaataaagaccctaggagctactagaaggggaaaggaggaggacacctgtttaaaaactaactatgggtactatgctcagtacctgggtgatgatgggatcaactgtacccaaacctcagcatcttggaatacacccatgtaaaaaaacaaaaacctttacatgtatgccctgaatctaaaataaagttaacattactttttaaaaaagaaattataatcactctaaaaatataaagtggttataattaagtttttaaaaaggaagcaaaagaaagtacagtgaaccataagacataaatttaacagagaaatagaaactataagaaggaaccatattaaaattctggaactggaaatctaaatttgcaatgttaatatattaatgagtgagattaacaacatattggagatgacagaagaatagtattgaacatgagcaggaccattagaaattatctaatctgaagaacagggagaaaaatgatttttttaagacagcaaaggctcagtaatctatatgataaaaagcctaacatatttgtaatggagtcacagaaaaggagtgagagaggatggagaagaacatatatttggggaaataatggctaaatttgtccaaaatgtgggggaaaataaaaatacagattcaagaagtttagtaaatgcctggctaactaaatacaaagaacacctctaccagacatgtcatggtcarattggtgcaaaccaagagaaaatctcaaagatagccagagaaaactgacagatcgaagggaaacaatatgaatgactgttgacacttcatcagaatcaatggagccacaacagagtgggataacawtgttaaaatgctaaaagaaaacaaacatcttagaccacagctctaactctaagtgaaaatatccttcaagaattaagacaaaatgaaggcattttaaatgaacagtaactaagagcattattcaccagcagacgtgaactgtatgagaaagtaaaggaactccttcagactgagttgaaatgatggaaagttggattgccaggaaggaagaacaacctttggaaattgtaaaatgtttgtaaatattaacaaaaaacctgttttatcttaattttaaaaacacatatggaagtttaagatggatatgataacatcatattgaaaaatttgtaatatttgcattgtaatacaygacagrgatagtatatagtgtatgtgtacacacatacaaacacacatatatttcatatatagagtatactgtatagtagaattggaatgaacacatagagttccaggattctcatattaggtgtacaatattaattctaaatcaactttaatcactagagcaatcacttgggtagtaatgcaaagaggtatagctgcaaatccaatcaattaattgaaatggggttaaaaagaataagttacagaaggaaagagaaaagtagagaaagagaaacggccaggtgcggtggctcacacctgtaatcctagcactttggggggccgaagtgggcagatcacgaggtcaagagatcaagaccatcctggccaacctggtgaatccccatctctactaaaaatacaaaaaaaaaatcgctgggtttggtggcacatgcctgtagtcccagctacttgggaggctgaggcaggagaatcacttgaacctgggaggtggagcttgcagtgagctgagattgtgccactgcaytccaggctggcgacagagcaagactcagtctcaaaaraaaaaaaaaagaaaaagaaaaagaaaagaaaagaaaaagaggaaygtaaaacatgtaggatgaacataaaataactagtaaaatattagccctaaatctaaccatgtgaataattatgttgaatgtgagtggactagaaacactgactaaaagatgatattttcaaaataggtaaaaagcaagaccaagttatatgttgtttgcatgagatgcacttttagtataaagacacgggttaaagataaaaggcagcaaaagataagtaggcaaacaggcactgtaaggttggagtggctaggttaacattatttagagtaggtttcaggacagattattatcagacattttacaataatatcattctgcattcattaggaggacataacagtcgtgaacatgtatgggcttaaaataatccttaaaagcataaggatccacaaatagataattacctgaaaacaactgttaaaatgaaaaagagtaagagacaaatcctcttaagatgaaccagtgatacttagagaacaaaataacaccaatcttacacaagccatttcaaaaattaaaaaggaaagaactcttgtcgactcattttatgaggccagaataaccgagatactaaaacctaacaaagatcgtagaaaagaaaatgactgacccatattccagatgaatttatacacaaaattcttactaaaatcttagcaaataaaatccaccaatatatacaaagaataatatattttgaccatattaagtttatcctaagaatagtttaacacattcacagaacaaaggagaaactctatgtgaatattacaataaatgggagaattacatggcaaaatttaaccctcctatgtgattaaaacactcagtagtttagaagagaaagtagaaattttaaactgaaaaagggcatatatgagaaaaataaaactaacattttactcaatggtcaaatattaaacacttttcctctaaagtctggaacaaggaacttctatttaatatttactgcagggcatgcaaatgaagagaggccagaaagaaaatggcataaaacatagaaaggaacaagtaaaactgtctttttcatagatcagttatatacatagaaaattctaagaatttgattaagcaactagtagaattaatatgcaagtgtagcaaggttgaagaatacaatgtcaatgtacaaaaatcagttgtgttttrtatactggtaggaaaaaatgtaaaataaaagtaaaaatctaatttcctttacagtttttttcaaaaattataatatctaataatgaatttaagaaaagacaaattagatctctacatttaaaattacacatttaagatgtatttaaaaagaccaaagttgacagaacagtrtactttactcatgaattggaaacctcaaacatattaggatgaaaattttctcaagattattgtacatagtgaatcaatcttaatggtaagctcaacagtctatttgtggaaatttataaactgattataatatttatattgaaatacaaaggacttagggtaatcacagtgatcttgtaaaagtagaacaaagttaaagtatttaactttggttagctttgctattcaggatacagtggtcctagcataaggatccaccaatagatcaatgtcccataaacccataaaaagggactcaaattcagcactcatcagggaaatgcaaattgaaaccagaatgagataacactacccatatatcaaaatgactcaatttaaaagaatgacaacaccagttattgtcaaagttatcggataactggaccttttgtacattgatggtagatgtgcaaaatggtatagccatttggggaaaagatctggcaatttctttcaaaatgaatcacacctgctctgtgacctagcaattcaacttctaggtatgtacccaagagaaataaaaatgtgaccacatatgcttgatttcaaatagcaaaaactgggaacagctggagtgtccaggaacagaataatggctatacaaactatgaagtattcatacactggaatacagctgagaagtaaaaaggaacaagcaactgttwcatgcaacatagataagtcacgaaaacatatgctaaatgaaaggaagcccaatgcaaagtgtactgwgtgatttttttatatgagggtaagactggatgaaaaatagcagaaaagtggttgcctctaggaaagaaggaaagggaatgactgagaatggggtgatttcttccatagtggtaatgttccacatctttatagggtttttctttactctgatggatgcatttgtcaaaaattattaaatggtactaaagacctaatgtaaagcataattaataatattggattgggatagtcctaaaagacacaatcccaaaaacaatgatagcgaatgttgaaatcctgaaggatcaaaactccaaaaatatcatttcggaaaaaaataagttttaaagatatttctttatatttctaaaagggaattttcttgagaacatataaaaacatgacagaacacttcataggtcactttgcacaataaaataggcaataataatgcatatttttgcataaatactcaggtataataaggacactagtatggctgtaatagttttgagcagatgaactgtgttcataaagaaatagatcaaaaagaagaaagtatagacacgtatcactatgtttggagattgtgtgcacccagctttgtaactgtggttatctgaaatgccatgacgaacaaccgaagtctttatgtaaaaatgtcttttgctgaaattgataaaaaaattatggtgggtcaccaccacagttgcccaaagagctgagatcttgtaaaatttttatttatcagaaatgcaggtgtacaaaaagatcatatcttcatttatggagaaagcttcaacatttttacaaatatatacaatacttacacaaaaagttaactttgtgatgatgcacttttgtggacgcaaatttgccaaaatgcgtgaaatgaattagaactctctaaaagtctctacacaatttataccttcactattgaaagtgatgcagagatgaaatacacagcatcacaaactaaaaataatgctgacaatgtaaaatagtggaaaaaatgttttctaaaaagaaacaactgaaaatctaaaaataatatttgatttatgaaaaagtatattacagggggctatgggcacagacatagtatataagaggtggccagatttcaccatcattaactatatttagaagtcttgcatcacaatgaatagctgctttttttcttttgggacctgggtctcctctgagaatatgttcacattcattttctacgtggcaatttcaatttttttgaaattcttctatgatttggtcaatatacatcaagatgagcattccctgtcaaattctcccatcttctgtgccatgcctctatgttgttttgtgtatgtggaaatccattccacacgtattcatccacagaccacgaatttagtggaaacaataatggtgatagaatagcaacatcttgcgtgtccctttatcctagcagacacatactattttcaatccagtcaggaacttcactggcttcttcaggcaaatgtggttttaatttattaaatgctcctggaatatcatcaactggaatgaatgctaatgcaggcaaatgacacgtttaaactgaagttttccatagttactgtgtttcatagccaatttacaatctgaattttctctcaaatgcaaataaagacaataaacagttaatagttccacctaccatgatgcaactaacatcattatcctacctacaacccaaaacacactaatcccttccccagaattcagctttcaggatttcagcatttaggattatggcattcaagtttgtgtctttcgggattagtatccaaacccattgaattgcacaccagaactgctaagagtagcatttaggtgttcttaccaccaccaaaaaggtaactatgtgaagcaatggctatgttaacttactcgacagcagtcatcatttcgcgatttgtatgtacatggtgaaacaccatgctgtactccttaaatatatacagtttcttgaaaagaggtaaaacatgtaattatatgcatattttatgctgactatcacaatgttttaaaacttgagttctcatttagtgaaaatacatcattcatttcattgttttcttaacacacaacttgtattctagtaactggtaaagttaaattcagccaacttggcttatatttttccctgtatcatgactggtaggtaagattatcactatatttagaaagggaaagtaatgtacttgttttatttatctcgttttccttttgttctggcaaaccgatatgataaatttggattaatccatggcaagctgatcattgcatttaaagtttgagaaaaaaattatactaaattattgatgtgcaaactcaagccagaatggtaattttttaaaacagccactttcaaggtcccaaccacattaacaggcctgtcctttctgtcagcttctcccaccctcatccattctcatcctcctgtcttcctttccagatctcagtgcaggcctatgtcgacaccaaactattctgtgtcaattcctgagttctracaaatgtgagggaaaggaackatgcagttaattcaacccgtaacatttgctgcaggtcttcattttcgaataggagacaaggtcatctaatgagccgctgacaggagcccrccgtgcatctcgggggatgtcttcaggcagctcaccggctgtctttagcttgcccagacaggcccatgataaactcatcaagagtggctgagaaaggcctgcagctgggtggcggtgtaagtgtgtggactgtgataggtgagcgttggggagtcctctttaatttacgacaaaggcaagtgaagttcatttgaatggagctcctacatggatcctattctatgtctgtgtccatgtttacatccatcgccacatcttcgtctatctatcccttcagatctctatttgtagatgcagtatcatctaatttatctatctgtagagatagtatttatgtctgtacatwkwcacacaggtatatagatagatagatagacaaagacatagatataggtgatatagatcgtttaatcccctagtttacaggtgaacagtttgaggctcagatttgaagagagtgtctagagttatagacccagtgacaggtggagtcaggtccaaaccctttcctgcccaggcccgaagtgctgactttcagctgcaccataccatcactcgcaggactaacttcaactcatcccttgggacttaactcagggatcacctgctgcagggtgtccccactcaccctgcttccttcccgaggtggcgtccctcctcccaggtgatcacttggggatccttgtctaattgttgtccagtggcactaagcagtgtcatgagtttgatctatttatgtggcatcttccctactctgttgcgagatgcttgatgacgcatagcgttttctttcatttcaattttatttttactttaagtcaaagcattgacatctattataaatatcatacatgatgtagtaaaaaaaaattaaaacagtcttcgttctcaacgaccagcctcccccagagttccacagttgatgggctcctgtaccttctagggaacaggtgggatttatctttccattccttgaatcttaggtagggccaggtgcctgaaatgtggtagcggattaaaacctgcctggattacttcacggatgaagcccttcatctttaattaagaacaaagttatattcagaatgacagcaatcaatttagaaaatgattcctatttatattatggacaagtaagggaaagatttggagaaggagcaaataaaggagaacataaacacagggtcgtagaagaggatagggaaacrttgagagaatcggttgattaggggttcagctgccagaagtctgggactgctgatgtctcttcttctactttgccattaaaatgaccaggacaggccaacagtcttattaaaattattgtgtcaatactagctaatacaattagtcaagagaaagaaaaaagctgtaagtattagagagacagtataaatttattattactactattacaatccctgttattgttactgcaaataatatgttgataccagaaaaacccaagaaaattaagaaaagtaattagaagcaatgtaagaggctgataagctttccttatttcagtaatatggttataaaaatatcataaaagaaaggattctatcagaaatatttttaaaatggaatgttttggaaaaaattaatgagaaaaatagaaaacatgtacaaggaaactaaaattctttcctgaaacacataaaaaaatccacataaataggaaatgtggacataccatgttgggtggaaatattacatattacaacaaggccaatctttgctagatttatttataatggtaaaaatatgaatcaacagcccactgggccttttttggtaactggataaaataatgctgtattttatttttaaaagtaaaccagacatggtatctaaaaaatgcaccgtcaattatgggttaagaaccagtggatagatcaatggactgttgccaccgatggcaagctttttctgtaaaggccgagacaatacttatattttcagcttcatgggccaaactactcatctctgttgttttagcacaaatgcagccatagacaacatgtaaatgagcatggctctgttccaatgaaactttatttatgtacactgaaatttgaaatttatgtaattttcatgtgtcacgaaacattatgttgcttgggaattttattttaatcatttaaaaatgtaaaaatcattcttagctcttgggctgtacaaaaacaagctgcaggactgatttggcctgcagtttgtagtttgccaatccctggaatagatcaaagagcaaagaaacaaataatacgacacgtaagtaaggaaaatattgtaaaggaggaaaataaaagttatctgataaacaggtattaggagttggctccttcactgagggaaaaaattatgttaaaccttcactatccaacagctaaaataaattccaaatgaagagttaagagtaaaaaactaaagtgattaaatttaagagtgaaatgcagcaggtaaaactaactgatttgcaaggcactgtaatggtccttaatagccacttgataattgcacaataaccttgaccattacaaaaattaatagcattaaattgccttattcaccctaatttattttctaaagggtttgctactgtctgattttttaaagactttagtaaaaggctagggaaaacagatgaaaaacatacactgtaaccaacaacaacaaaaaatgattccaattttgtttttacaaaatatgcatagacaaagtaaaaaagactggaaagaaataaacaatgtccactggcaaaaaaaaagaaagaaagaagagagaaagaggaaggaagggagggagggagggatagaaagaaagaaagaaggaaagaaaaaagaaagaaagaaagaaagaaagaaagaaagaaagaaagaaagaaagaaagaaagaaaagaaaagaaagagaaagaaagaaaggagggagggaaggaggaaggaaggaaggagagaaaagaaagaaaatacatattggtgaatatctaattttgtagtaaggaagacatttctaagtctaaaagggactctctctgggccctaaattctgctcctgttttcctgagtgttcctcctgtttgtccaccaaatttcaagcatctgtgaagggtttccctcttgctcctccagggcacagagatgggctgttgggggtaaccaatgatacagcactcgggagctcacagcacttttcattatttgtgcatccagaggaarcactactaaatcccctttttcctctcccagatatattaaagccatccaatgaagtaaagcctgggttatgcaatgttaaatgggtcctttcacagctgattccaaaaggcctcttggtcatgaactgcttcatccttacctgtctatttaggtgttagccacaggtggctcacaaccgtgtggccaacactggtacgtctggctgctggagaaacccaaatcccatggccaagcaaggatttaggctccgtctgctaaaaccaaaatcaaagccgacaggagctattggaaatgagataaaatgaaatgagtcacttggggagtcaccgcacttcaactaagtgcaaaggatgaaaaggagtaataaggtaaagagaggtataagaaagctaaatttgggactcttgcaaaaaagcatagaatatggggattattaattgatattgtaaatcttttagttttgccatctaatttcatttactcagataatgatagaagcttttcttgacagatgtaacagagaacagaataaattggagacatactgctgcgaaattagattacatttaaatgttggctattctttttaaaattctgtttttaaaaatagttttataatcatgtaagtcattctaggatccttatgttctctttatccaaaaccatatttaaatatcaagacttttgtgcttgtttggatttaggggaaaaaataagtggttcacttgtgaccatgttaaaaaaaaaaaagcaagacttttctctctgtagataccttaatagtttaagtgtgttgcctggttttctgtcatcagaaaaggtgaaatattacacaaaattatttgacaagaccataccatagtttcataataataccaaaagtaatgaacattatggtgtggacaaagtcagcccacaggaatccataatgtaaatgtggttatgtgtaatatatagagaaaagggtccagtatgtttttgcttctaggcatttaaaaagtttggtattaatttatcttaaccattaatatagtcaagactcttattatttatttctgtaattggtttttgaaatattttaacattagaaaaataaataatattcaaatggaaaaagtggttgcttttcaaatccatggattcttatattttaaaggtaattcagttttatcatgatttcatacacatcttcaaaattatagtaggcaaattttggaatgattttgtttttagcttttgaaattgctyacgtgattactggtgacgttatttaattagaatagtttatggaattatacataattcagttgatcactatctaaagcgtgcagtttacattttttaaggggaagtaaaatatttgtgagttggtatacctatgtcagaaaactcagagacagaactttgtttttttggctttttatgcaatgaaacttgtttgtaacttactactcctaagatgatactcttgcaatttttgtataacaccaccctttcagcataggttctatcagaaagtttaagaaagtaatgatcacatttatgattctgcacatgaacaggacaggtgatgtgaacatacagtcgggaaacttaagttggcacytcccatccatgggctacttaccatgaatgagtcttctgaggccttttattttaatttgatcattttcaaactaggtctaatatttaatgtctcttatctgtctacctcaaagtactaaaaatactcattttgatcatgtcgatggttatacagcaactgtataagtctccatccttcctataatactctctctagggctagagagttagagggaagaagtggggcaccacatctcagccatgagccctcaaaccaggagagccagatgttccagctctgggcaaaaacccaggaaggcaatccacgcatagaatcaaacacacctaggttagaagtcattggatattatgcctctgagtttttgccaaggactagtaaaaatggtgtttcattttaatttatttgcattttcctggctgctggtgagactgggtttctgtttacacatttactggccatttggatttccttgtctttgaagtaaatttttcaatcttcttatccatagcattgttttccttttcaatttgtagaagttacatatttaataggaatgtttaacttttacttttaatatgtgtcacaagtatatttatccaagcttgccatttttcttttgcctttgtttacagtggcattcactactcaatttaaacatgcggtatgcacatatggctctttcttcttattgcctttaggtttcagtcttgtttagaaaagtatctcccattgccaatattacaaagagggtcgcctaaatagttattagtgtatttttgctttttaattcaaatataattcatctggaattcatttttaaatattatgaaaacagactctagaaatgttttctttcagatggaagctgatatcgttggatgaataaaaaaagattctatagtaaaaaaactttgttattaataatgatgggtgaactaaatgaggaatagattaaaatagaatgtttcagcacctataggcaaataaaatataattcgattgaaagaaaataaaatctggagacatggcaatggagactcccagtgggaagacgtaatgcccagcagtgcccattctttcctacctattgtactaggggaactggaaaaaaaaatggtaaaatttacaaaaaataaaaagtcttgagaatatataagaaaactataagataagtaaaatagtaaggaagaccttccttccgtgtaatgataacatactgtgaaatcaaggttggtattgatgccaaaacaatcatcagttaactgttaccctgtcaataaacataaacagaggaaaattctgaaggagagaagttttggaataaattaaatttgaacaaaaactgggcttcatcttgtaccaggcaatgaagaaaaccctcctttaactgtgtagaacatgaagcaccccccagcccactacagcacctctattaaatagtaatgaaggatgacttatttccttcagaagacaaaacttaaggaaaaagagaattcctcctgggattgtgcgatttaccatgttgtatgtgatagaatgcatagcttgaggttttatgttactcacgttttataggtagatatttttggcaccaaaccttgtatatctgagagataaaatgcacataggtttggggaccaatagcaggagggagagctgtggaagcagctgcccagcgccctctgggggatgagcgcaaatcgaggaaaaccttgaaggagtgaagttttagaatgaagtaaatttgaacaaaaattctgggcttcatctgggactaggcaatggagaaaatcctactttaattatatagagcaccaaasacacccacacacaacccacgcacaaaagtacctctatattatttcagtgtaaagtgtgaaactagctcatgaacaggacatgtgacaagaaagtgaacttgtcttgcaggagttttaattaaagaggttgttggcttgatcctggccaaggccgttcgcatgcaaacagaaaaggcgtggagtctgggatcttcctctgccaaccccatgagcgtattcatttctctcctcctgtaatgtcacacaggactttgttaccaacagggatggagcgtaggagaaagaaggaaaggataggatgagaaaaaaaaaatagccaaaatctgctaaaactcactcaaaaagaagagactgggactgtccttgttatggaatactgacccaaacagatacatatccattcaaaaatatccattcaacatagattagctaaatgcccccaggtcctttttcaagatgttggggaaagctatacatacaaatgataaaaactctgttctcatgacacattctaattgggrgaagatgagacaatagacaaacgtgaaaaaaaaaataacatgacagagtgtcacacttctgtaagaagaaaagtaaagcaggaaacgctatacagagctggagagaggagatgtaaaagtgtcatttgagctgagaactgaaggatgcagatacttgggttaagagaactctaggtacaaagtgcaagaaaaccagtgtacagtacaagaaaaagcaagccagccctgagattggagaggtggacgtgggtggaccacaaatagcttgggaagtgtgttaaaggcgctgacttttgctctgggttgatttgagaagaattatgagtaaaagaatgacatggtctgactttcatccaatctggcactggttacagtgccgagatgagacaggtggagacaaggacagggcctcaagggcagtttagaggccactgcaaatccagacgagaggtgatggtggcttggacctgggcattagtgatggaagtggtaggaggtattcagtatgtgagccacacacattgaaatatctaaatacaccaactaatctgatgtggagaatgagagagagccagaggcagctcataggaccccaaggtttgggggatgttgggcagatgtgtaccaggtcaacctttgaaagtaaaggaagttgagaagctcaaataccattcgagagaaagctccagatgttttctagcttttgaaacaataaacagtattttgctgaaatgtcccagtttgtaagtagccaggaactcttgtgtgaccctctccacagcaccttccttgcacattgcagtctttaattagttattgacttaattaatgagtttatgcatttgttgttattgtccccaaccaaaacataaatcttgatgagagcaggggacttgtctgtcttgtcctcaataaaatgtttgatgaacaaatgaccaaataaataaaacgtcaccaggtgggtaggattttctatatttgggaaacattcatccaaaagaaaggatataaaattatggaagaaaaatatccaaagctcttatgtaaagagctggccccgttagcctcttagactaacatcatgaaccttatttcatagcaggaagaaagattatgtctaaggaagaacggagcctcaagggcagcttcaaaggacagagtccagagcctgcttttaaatgctatctgttcatgcttctctaagccaattatttgacatattggtatatcattctaaattggtttgccttcccttccccttttaatctgttttctttgtccttcaaggcaaagtggtttacaaagggatagtggttttgttcattagctaattataattattcccttataatgaccacgttgcaacaggtacccaaacacctgatcacaccccagtgcaagttctttgaaataaagtaggaataaatttaaaaacaatagagttactattaaagaatgagtcaatactagcttcgcttttcttaaaattaaatagcacattccttattggccattgctaattttggagcatttattttaatacttatatactgtattaatattttaatgagtcattacctgtaaacctttgttgtgttaatgtttaagccttcaaactattttggagcatttaaatctattttttccaaatatacatgaaatgatattagttcctggctttatttttaaaaacatagcatgaaccttcaaggaacaaccatcctgttattttcttttatctcacatatcttcttgtcggagagagaaattcccctctaatgttcaaaacttaggagtgtttgacatctcctaagctctgatgtctctacattacaagtgacttaatttgtaaatataatcatctcttagyagccaaaggagatttgttaccagaccccccacctcacagatacccaaatctgtgttgctgaagtctctgatataaaatggtgtaatttttgcatacagcctgtgcacatcctcttggatacattaaatcacctctaggctgcttataatatcgaatacaatgtaaatgccatgtaaatagttggcatactctattgtttagggaattatgacaagaaaaagtctgtacatattaagtacasactcaacatacatcttttaagaaatatttttgatctgcagttggttgaatccacagatgtggaacccatggatatggagggctgactatagtagcaaattatatagacatatgagaaattttatatggtgatgctagtttaatataatcctttcttaggattatattaaattataggattatattaaatatatactgaggaatttatttattttctgtctcttccagtcttccatagtgggtaagctgtctatcatagttcctcttgcaggtacaaaataattttttaatgttcatttctcaaatggataactagacacacaaaatgataacagccttgccaatggatactttttgatgatacccaaatgcccgatccaaaaactccccccccccaccagttagctctggggtatcagaacccaaggcaatacgaaactccaggtccacacgaataagtatctccaccgtttcctcactaacaatacagttgttatttacaatggagtgatccaattacttgagtgattagtttgtcaaaggagttgtcttctagtgagttgagaaaatgtgaacaataacgaaatacctaaaatgacaacaaaatttctaaaaattaagagtgtaattccctcatctgaggcaagtgagtgggtggctgagctgggagctctggagtcaggctgtgcagttccctggagatccccggggaggtcacctcacacctttttcctcacatcttcatctttaaggtgggagttaaacccgttaagtgaatgaataaatatacagcgctggaaacagtgcctggcactcagtaaaagctgcatctaccccacctgtgttgttgctgttgctactattgttattgtaattattttagtattgttattaactagtactcatggaattagatgccacagacaatgtaatctcaaggttggggcctatactgaatcagtaaattagagtagtcgttgttttaaaaaatttagtcctcatttcacttcaaacaggaattaagaagggctacatataaatgatacagccaagttaaacatatttctacaagtaagaaagggagtccaggaaaactagtgaatgaggaagtacagctccatgagccactttttgagctcctgtaagaacccaaaagatttgtctcaggttgcaggtatccagggagcaaaatccagaaatttctatttatcttggtcttttttttagctgtctgaagggcaaggaaacaatattaggcttttacttgctccytctttgctctgccagctgctatttctggcttatgcctgaaggcaggagaaggaatggcagcagggccagggtgaggccagggctgcggtttgggctggattcaaagcaaacgttctagccagtgcaggcagaagctgcacagagacctctttgagaagttgggcacctcaggctgcgcccagctgggtccagaggccccctctccagggagcagaaggttgagctgcagtgagatgcttctaggctcctgctgcttacagggtttaaccctgccatccacgatgcttcccttcaggagcagtagaataggcagggtaaagaatgcagtagtggccaggcgcagtggctcacgcctgtaatcccagaactttgggaggccaaggtgggtggatcacttaagcccaggagtgcaagatgagcctgagcaacatgacaaaaacccatctgtataaaaaaactttaaaacttagcagggcatggtagcctgtacctatagtcccagctactcgggaggctgaggtgggaggattacttgagcctgggatgttgaggctgcagtgagccatgattgcatgattgcaccactgtactccagcctgggtgacagactgagaccctgcctcaaaaacaaacaaaaagcagtagtagcgtagagctggaatagacattcattcattcgttctcacccactcaccccttgataattcatagaacacctgtgtaccttgccctgtgcttgggggtggaaaaatccttgcaatgtcttactggcaaattctactgaaggagctttcctctccagtgggcaatccagcccccagccaggccctggaacatgcccagcacaacgtatacatagatcaaacactacatagaacacataaatgtacataattattagtggtcaactgaaatacaagatacgcatggtgtggtggagtgcatgagagaggccaccttttgcagcttgggctggactgggagctaaaaagctttcgtcttttagtgcctcctgtgctgagtcctacagtcacttccgtagtggccaaacgttagagaaagggaaaggtgggagtgggagcaaggaggagggcaaagcctcgaggccagactcgtgggtaacctcacctcagaagcaaggtggctgcagggtaggggtgagcctaaatatggacttctagagaaagcctgagtcccaccatcaaggacatcctatactattttaagaagttcactactgtacttgaccttgtagttcttaaagtatggctcatgggctaccagtaacataatccccttggaggttaattgcaatgcacatttttgtactatatctcaaacagatcagaattttctgtggggggttctggaattttgtattctaaacacacatccttggtcttcattatacatagggtagttggaggccctgacctgaaggcagtggagaattgctggagaattcgaggcagagggctgctaggtgtgggtgctgggggtgtgagttgtttccagtggacacacgataggattgtgcttcccagccccgttgcgctcaggtgacttgatttccagtgaaacgtgagcagcagtgatgtgtgacacctcccgaaagagccactgcatcgtctcccctctgacagtgattgtggacacctgcattgagatgaagcccatgtcagcctgggtctcccaggtgccttcattaagcagagctctccccaccctctgttggaatccatggtggacttcagagttgaaggagacgtggacattttttgtgtgaagatgctgagatctgggagctgctcattgccacagcattgccccacatgtcctgactgaggcaggtggtcttgcgctcatttgctgcattttggtgacttctgacagatggatttgtgtagggacagccaaggggcaggtagatttgtgcagggacagcccccggggacagatggatttgtacagggacagcccaggagcagctggatttgtgcagggatagcccggggcagatggatttgtacagggacagcccaaggacagatagatttgagtagggacagcccaggggcagtacgagtttttttgtgagaatccagagttgattgagaaatagagtaggagaagcaggaatgaaaaggggaggacacagatttaagggatattttgtgaacaaaactgagagcttactgactgttgatgagtggtgtgggaaaaggataggtcaaggaggaatgtcctgttgctagtttcagtgattgggtagtgggaggagacaccaaatgcatagagagaatggaggcaggataattttagggaaggaagatggggaattccttttgtccatattctagaatgtgcgtgaggccaccaggtagatagcaggcagctggctgtgattgatcatctgaattatggaaggaagggggtctgggctggagacacagatttggaggacattacactgtgggggattgtatcaaccatgggagccaacacagtcacttagatgagatcttgtgagagtaaaggcacgatcctagagggtttcaaggtgtgtggagctagaggagcagaagagtcgcaaggaatcatcagtgaaagaagatctcaaagtgcagtatggaaagaggtcgccaaataggaggaaggaattagaaatgtcaaaagtctccaagaaacacaggaacaatgtatataaaggcttaaaaatgctcctgggatttggcaattggaaaggttgtcattgacttcatcgtgcatataaaggaatcccggtgggcagtgagttaaagggtggaaagggaggaaggagcatagaccacattatcagcaggtgggcaacacaaggagcacccaggcagtttgttgaaagcaggttcctgtgctgggtcctgggatgctgactcactgggttctatgtgggatggacttcagggttctgcaaagcttccctgaggaaatatggtgcacacctgaaactggaactgacttctctttcaagaaacttgatagagataaagagggaaggcatggagtggaatctggagaaatgcaagcatccccctcagtggccaaatcaatgggagagagggaagggatggagctgtagtgaggctccagaggaagtttctgggaagggtgttgggtcaaggtggagaggttgtccttgaacaggagggcacagtggactggagaaactggtatggacatggctacaaatgtaattggagccattggcaaaaccttgaggaactaaaggatggcctcagtcttctagaagtagaaagcacaactgtctcaaggcacaaaggcaagggctgagacaggggagactggagagggtctgagatggtctcagagggagacgaaagtgagaggaaggctgtacttagtgacttgctggtggtgctgaaagcatgctgagattggagaccatgaggctggagtggctcagtctcaacatccatggggaatcctctggaattgtgctttgagcagaagaatggataagataatggcatccatcagtgattcatgactggctgggcacagtgcaggtggtcaccaggggtctggtgggtaaattcagaccatctgtggtgagttcccattaaataggctgatagattagcagaaaatggcagggtctggggagctaggtcactgtgaagtttagagtgaagccaggccataggaggctggaaaggcagaatggatgataaggaattggagatttctgagaataggttcatgtaatcagaaagttcagaattatggccttggcaattgggatgaaggtcactggtgttacaaattttcaagaatttttgggtggattatgttcatgaattttgaaatcctttaaaatctcttggaagctggtaccatagaggcctctagaccagtctcaaagccttcagtggatgatgttggaattggaattcaggatgactgactcagtcccgtctttcccagggtgaaggacggagccacgtggtcaaagcctttgcccaagactcaaggccagagttccctcattgtccctcaccacctgatccaggtttttcttttgacagtagtttttgaggccaatttaatattaagttattaatagctcaattttaaacaaatatcgtgatgaattaaaaagaaaaaaaaactgtggaggaaattcaggaacagccaactccatcacacttgcatatacctcaggcctctgtacagggcaaaagtcagttaaagggacatttgaaatatctggcactaagatttaggtaggacggtaacttttgtacagactctagaagttcacctattccaaactctcaccttcaagccatgttcatattgaaactgcatggaactaagccccaagaggcaagctcagtttgccttaaagagaataagaaacttcttaaacaatatggccttctgctaaaggaaaatcactcatttaatgaatgagacaacccacaccattatccaacacagaaacctcaggtctgtcatcatgttccttccagacccttcattcttctcttcactctgttccaagcaccccattctctccttcccatccttccttaggtgtcatgccttcctgcatttccctcctgctccctcagcagtgatgcatgctgtgtgcatcagagtattcattccctagggctgctgtaatacattactacaaacttggtgacttacaacgtgacatttgctctgtcatagttccaaaacccagaagtccaaaatcagggtgtcagcagggccatgttccctctggaggctctacgggaggatcttcccttctctcttccagcttctggtgatgctgggtggtctgtgacttgtggctgcatcactgcaacctctgtctgtatcttcacatggccttctgcactgtgttttctcttcttagaaggacatttgtcattggattttgggtccactctaacctatgatgatcttatctcaaaatcataaacttagttacatttgcaaaggtacaattttttccaagtaaggtcacwttcacaggttccaagtggacataatttttggtggaagaagggagtcaccattcaaaccactacaatcaaagaatggcaattgagtaaaatctgcttcgatttcctcctttggtgatacataactctcttaaccatataatagctccctgagggaaagaatgtgtcttctatttctatggctctttcttgaatgttccaccaggtacactccaggatgtctttcccatttcagctggatttgcctcttctcagcttgcagaccttcatgcacagggcagcctcactcttacctttcaacattttgcccaagttctacctacaagaagtctcctctagttggttccacacaatgctccattcacccttaaattctcttgccaagagaaattccctcttaaatttctcttggcattattgccttcataaaacagctaacttttctcaggttggtctgaattccttctctgactagtttgccagtttatttaaggtatgccacatacatagcttttgtaggtggtctcaatttattcatttgcttcacaccaaactcactgagcaaactccatgttaacagaagcgtatcctacagcataggcaaggctgtgtttactgactcaattgggctgttccaaatatatgagtcagccttatatttggctccaataaacagaaaaccagactacagaggattaaacaaatgggaatttatttgcttcacataaaaggaagtccagacatgggggctgctggctttggtctggccaattaataaaatcaggactcatgtctggaggagcccattggctttgctgtcaccctcttaaggaggctgctgcagatccagccatttcatctacattcaaggcaagcagaataagtagcaaagtagaagtgtcccacgaacagtatctgctcctttttattaggacattaaaagctrcttaccacagaggccgttccttcctgaggctgacttcattcacatcttgttccatcaccctttccagtcacaggagagcctgggaaagccaatgtgtggatgttcagcgtctgtagtgggaggtagccaggtagaaggggtgggaaaggtcttgaagagctgatcagcagtgtttcccgactgtgttgccagagcccctacagggcttctgccacccaggttgtgctggtgttcacatgtcctcactgccccacctcttactggcatctcctcsaatgccagaattgttaagaacagctgttgatgtagtaagcaataattaactcccaggttgataaatcacgtggctgcagaatttttttcccttgaaatatataggtgaatgctgcttagaatgtggtggtgtaaccacctccttggacggagagtgcccatgcagccattttgaagctactgttgagcctgaggaagggtgttctttagacgggaaactcaccatatgtaggagcatacccacagatgttctaataactggtgttactggagtgtgtagaagaagacaccgtcgttagggccagtgaaggttccagtatggcatctgctttcaagcaggagaaaattctggggtaatgctctctttctttttttttttttttttttttttcttttgtttttttttttttattatactctaagttttagggtacatgtgcacattgtgcaggttagttacatatgtatacatgtgccatgctggtgcgctgcacccactaatgtgtcatctagcattaggtatatctcccaatgctatccctcccccctcccccgaccccaccacagtccccagagtgtgatatttcccttcctgtgtccatgtgatctcattgttcaattcccacctatgagtgagaatatgcggtgtttggttttttgttcttgcgatagtttactgagaatgatggtttccaatttcatccatgtccctacaaaggatatgaactcatcattttttatggctgcatagtattccatggtgtatatgtgccacattttcttaatccagtctatcattgttggacatttgggttggttccaagtctttgctattgtgaatagtgccgcaataaacataggtgtgcatgtgtctttatagcagcatgatttatactcatttgggtatatacccagtaatgggatggctgggtcaaatggtatttctagttctagatccctgaggaatcgccacactgacttccacaatggttgaactagtttacagtcccaccaacagtgtaaaagtgttcctatttctccgcatcctctccagcacctgttgtttcctgactttttaatgattgccattctaactggtgtgagatgatatctcatagtggttttgatttgcatttctctgatggccagtgatgatgagcatttcttcatgtgttttttggctgcataaatgtcttcttttgagaagtgtctgttcatgtccttcgcccactttttgatggggttgtttgtttttttcttgtaaatttgtttgagttcattgtagattctggatattagccctttgtcagacgagtaggttgcgaaaattttctcccatgttgtaggttgcctgttcactctgatggtagtttcttttgctgtgcagaagctctttagtttaattagatcccatttgtcaattttggcttttgttgccattgcttttggtgttttggacatgaagtccttgcccacgcctatgtcctgaatggtaatgcctaggttttcttctagggtttttatggttttaggtttaacgtttaaatctttaatccatcttgaattgatttttgtataaggtgtaaggaagggatccagtttcagctttctacatatggctagccagttttcccagcaccatttattaaatagggaatcctttccccattgcttgtttttctcaggtttgtcaaagatcagatagttgtagatatgcggcattatttctgagggctctgttgtgttccattgatctatatctctgttttggtaccagtaccatgctgttttggttactgtagccttgtagtatagtttgaagtcaggtagtgtgatgcctccagctttgttcttttggcttaggattgacttggcgatgcgggctcttttttggttccatatgaactttaaagtagttttttccaattctgtgaagaaagtcattggtagcttgatggggatggcattgaatctgtaaattaccttgggcagtatggccattttcacgatattgattcttcctacccatgagcatggaatgttcttccatttgtttgtatcctcttttatttccttgagcagtggtttgtagttctccttgaagaggtccttcacatcccttgtaagttggattcctaggtattttattctctttgaagcaattgtgaatgggagttcacccatgatttggctctctgtttgtctgttgttggtgtataagaatgcttgtgatttttgtacattgattttgtatcctgagactttgctgaagttgcttatcagcttaaggagattttgggctgagacgatggggttttctagataaacaatcatgtcgtctgcaaacagggacaatttgacttcctcttttcctaattgaataccctttatttccttctcctgcctgattgccctggccagaacttccaacactatgttgaataggagcggtgagagagggcatccctgtcttgtgccrgttttcaaagggaatgcttccagtttttgcccattcagtatgatattggctgtgggtttgtcatagatagctcttattattttgaaatacgtcccatcaatacctaatttattgagagtttttagcatgaagggttgttgaattttgtcaaaggctttttctgcatctattgagataatcatgtggtttttgtctttggctctgtttatatgctggattacatttattgatttgcgtatatggtaatgctctctttcttgatctgggtgttgtttacgtggatttattcacttaaagatttatcaagccagacacttaagatatatgtacttttctgttcatatgttttacttcgataaaaatgtacttcaaaaattggattggaaattagaaaaataaatgtggcccaggtttggatatggaaaaattttttttaaagggagagaaaattctgactgagtgacagtgttcctgtttgggcttatgtccaatggtgatgtggaggtaaaaatgaaggggaagcctggaaaaacacaactaattatgtggatattttatctgcattaactattaatgcaaaatttaatttatgcaaacattatggaagagattattttacatttaaatctaaatttggtccatgatcatttaaatgcaacatttattattactgaaggctctacccgggcacattcttgcaggctctgaagtgtgatcccctcattaatccaaactttatcagatttgctaaaccaaatgctatcatactcagcaaacaaaggaacaagagaatgatatgtcacatcagaacactcatttaactagttctcacttgatgcttgttatttttcgtttatcaccgaagctatggaatatttgctatttgctttcggaatgaaaggtatacatacattatatgtataaatgctataattccaaaagagtgttttttttaaatattcctttagaagttacaggaaaatctatcctcccaagagtataatctttgatgtcatgttatgtccatactgtcttccatcccattcccacccctgttcttagttcacctgttgctgcgggtcttctgaaattccacctgccctgcacatgcagggcacctgagcttgggcctcagctgtctttctgtgagccctttgatcctgttctgccttcgcttccctccctttttgtcccacaccacctcagcttcatctgagtttactttctggttctcttaactgagttgctcatctctctttcctattcagtacagcagccctcctgatgtagtggaaggatgactttcttttggtttaaaaaattacaccaggtctcacatttttagcattcctgtggaggaagctcatgctcattagcatcagccattattcattcattatcacattctcagttcttccctccacctgaactgtttctttgttctggatctggaagaattcacgtttagtcatctgcttcttatctgacatcagtttctctgttggtagtgcacaacatattcacttggggagatttatgttttaaaaagtaataacccactgacactccggagtgggctccaggcccgtgtgcatcttttgcaagtgccaagtgattccactgcacagcctgctgcacccctgaggacccatgagctctcacgagtaaagcaccttggtggagctttatttcgcctttccaattgctaacaacaaatcagaatacgtatttgcatgacacttacaatcaatgacatgatttaaaatattacaagtctttgtttccctaaccagagcatagtttataaatgaaatttgcatttatatatgatggtgatgtttttatttgattcattatagttgtaagcattggtgaactttgtgtgcagaattggctgtaacttgtatattaccaaatgagaaagatacataarctaagaaggccatatttgaatctgtggctagtggagtcataaataaattggtattaaatttggtgaatgatgtaatcacaccaaagatgtgtctcctggggagacctgtcaacacaggtagcatccatcctcttgggagaggtcactcttctgaaggagtggccttcagccttgagagctctgaagtatgatcctaggagtaatccatcctttatcagacttgggatgctgattagttttaactacttagcaggcaaaaaagaattaattaattacaggcacaaaagaatgctaattaattaaactcagaatgctaatttgttaatttatcatgaggaatatgactatccgatagaccagacagtttatgaaactacctcttaaattgtctctatagtaagaaaccaccttatccaaagatcacctgtgagcagggaaataacacagttggagggctgatttaaatgcttaaaacaggctgggtgtggtggctcacacctgtaatcccagcactttgggaggccaaggcgggcagattgcttgagctcaagagatcagcctgggaaacacagggaaactttgtctctactaaaaatacaaaagttagccgggcgtggtggtgcatgtctgtaatcctagctacttgggagattgaggcatgagaattgcttgaacccaggaggaggaggttgcagtgagctgagatcacaccactcccctccagcctgggcaacacagcgagactctgtctcaaaaaaataaaaattaaagataaatgcttaaagcagtatttctagatctttttctattagactccctcctaaggaaactctttagatatttttattcctacctggcccctcatgaaaatctaatgccacaggtatattgcgtatctgtttatgtgatgtgtgcatttttgccctccccaagaactattgtttccctcttggggtgctatgacctctgttgagaatgcatagtttaagacatcaaactctgaaagcctaaagtatgcatttctgctagaggggtgagccagccatatgggccaggtactgaagtctgctgacaggataccttctcctctagacagtgccatttttccccccaagagacaggcctttctccatgtttccataattgaaatcttcaccacccacttccccttttttatgcacatattctttctttagatgttttagtttacccaacagatcagactcaaatctggccagtctgggaaggtttcattccctttcaggtgacaaaacatagcttcatggttccagtttaactctgataagataagttcaggtccaaattcttcatgtctcttctgagtataatttgcatggatttactgaagggatggcaggtatatatcaaggcataaccctgatattcagggataatatcttatgaagcaactacaaagttttctcactaaataggagaggcggaaaagtagattgaattgatttagggcaaaaactcacattttaatataagcccataagggcagggctttgacctttttaaaaagttttcttaaaattacagtctctacactttgagcagtttggggcacataagaggctgtcaataatatttgttgaatgaaagaatgtatttttgttcaatacatgaattaggatatttccaattcttatgtactgaatcataggtgtatgtgggattttatttatccatttaataaatacttatcagtacatgtcccaataagttctatatggattacccaatctatatataggggaatataaaacaggtgggatcttgaccctcaaggaacatagagcagaacatgaaagacagacaataagcagatggagaaatgcaaaacatttacttttggcaaatgatgttggggaagtatcagggagtattactctactgatgttggagaagtatcagggagtattactccagtgatattggagacatatgaggaagccgtcctggagaatagcaggaaggcattaagagagtgtgcccagggagcccctgacatacaagccaggaatgagcagaaggagttccacacagggagagagccaggcatgagattgccaggcagagaaaagtatgtgtgcaagggcttgagcctggccaagttggagcaacccagaggagggcttcatgcctagagtggagctgagacagggcatgaatggaatgtggagatgcagacaggggtgggttgtataaagaatttagggtaggatactttcataagaaacatattaaattggagaggcctacttttctgtgtctagtcctcagaagaaagatgtaggctagaggtatatctttgggcattggtgttatttcgatggtgttgaagaagttaggtatatggatgatgctgcaagggagaacttgggggaatttaaagagaagtagacctgggcagtgccctggagattgccaacatttgaattaaggcaatggattcagtgagatgggctgactccagggtgcatgatgccagggcagctgaggcaggctgggattctccataggagaaagggcccagctgctgctgagagagccactcaggagtgaggtcaggagagagtaggaaggagacattgggtttggcaaacttgaaggtaactgatattcttgcctagagtagtttcggtggtgccttgggttgctacatgaaatggattcaggagagacagggatcaagaaatagaaagagcttaagtagacaagtcttagaggctcagctgtaaagggaaatgagaaatggagaagatggaaggatgtgtgtgttaaggaagggtgttgttagctaaggagtaggctcactggctgttgggaatgattcaaagagggagagatggatgccatagcattaagcagtcaggagtgagttagcacggtggcttagactccctgttgcctggagacaattgatagagtgatggtccaggcctgtgtggttttcttatgcattgaagtggagttaaaaagtgcttttcttgcaaattatggaatttggttgtcaaatttgatctaaataaaggaattttaaaatgcataatctaaaatcaaactgcttttcttcatttcrgttctactcccaagtgattctgatgccaggcatggttttttttctcatcagcatctttcactgcagtgattgctatagaaatccttgaggtgtgaaaactattccttgtagcaagcacagaatttaaatgtttctgttaggaaaacaacttttagggccacctgaccatgggaagctctgcattctgtatctctcctctttccagtataaagatgagttatgaggacactctctctcctttaaactgtaggtaaactcttttgctgcttttgtttaattttatatgtgacatagccttattaaatcataagaaatatattaaatgtttctcaagtagttaaataatgagaaaagtagttaaataatgagaagataaatatcattctgatttgttaaagttcattttatatatgataccaaaaaaacttcattagtttttacctagtgtgcccactctttattaaggtccttaaaaaattggtacctctggactaatagttttagtcttgattgttaaacatctaattgttttatgcttgattttttagtggcaggtttattatataatatatccactggaaaaaatggaaatgaatatttttaacattttatactcattcttcaaaattctagtaggcttggatggatttctattttatttctggcttgtaatacctcttcacaccatcaggaagcatgttaattcatcccagaaatgcatttagacttgggaacagtggagagtttattttgaccatgacagttccaaatgagggttgggggtttatctcttactttctttataagctgaaaaagtgtgtgtgaagcccaccatatggaaaacactgtcatgcttcctaagagaagtgtgcccagtaagcataagtgtgtaattttttataaatcacaacggttttgttaggcaagtaatccaaagctcatctaggcacaacaatgagatgattctagaagttggacctagactcaaattaatgtggcagaaattttttcttgtactatccagtgcctgatgacatggtaaaagtctcagagtaataaggggtgcatgagacatcttattccagaaaagaaaattcaactgaaaagagttgttggcaatacacagagctcttaatcgaacgttttctttttccctaaaacataatagtttccattttttttattcttagaactgattctgaatttctcacagttggataccagcaagaaaaaaaaggacctagatcctataaaaagraatcatttcccatttagaagtcacctaattaggtatttagaacatcatgcactataaataggaaacctcatgttatttcctcaagaaagacaagtctttttgcacttcaatgaaatgacaaaatagtcaaatatgtggctttttggcttttatgcaatgcagatacagggtgtctttgtttgggcttcccagaagcaggccctgagatagggataaattgaggcggggcctagcacaaaccctgaaccatggtgaggtgggcaggatagggaaggaggaagctgagcaaatgagagtgatggtttggggtgaggccttgccacagtctgatctcatggggagcactggagtttattctaccctgaagcaggaatgctgctgtatttgtcagtcattgactatatgagggaatggctgatgacaggagtcgttggctgctccgggagggggtagggaagatgggagtgaagggtgagaaggagagtggttaaaactaagagatagctccagtcacccaagggcaactgctggataagactgcacacgaggccgggcttggtggctcacgcctgtaatcccagcactttgggaggccgaggctggcggatcacaaggtcaggagatcgagaccatcatggctaacacggtgaaaccccgtctctactgaaaatacaaagaattagccaggtgtggtggcgggcgcctgtagccccagctacttgggaggctgaggtaggagaatggcgtgaacccgggaggcggagcttgcagtgagctgagattgcaccactgcactccagtcctccagccctccagcctgggcgacagagtgagactctgactcaaaaaaawatatatatacctaatgtaaatgatgagttaatgggtgcagcacaccaacatggcacatgtatacatatgtaacaaacctgcacrttgtacacatgtaccctaaaacttaaagtataataaaaaaaaaaaaagattgcacacaagagctgttaactcataagctgagctctgagacaggcacactggagaagccctaggaatcccaggaaaccagagatggagaaggcacaaatagctcaactacagaaatgcaggctgatatggtgtgtcctatcaccggagcttctagtataggggcagttatcacctaatgaatgacacctcatgaaaggaagatattctgacaccagctggtggcactaaccatcccgcattaggggagaccccaaaagttaagggctcagaattccaccaggctgtccctcagatgccagccatgattggcggtggggggtggggtccccaggtcacctgcatttctaaccaactgactacaaattccaatttccatgacctcccctggcacatcagtgtgttcatcaaccactgagctttggtgtgcaaagtttttcttggcgtttcatctcataggcgtgactgactgaatcatcatctatgtgattgaactcactttccagctcccttccccagaggttaggtttatgctatgtggctcaaagccttgcttctctaatcacacaattgttcgtgcagatgaccagccatcctgagcctcatcttatcttgtaggataaactcaggtataatccaagaggctcaccaataacaaaaccattcctattactcaggatagcccaaggatttaatcttcttccaagaaataaaagacaaaaaccagtcatattatttactrtacaaaagaatatgcctctttgaagagcaggctttacgttaaagttatgtgtagacagaagagaactcaaggaggtaacccagagagcactgggaggacaggctttgaagaattaatataactctaaatttgaccagtttgagcaatcaataatgcatctttaatttacttaatgttatccatagtcatcaaacctaattctaagttgacacaagatgagcttcatgcatctcatgagtgtcaacagagaccccagatcacaatgaacagaaaacaaaattgtttgagtaaatttgtgaaagggggttatgttgaaatatctcacatcccatttttttaaagtttggtcagccctcctacgactaagaacctccatctctctatcccctctgagtggcccatctctgcctctgtgtacatctgccctgtccttcctttccccaaaaccagcttcttggttcacctttctgtctgtataaaatttcattacagaattcccaaaatggtagcttcaactgccagtttacatggtcttcatcttggtgccctcaacctctaagactcaaacctaattcctggagacagaatcttatcagcccaaaagtccacctttggttttgttagctgtgattttgcacaaggttgaggtattgaacttggggtgggtggtccctgtttgctgctccagacccatagtcactcttctcaccctgctgtcctgtggaagtgaatgtgaagcactgtgtcaccagctcctttgccctctggcttcaggttgggtcaggcaagtgggaggcatggccaggggactgcagggcaagaggagaatgaggtcagggattgaggctgtaacagcccctgtgccaggacacaggtttgcagtgactgcttccaccatctcctgttgggtagctgattccccagcagtaacacctttctccaggttctagcaacatgtccctccttgtattagtctgttctcttgcattgctgtaaggaactacctgagactgggtaacttatgaagaaaacaggtttaattgactcgccattctgcaggctctacaggaagcatggccgaggaggcctcaggaaacttgcaatcatggcagaaggcaaagggggagcaggcacatcttcacatagtggagcaggagagagagagagaatggggaggtgctacacacttgtaaacagccagatctcatgagaactcactatcacaagaacagcaagggggaaatctgcccccatggtccaatcatctcccaccagccccctccttcaacactggggactacaattcaacatgagatttgtgtggggacacaaatccagaccatatcactccccttgcctcctcagatccatatgtggtaaggaaacttctgttgctatctctggggcacttctgaattccttgctggttttccggccaataatttttaactgtcacttcatgtgacttayagctctttcttgcaagccatctttttcaagtgagaacttgaccaaatctggactcatggggtatgttagatggctgcttcttgtctcagaagaagaaaaatgagcacagaaaggaagtatctgctactgtctcaaaatttttggaagagaatatagatagcaagttcatcatagttttaataactattttatttaattaatttgtatatttatttacttcatcaaaactttagttctttggtgacgtggtttccagactgtgttccaaggcacccaggggcactccaggatattataaaatttcaagggaaatacaaagatgctcagcaaactactcttgagatagttcatagtttcaacattagatcatgcagcattcctttgttgacatcatgtctttgcaaagctgggtttttgttgttgctgtgagcaaaaaccagtacgatgcagatattaagatgcaatgggatatgtaggtggcagtattgaatcagaatccatgatctgtaaagttatgcaacactcaacagacacattggccactgatcatcattagtatttcaccatgattatttaagaatgaaataaaaatattatattttattttcatatatggtggtgctagtggtttttgcatcaagtactaagttgtttgggcataatacttaagttgctatgacctcactaagtaataaacaaaactcctgggaatttcgtttagtctagtaacatgataaaaaaattaatgagtattatgaaccaggaaaactcaggaacctctgcattagtggttttatttttgcaattagttttataataatgtcagaagaagtataataatgtcagaaggagtataataatgtcagaagaagtttatcaccagtcttccttcaatcacaagcatttgtatgttctcatatagaaaactaatgatgatcccaatggcagaaacttcatagccatcactctgagaacctagtggctgcaattaaaatctcacttctccagctcatgagaagcctgccttgtatcatttaaattgtttgtttgctttgttgagttctattgttggcttgttttattgcatttattctaatgacattaattactttagggggagagtacaaaatttaattgattaaaaataaatgctcagcaaatgttttgtggaatgactaaagggtatttaatgaatatcccatcttggtgcacattaaaccatcatgggtagtacatggaatttctgcaagagttaccagccccaaatgtctaaggcttgcccattttgacattccagtagattctctggtgatgtgtaaataaaatgtctttaaaacttaatgtcatattgtgatggactgaattgtgttccctcaaaattcctatgttgaaggctaaccacctcagaatgtgactgtatttaaacaaagggcctttgaagaggtggctaaggtaaaatgagatctttagggtgggccctaatgcaatctgactggtgtctctataagaagaggagattaggacacacagagacaccagggttgtgtgctcacagagaagagaccctgtgaggtcactgaatttttgtcccctctgaaactcatgttgaagtttaattgccattgtaacactattaggaagtagaacttttacaaagtgattaggtcatgagggctgtgacctcatgggtgtgattaacaccgttataaaagggagttaatccctttttttcccrttgatcttttgtgttctgccatgggagacaaagcattcctcccctgcagaggctgccgtgttcaaggctccttcctggaatgagaactgccaaccctgccatcaccttgatattggactttacagcttccagaactgtgagctgataaatttctrttttgtgtaagttacccagtctgtggtctactgcagcataaaataggccaagtcacagcaagaaggcagccgtctgcaagccaaggagagaggcctcaatcaaacctaactacaacttggccttggactgtagccttcagaaatgtgaggaaataaatgyctgctatttaagccacccagtctgtggtattttattattattaktagtagtagtagtagtcataatcatagcatactaatgcacatatttagcaaagcccactccttttgattgtggtctttgaatgctattgactgggaaaagcagctgcagtcttgtccacttgggaaaacatgagatgtcacttggtgtttggggcaaaaataatacatgttctctgacaraaatttacaagaagtcagagtatggtgccaatgagtttaaaaatttgtcttttcattcttacagaacatggttttgaggaaaacatacaccaggagaggaaggaaggtggttggggtaaacccaagagtacactgtggggagagtgcttttgagtacctttcagcrtttgattctatcaagggaagcagtggccaggcatgctctttcctaatgaatatgattaatgaaacaaccaaagtttcgtttgtaatagaaaagtttttgttctccccttcccaaatggtttcagtgatgcatccttttataattacattatgactttatgcggaatattttggtcacaccaaaaaggacattccaattcaaagtaggccttgtgaatcacagcactcagtatttttctcctttatttggagtccatgactgtttcacaggattttgcaagctgtcatttccttacggatgtgcttactaatatcatgtttaaatccccaggtgagattggccgtggcatccctgagttgttatttctatacctctgtgcaatcttgtctctccattgtcttcttacgtttgatgtcaatgtttaggcccatatcctttcatcaggtgttttctgattcagtcataatcagcggggcactctgcactttttatgtgtaattccaaattgaccttctattgtgtagattataaatggggctataggtaggtcacaatgccagttgaaaatgtgatagcaatgcaaccttctccttgtacccacaaaacacattttctcccttcttgtgtgctatggtaatagaaggggaatactccacatgttcaccctaaaatggagtattattttctcctaaactaagctgcgtaagtcagactctctaatagccttggtcatgcttttaaataaaactaaatacctgtcagcttttaaatttttaaatgagtggttgtggaccacatgtgtcacctattaagtggtggtgaatgaagagaattagaaatggtgtttaaatgaagcaaaacttcattgattcagattaattagagagatgatctgtctaaattaatgaaaagtctgaattagagtgtgttaaaatttattttttaagcatttaagtccactgaaatcaccagaaccaggcaaagtgtatattggttggtgcagatcattaggagagctgatttaagactagtaaaattgttgttttaattggtgtataattttatgtttctaagtttttgaaaagcattgagatgcagcacttaaaaatgtgtcctcctgttgtgtcattactttgggagacagggtttgggaagacacagagaccagcatttttagtaagcctcttggaagatccaggactattcagtaatttgggtttctgaaatacgcaggtcaaacatctttggaataatgaacactcattcgactatctaaactcaaaaagaccaaagagataatgacttctataggtatcagtggcgatgtaaagtttaggtaatcattgacttgttgcctgaccaaatatcagatgcaattatccaaacatcagactgggtcacgagacagtgtttcggctgtctggacagagactaatgctcacaaacatgctttgtagtctataggtgctctcggaattgggcttgaagctgtgttgagacagaaggtagtagggagaagatctggtagtgttgctttgcagaaatggtctgcagaataggtcaaggatgaaaaggaaacatctgccctattttggatgcaagcgaagtggaatatgagttttggtggtagtgattctctctgctttaacttatcataaaggactaaaaaatctcctgtggagaaatataaagctctgtgtaactctttaaagatattccatcatagaaattgatgacagtgttctttttccttttccatttttatctttgtaacttcctcatacagctcacttgtttcatcttctcttttcccatagtggagagaagctaaaccctgaagctaagattgttctgtgtgcttgaagtcaaagagagaatgaacagaagagtaaacagggtgacagtaccctcctctgcagaaaatagggaagccaaaatcttcatggcttgtgttgttttcttctatggagccctgagtattggaaactccatgttattcccttttctctggktctaaactataatcaagtgaatcttctccccatcgatttcaagtttgcagtcactgagctgagaagtacaagtttggatttctgcatggttaattcagctttctcttcttggagggaaactgtgttctcaatgaattaatttgtaggaggaactttctataacgatctgaggatcttctaggcttatctcttcctgttggcttttaaagagttgctggagcagttctgagaagagcaaagagcactccaagctgccacactctagttattagccagacatgagccctatctaattataagaccctttagcccttcagtccaaatatatctggaaaaataacatgatgcctgctattcaaaaagacttaatagcaacagatgtggtataaaaagaataaagaaaataataatcatgaccaacagtactatctattttgtaatggaaacttccatgggaaatcaaattgcatttgactcccaatgtttggttccagtcttttagcccaaagccctaataacatccattgttgagattgttggtgtttcagtcttctttataccttcctgtctcactccactcctcctcatttggagggacttcaaattagaagatcctagcacatgacctaaagatcactggatgtcattaaccaaagcacagtgttcctgattgtcactaaatgactgataaagagcagaaaccctgaggccaccgcacatagcaaatttaattcttagagggctgtgaaaaatgctaaggagatgggattgggattctctgcagccatgtctgagagatcagttaaggaaaactgtacctgattattttctcccccaggcaagagcattgctttctgtaagccaaattggatgcttatgagatgtgagcttactgaatattcattcccagctctcttcatcatgtccttgtcttcccttttattttcctttgacttataattggtgtttttgcatatttatgatctgctttgttttaagctgatgacctgtatcaaatgctataacttttctcctttgacactgtgcagttagttcatagaaaaaaaaaaaaactgtcattaagtgatggcatttccctcattaccaggagcctggctttgccctcagcctgcagggtgctgcctggtgtctgcttgggccattttagtttgccaccccaacatgaggttaagaattagaatagtaaactctttaaaatgcataacatatcaaagccataacaagggatctgagtggtcacctaactcgtgataatttctcaaatgtttaaagacaatgacctgatacccttaaatgttttcttctcaggtgaaataatcctcagaggggtcacacttgtgcctcatgacctggatgagagcagcctgaccctcccctcactctcctctaaacacgcacagatgcatgagctgaaccagtaaagactccacaggcgtatggtctccaagaacttaacataactttaaatgatgaaagcactttacagcataaacacaaatgctttataaagaaaaaaattagtttcttaaaaaataacatgtgtctctttagaaattcctcaaaaacaccttccccatcccctagagggggttgtgtgtgtggtggagaaatctgactgtatgcgtatgaataagggctgtgtagaatatacagggacaatctggagagcctctcctggcctggggacagccctcaggtcacttaattgtttgtaccttttgttgcctcgtctataagatgaaataataaaacaagtccattctcctgattgcgctgctctctgtactcttaaatgtgaaaagatggaaggtatatttagaagggctatggtggtcattatgaaaggagcaaaataataataatttgctagtagataccacccttcccagaagtacaggattcattaatttgcatcctctgagaagcatgtgaagtgttgacaaatcaccccacgtttacatcaagagatgatggggtgcagcatggacagcaagcctctgtgaggatatgtgggcgtgtgggcacggttccacttacacagattccagaccccgcgcatactcaatttcaagacctggttttaatcttcagggtaaaccttgactgctattattaccttaaataatttattttcctcctaagacatctctggaggccaagttcctctcctgttttctgacagatgtgaaagtagctaaatgaagcaagaagataaaaggagacatcaagatggtatgatgttataaracaaactcaacattgtggaaataggattgtttgtcagaggttctgcttaacagtcttctggaaaataaaatgctttgatattatttttgaaaagaaaattgtaacctaatcacttccttgcagccctaggtcttgtataaagtcattccatgcatgcatcattttaaaataaaaattatttaggacatcaattgtatttgtaaatgtgtgtcattatcaaaatgccaaggtcaattcaattaaccttagaatacaaggatgaaaccgggtatcaggaacaggcttataatttgataagttttccatcagaaaagacatatcatattctatttgacattaaagccctacgttgtatattgcttaaaagttttcctttgaatatataaattaaaaatcagtaaaggcattctttcccattatctacagacaggaggggttcaaattacatttgttggaagcaatgcagcatccagaatgaatgactccaagaaggtttttccttacctgctgtggcagtgcaagtgtgccagtagaatgtggcagttggagagcattggctgsaagacaggcagcaagaagtgcaaagcctcattgctctccagggggcctcctcttgcttgggatgagcttctgttgtcaaatgtttggaaacctctcaatggacaagaaacgttggcctggtcagctacactggctctgtgcacagggccaggcagcacagcggggagcaccctgaattcagtctactgttagggttctgccacagagggggcactaccctatacaggctgccccagcgtgggggaagaaaggcctatggcaataaaggaaagagccgtgacactcagggccaactgttctgttacaacaaggccctctgagccaagagaattcagaggaaataagtggggagtgggattctaggaaaacaggacaaggcagcactcacattccagaggatagagactcatattggagtgtcagtgtcggtatcaaagtaccccatttctrtgccctgcagaggaagcccagggacagatgatggcttcattcagttctgttgcttacacttggtttttattttggagaaatgtactccctaaaatgttgacgggtttgcttcgaaggcattttctgaggaggaagagaaaaagctctcatgaataatcactgagttgcttttattattatttcagccacacctaataaggaaggagttagtattttctaactctgagcagcatggtttgcgttggcttctctcatttcctgcattctttggtgcactgttcttcaaagcatatccagcaatgacaaggtctgaagaatttttagtaaagcagatggccattttgcrgaagcaaagtatggcaggacttaattgacaatgcaccattggacacggtgctgaaatcaactcctgttcagctagtggagggtcccctctaatcggaagccaggaaggtcatcagggctttccacatgctccaggactgacattcccagaaaaggtgatgcatcaaagtatggcaataagaaggaagagagccctgtgatgctagaaaatgtgtagaagtaatactgaagactgccacattgctctgaagtgctgggctgctgcacctccttacacacagactgtgagcacataggccttccacacagagcacgtgtgttacctgcatatcacctgcacacacatcactcaagcatgcatttcacacacagattacacacaagttatatgcatgtatgcacaccacatgcatataccacacacagaccacacacacagagcaattcccagcaaagattttaattatccatactaatgtggaggagataaaatatagatgcataactggacattatgggggttagctctaagaatgtgggtgcgttttaggaactctctggccccaaatctctgtgaaatgagtgagttacatggaacagccttgaaggccccttctaatctgcatcattctggaccccacttctattgtgcatttgcatttattcagagagaacctcgtcacatcattcttttaatttctaactctgtcctcttttttctctgtatcccaaacatttattttgtaggacttgaggaggctaataattaatatcactgttttcctcctgtgttcagaaccctttgagagatagaccaaggcattgggtagatggagaacaaaatgtcaccttattacacttacacctatttggagagtacagttaggaataaatgatcttgctgattatcccctgagtttacccatctttccctacagccatctgtccccaaatcaaggtctttcccagcacaggggcaagtggcccactaggtccactgcttggctgagaatgcaggacatggagatgaccacccacttcagggaggaagaccctgcttatgggggaggatggggtaagatgcagagggttcatatccttttcccaaaccctcaagttagaccaatttctcctgctctccttgggaggactgtcctcccccaccgcatagagaaggaggacagctatgattctctgttcagtcctgtcacaaggaaccttgaagatttagaaataaaattcccataatgggttccagccactcctgctcaccacgttggatgattaatgtgataaagtggtctgtgttttggggagattcttagggaggagcataggatattcggaactgatgccactgacttgttattaaagccactagtgacctgtcttggtgggaatacaagtcatgtggaaatggagggtagggtgggttttaaccagatgtgtctatccactcacaggtagacctgtaggtcttgccatgaacacacaagagcttgctctatgtaaatagtgggttacactaaaaagaccattgtcatacactgttgatgataatgtaaattgaacatttcctgagagcaattttgcaatacatatcaataacttaaaaatacttctggcttttcagtaattttgtctgaggaaatgatcaaatatgaagccaaagctttatacatgtggttgaccactatagcataatgcaatgcacagaatattaataagtattgaacaatatggacatatctaaaggatgatacagtcacagaactgaatattatctaagaatttaaaatgttgtttctacagaacttacatgagctaaaaaatattttattaaatgttaaagcaaagcacaaaactacattcagaatgaactgaagcttcttggaacaagatagaggtcttgacaaagtaaagtatgccaccaattttgagaatacagaggaaaatggagtaggcagacaaggccgtatggaaagcagagtgttctgcttgggcaggacaattatagattatttttagtttgtctttatatctttgtttttctcccaaattatatgaacatgaattgtttttatcatgaaaagaataatgagttatatgttttgaaagactaccatatttctacataaacaaaagataataggtgaatgtcacttatccaggctcagcaaatacagttttggtgtgagggcagtttgtatcacaataatgcygcataacaaccatgaaatctcagaggtacacaataatagactgcaggttgactagggcagctctgctccatgtgtctctcatcctgggactggtgggctacccggaagtgttcttttcctaatgaggtgcaagagagtgacctgaaaaacaaaaggtctcctaatcctgggctggatctagctcgtgattatttctgtccacattgcattagccaaagcaaagcagatctcatggctaagcccaaagtcaagggagggactgcaaagtcatctaccaaagggcatggatccaagaaaagggcagaactcttctggagattgatgttttctgttaagcaaataaaaatgttactttggaaacagaagtaaaattaacttcctgcagttatctctctgaagactgttgctaatgtgcactttgttttgattgtattcacaagtgagaaacagttaccctattgagcagctctttctgtctctttagatcctggccaatgtgatcattttcatctgtgggaacctggcgggagcctaccataagcacctcatggaactcgctcttcagcaaacatatcaggacacctgtaattgcatcaagtcgcggatcaagttggaatttgaaaaacgtcaacaggtaatggatgtttcatcttacatccacattattttagtcattattaaaatgatgctgttactattaatgttgagtgtcrttcattcattcatgagcttcagaaaaatcagagaagaaaccctgggctctgcacctggggagtgtcttagtctgcttagtgctgctataaaggaatacctgaggttgggtaatttaccaagaaaagaggtttattagtctcatggttctacaggctgcacaagaagcctgtgccatgtctacttctcgtgaatgcctttaactgcctccactcatggataatgggtaatgtgcagggatcacttagcgagagaggaagcaagagagaggcagggaaggaggggcagtgccaggctcttttgaacaaccaactctcatgggaacaatagagtgagaaactccctcaaactcccttcccagggagggcatttatgtgtccatgagggatccacccccaagacacaaacacctcccaccaggcctcacctccaacactggggatcaaatttcaacatgagatttggagaggacaagcatctaaactgtaatagagagttatgatcaaaagagcaaagattgcatcttccccatgcagccttcagaccaagggacccaggatcacccacagccagatacgccaaccatcatcaacaagtggctggggaagtcaaataagaacagttcgtgaaaatgctcacttctggttagtgtttatgacaagcatttgcaccagcagaagtaygagcctccccctcatcgccccctcaccgtgctgtgccatcacagcacttcctacagcgcctgttgtccacataggatgaaatgttggagtcttcctcagggaggtgattgaagagtctggggaggagccaggtgtcgttgtcaggggcatcctaggttgattgttgtgggtgacacaaatgcacatcagggaaatgtatagactgcaaggaagcattacagaaaacaaacaatggagacaataggagatgtgtggggaccaagatatcaccaaggatggtggaaagcaggcacaacagatgtacatggagaagaagccatagaggggccctggatttgctgtgcttcactccgggtgatggcagatatccatgtgaacagctgtgtgttcctgggtttgtgtatttctcactgagaatccagtctgtaaagctaataattagcatggctggctataaacactgtgctccccctccctgtgggccttcatcacattacctaagctcttagcagtgtttggcatatcatggatccttaattattgtttgtgaagttgtattgagttagttcactctataaaatttcatcaaagtgtattgtggtaggagcaaaaagtatatcctttaaattttggcactagtcctttgtctatgtgtggactgctgaatggtaatcattcttttttgaaaacagggatccaggatattagttcattcattcaacaaatatttagtgaacaccaaggctgtggcaggcatggctctaggcactgggatataactgtaaacactgcctttgcattggtatgattagaaaatatggtttgtttttaaaaaatacattttgtcttaccacctatatagcaaaggtattcaggaaccgatgtttttgtttgtttgtttgttctagatgtgtgtcaaattctgaattcaaaattaagagacatagatagttgttaacttgggactattatccagtttattcttatgtacctattttcagtaacgttttacatctgtgttctagaaaattccacagtttggacaaggagcccttagcactcatgggtggtcctgctgtagtgcatgctacagggttcaaatgttttgggagagatggtttcctttctcaagcagtacagactggagcaagttgggcccgacagacatgtttaacttttttttcatcagctctgtaatctccttcaaaatagcactaaagctacagagaacagaaattccaagtagatggattacataacctaatatttttaggaacagctttgataaaagcagtttcaggtcactgacctcacctgcacatcatatttctctgaagagaactgagcagctgaaagcacatggcatcccttgccacagtgagctgagggtaagaggagccacattgaccttgtggagctcaagaactgaaccatcatgggagacattagaaagacatgcatctactagtttcagaaaagaagtcagtgattcttttaaaaataaagaaagtgagaagggacactttaaagaaataagaactgatattaaatatgtttaatataatacaacttcacatcacaagagcattttgtcacaagcgttggaagtccatttccagagtctactcctagaatgcagtacctttcttgttagggcttcggagaatatgtgtctacgatgagatgtgtttgtacttttctcagaccagcatgtaattaaatgggaagaagagattatcttggttwaaaaaaaaaaaaaaaccatcagtaagatataatctgatagatttaaggaaactagtaaaaactggccagtggcaatctgtgtgaccttcatagaagggagaggcccctgaaacactgaggcccagtagggccactgatcaaattcaggtttgggttccttgtgtcacttcctgctcaccctgcaccacaaaccacctttcgcttcatccacagtcactgtggcaaacagtaatgtccttcaaagttcttcattccrgaaggatatgtgttgaccagccagaaaacagtttcagtcattgtttagataaataaatagcatccaatttaatgtacacgttagcagctgcgtcagagagagctggtgctcccagaggttgagaggcggccaccttgggagttccttggcctcgcttcacagccccactctctgctgtccttcctccttggagaggatacagtggcgggttagcccaggaagccgtccctcttcacccaggattggagggggggcactgaaactattgggacctgtctaacgattctgaaatcttttcaaaattgcaaaactccatgctgtcttttcttcagattttgtgatatttttcagatgcaagtgagatgaatttctaaagattaaagcccatgcttgaataaagtggccatttgtactataagattttgagggaagaaggaatgaaaaatgttgctagagattttctcagagttgtgttcttgccctaaaaatgttctcattatgaacaataaaaatcatgactttttacaaggtagggaaaagaatgcattgcattggaattgaggcygcctttagaaacagaaggtattcacctgtctcgagttttgacttttgtcttaagtttcatatcccacagtaaaatccgcagctgtttcctgagcaccgtgtagtgtggcagatggctcttatcagacctgagaaaacatatttcagtgagtgttgctctctggggtatgtaataggctctcaggaattaatgagagctggattcacagcaaaataakaacactgtttgctaactgcctaggcagttgaaataaatgctgtttccgtaggagtaaaagccaggtttgctatttcatagagggagaataaaccctctttaatttatatattgtctttgttttagaataatttaacaaatttttatgtgatttacttaatctgaaccatcctgtggatcaaatatgacagaacattccttttagtaaaaaatactagtcgggcgaggctcagagaccccatgctatacctggattctgcaactctctgtggggattctggctttctggctgtagtctttctggctgtagtctttctggctgtccttggatgcaaaattgttttcctctctgcagaatttagtggaacaagaaagtgatccttgggtggtcatggctgggtagataatgacaaatttacctgtttttaatcctaatgtgatagcaggtattataacggctttattgaatgcattttatggctcatttgttttgcaaggtgaagagtttttgaagtttttctagatttgggctgctaaaatttggaaaagcaaacagaagcaagtactatttctttaagtttttataatgtcctgggtactttatgtagtactttatgtgtactgttgtatcagactcctattgctgctgtaacaaatttccacaaatttgatggcttaaaacagaacagattttttatcttacagtttcagaggttacaagtccaaaatcagtctcactgagctaaagtcaagatattagcagggctgtttttttctggagattttgaagggagaattcatttcctggccttttcaagcttccgaaggctgcttgcattctttggctcctagatcctagaccctttccaccatatgtaaagtcatgagggtagaatctttcaattgctttctctctctctctccttgtcttttttttttttttttgagatgcagtctggctctgtcacccaggctggagtgcagtgtcatgatctcggctcactgcaacctctgccccctggggctcaacagatcctcccacctcagtctcccaagtaggagggactacaggtgtccaccaccacacctggctaacttttgttatttattgtattttgtatttgttttgccatgttgcccaggctggtcttgcactcctgatctcaagcaatccacccaccttggcttcccaaagtgctgggattacaggcatgagccactgagcccggcctgtctctgacttttgattctgctgttgcatcttcttccttttctctgactccaaccctcctgctttactcttatggcttctgtaattacactggactaaccgggctaatccaagataaactcaccatctcaagatctttaatttaatcacatccacaaaatccctggtttgccatgtaacctaacatagtcccagattccaaggattaagatggagatacttttgtgggaccgttagtcagcctaccactctccgtcttctttattcctacagcaactctaggacctaagtcgtttttcccatttaaaccgaataaagaaactgctcacattacttggccccagatcactcagtgagtaagtgtaacttccagggcccttctgtctttcaagttggttttgcatgggttttctggtctgatctctgggaatgttaactggagattttccaggacgtgaaggactctctgatggaagtcctaaaaagagtaggaacaactttgagcaactttaagcatccaaaatggtatcctgctaagaaggcagtcagtagctgttcttccattgaattctcatgcactaacatgaagcaacagaaatcagctgccatcttactccctccatgaccatgctgaggcatggggagggtttgatgccagccatgccatccccaaagatccctccagggtcagctttcttcttcctggaggcaagaagattgaacagaggagtctgcagctttgtctgcttggacatgtggtggtgagttattcaaaacagtcttttaccaaccccatctctgcatgttcagtttaccttttgccaatgaaacggaccttacgaggactcatcaatgacaagactaattgttttacccaattgtcttcacctgagttgttacatggacttgaggtgaggcatctcaacagttatgtaccttttcataaagccaagctggacattaatagtgtgagaggaattcragccagtgagactttctcactgcagttgctgaagaattaaagcagcacattttaatataaatgtcacgcctgagctttgaggtgcagggctgggggatgcgcccaacagagagagcctaacaggagaaacacacatcgtgcggcaggtacagtttggctcagatataaaggccttgcctgggttctgacatctcagaccattaattaaactcttccacgccccctgcttatgtttttgagatctccacttttcatcttttattaaatcattagttgtgtcatttttttctttggtatctcctccttggtaaagaggccataacttccatccatcttggtcatcacatttttttcattctgtaaatgattagtatatacttttctctttggcatctcttccccagtgcagagggcatagcttaagccagtgttggttattgcttttatctcaactctcattggtgtaacattaaatgatgtggaagactacacatacactttacttgaaaactgaaaaaaaaatgaagagctgagatgttataaaaggttctcatcacagtgtttgctattccaatccatcggaatgatctttaagaaatattttcacagtttgcaccacactgtattatactggttacttaaattctcatgaagctcagatgtcatgcctcattgagaagttccaggacaagatgtttcaggatgctacaattttgccatgatgtttatggatgcttttaaatgagaaaygaaaattaactccagaaaattgtcaataatccttaaatcaagtctgcagtattttctgagaagtcctttagttagaatggttgagatcaccacaaatttgcgaagattgcaatgaagattgtgctatgactgtgcaatcaacctcctttaaggaggagtcaacagttacagatccaagatccagggggaggatgaaggaactctcaggaatcactgtccagtattgatgcctaacaaagaatataaatgcaggccattataggggtttacaaaagccacattagcaactatttgttcattcttaaaaaaaaaaaaatggacattttggcagggcgcggtggctcatgcctgtaatcccagcactttgggaggccgaggcgggcggatcacctgaggtcaggagtttgagaccagcctggccaacatggtaaaaccctgtctctactaaaaatacaaaaattagctgggtgtggtggtgggcacctggaatcccagctactctactcgggaggctaaggcaggagaattgcttgaacccgggaggcagagrttgcagtgagccaagatcacagcactgcactccagcctgggcaacagagcaagactccatctcaaaaaaaaraaaaagaaaaaatatagacattttgctttaaaggaaaaaataaaaataaaaaagaattatagcaattaattaagcagagattcttttaatggttaaatatatgcaggtgtctatttacatcatggcagtagaaaagccaaatgataaaattaaaccttctagaagttttctctgtgtaagaaacttgagcaagacctcctgctcatgtccacagtgaagaagcaactcacctgtcttgttgaagaaacacctggaaacagttatattactccagattatcacaagcagatttttgttgataataagaagcccccaaaaccagaagtcatgtactaaggagaggacctgattttgatgtttctgagagccctagaattttcaatatttcctggggactgcctatttttaatactctgtgatatggtactttgatgctggtaagaatgtttaataggcaaagaataatctagttaaaagattcaagacaatttgacatcatttgataccagtaaaataaacccaataaaaagcaattctaaaatgagcccttttgtttcattaaacattcttgtgatatttgtcacatatagaaacaaaactcaagtcttctgtgattgccatcatatttttcttcctgcaaatgtaatcacagataggccactatgccttttaatsggggggaaaggcattttgaacttactttcatggggctgacttcaaaatgttaaagttactgatcatgcatatttaatagtatattaccatgagcacagttgcagatacatatacctcctatggcactagtgatgtgtttactgaaccgaggtatccatttatatctgtaacaaattgaaggttaggactcatgaactttagggttttgtaaattgcatatgtgttttcaaatggtattatttttggagattatacttttagggttatctgagtgctgtcaagattttattttatcctagaacttctgtagaaaagtcctttaatgtacttacggatgatgggccatttaatatatgtgtgttactggatgtgacaattccccccaaagactaacgttgtcataaatgtggactatatgatgcactcagaatgcaatgcaagaggcatgtgagataatgatactcacataaacacattcatacccttttcaaattgcatagtatttttacatatattcttctgttaaatacaggattatacaagatgcagaaaagccctcttgtcctatttatcaaatttacaggtttttttttttttggcttgttaggtgctggcaattttcccaggttggggaatgcagaggtagccaagactagaggtccctgttctctttgcgcttaaattctaatagcaggtgatagactgtaacttatcaaatccataatttcatgagaagatataacaagataatgtgacaaagcatggtggctggagaagaccaagaggcctattggaggggccaggcagggaggcttctctggggatgtgatatctaggttgaaatatgaattgctgaaggtctcagacctaggagggcctgagaaaaatgttcccagcaaaagaagtgggaactaccaaggtcctgagtcaggagccaggtggcctgtttgagaaacataggggtcagtgggacagttgcggggagagaggcaggagccagactacacgctgggccttgcaaggtgggtcaaggacttgggatgttatactgagtgggaagtcactgaagggttttgagtaagatagcaacgtaaactgattaacagtcttagaggatccttctagctcctagtagaggatgggttggagaagggatgagtgttagtaggtgactccttggaagccatggcatactatggcagcagtacaggctggatacaggaatagcttgggtgagagtggacagatttaggacatattttaaaattgatttagtatgggttacttttggattagctgctgagtgaaataaaaataaaataatgaagagaactttctggggtttgagcttgagcaactggatgatggttggtgtggcatctaacatttcaacatcttggtcactttatttattgggaggtaaggtacagtagaaatccagatttgagtttttaacagctaatttcaagatgccaagcagcagctgtaaataagatctggagttaaagatgtgaacttgaaagtcatcagcatatagttcctatttcaagctacaggaccagatgagatgccccaaggagagagtgggattagaaaagataaaaagggtccaggaccaaacctcaaagcacactaacatttgagcaggaatagaggaagatgaagaagcccaagtcactgagaaaaatcaaccagttatatagatgatttgttttttcctaatttagtcttgagttccctctcatgatagtggctgtaaactctagccctgccctgacggggatcctggggatgtggttgtgggtttttcccatgtgcctttcatgggatccttctttgacctcacagacagcctgatacctaagtgtttagcctgtggccaggtgtccctctcacgggaagcttgtttatcctggcacatgcccttgtggctctcatctgacctgtrtctagtttattcctaccaaggcagccactctcccagagagccctgaccaggacagaagttaggatggggtagaagaggcaactcatcagaacccatgaaataacagaagcagtttattgtttacagatctggagaagagagggcgcagcaccatttgcagggccagcaaaaagcagggagccatccaggacacacaggctcaaccagcaggtgcagaatgagagagagagggagctgtgggccaaagccttcgctggggttcaggacattgtgcaatcaggtttctaatcggtgggtttagaacaagcaggcacatgccctatggcatcatgctgtgactgagagaaggtcagtgtgggtgggatacctgtgcagtctatgcagggtgtggggattagtagggtgtatccagctgtccyacagggaggtggttaccagaaggcagtatacaaggcagatgtcttgattgaccaccttgagaaactgcaaggaggtaggggggatggaaactgtgtcaaacatgattaggctttgcatgagtaagaccaatctaaatttaaaattgatgccaaagcwacaaaaaattataagaattcaccacaataggggaaaagccagagagaatggttcaatagaagccaagagaagaaggtataagtgggatagtggccaacatagtcacatgctgtagagtcatagtgagaagagggtaaaggagtgaccactggtcttgaacaaatggtggtcaccagtggcctggacaataagtttaagtggagcaatcatgctaaagtgactgaggttaggtgaagaggagacaggaggtgcggaagccatgcagtgagttcccacagctcttctgatgtatgtagcagagaagaggagccaagaaatgccgcggggtttgtttgttcaagattttctatgctcatggcataaatcaaagttgtattacacatcttaataatgcatctttggtaatacattttaaattgcctgttaattatttctaatttattatattacatagttttcctaatatgttgtattctgaatcattgattctaaggaagggatgggtacaagggttggttgatttttatagaaaggcaacagttggggccgggtgtgctggctcagacctataatcccagcactttgggaggccaaggcaggcggatcacctgaggtcaggagttcaagaccagcctggccaaaatggcgaaaccctgtctctactagaaatacaaaaattagccagatgtggtggtgagtgcctgtaatctcaggaggcggaggttgcagtgagccgagatatcacaacactgcactacagcctgggtaacagagtgagactccgtctcaaaaaaaaaaaaaaaaaaaagagaagaagaagaagaagaaaggcaactgagtttgctccattacattcattacagttactaaataatcacagctgtagtccattgtagctaatgttctagtaatagctactaaaaaggttttaatccaaatagaaacaaaggaaaagttattttaaaataggcaaataacctggaaagcatgaaaaggaataaaatgtcaacaagattttaggtaaaatgaaaagaatacattaagacaaaaattcaagcctctactaagtttaactatgttttagaaggtatattaaagtaaaaatataaaattaaatgttaaaaataaaccaactgatcctctaggcaaaagaatcagcacatatcagtgcatgtcatgttataaccatattccagggaagaactgctatccagagcwtgagagtttcaaggttgggcagtttaactacaagcacaatcctcattataaatatggaaaaagcaaaaaggctaggagcttctcctccaggtaaacatcaatcagcagccagtagaattattagagctgaaatgcaaaaataaaaaagccacaggtggcagctccagccatcatgggttaaacgtgagaaagcagcaacagatatcctgagcctttctcactactgtgctgtggactcgggcacctggtgactgagcagmttcaaggtgacaggaggttagcaaatcgtgtttggcctccagatggaattttctttgttatcatatatttttttgtgtgtggtcctattttctatacctttctggctcctcgtgaggcagattctccaggaaattaagactttattttctaaaccagtagcatagaataaaaacaggaatattttatcattgactgtagaatgagttcagagccatctgatagaatttgaggctcagcagcccgcacctatgacctctgccctgaagaaaatgaccatcccttggacaaggtttacttagtagtgtggactctgcccttctagtgtgtttctgttccttcagggcaggaaccaatgattggaggaacaaaagtgcatttgagagaaagaaaacacactcctggcatgaggcatgatgccaatgatgaaagaaacaaaacacactcccagcatgaggccaatgtgtgtaagtgccttgcagaagtcttagcacagactcttcctgtgactctgccagtccaggatcactggaatgcagcagccatttcagcagccaccagagagttggatcccggatgaagtgactcagagattcatttcctagggtcgtcatcttcctagctggcctgtttagggcccatttctgccatcctgaaactagactctgaaatctttggcggtgatacggtttggctctgtggccccacccaaatctcatcttgtagctcccataattcccatgtgtcatgggagtgtctagctgggagatcactgaatcatgggggtgggtctttcccatgctgttctcatgatagtgaataagtcttatgagatctgatggttttaaaaacaggagtttccctccacttgctgccatctgtgtaagatgtgatttgcttctccttgctttctaccatgattgtgaggcttccccagccacgtggaactgtaagtccattaaacctctttcttttgtgaattgcccagtctcgggtatgtgtttatcagcagtgtgaaaatggactaatacaggtgacaatggctattatttcattatttttctttagagtattagaacctactacagtgcctgcatggagtaagtgagaacatatactctccaaacaccaactgacaaaacacagaaatatgttctgcactagcttgctctttctctcttgctctctcgctgagcaaccttcataatatgtattaatccatacagagatttatgtttcaaaatgaccaagagtccactgcacagcagtgagaaaggcttaggacacctgttgctgctttctcacatttaacccaaggagatggctggagctgccacctgtggcttttttattttgtaataattagttattatcagtagtcctaaaaccatgtcttccaatactttgtactcctgatcgtttttagcaatctttggactcctgagttattcttacaccctttagcatctccattcgtaaatctctccgtctatcttttctaaattgtatgcaggttaaatgcaatttttgcatactccatacctcatgactgctctggatgagctcaggtattattgcatacaccttcttattcattatgaggctcacttatatcatcgttcacaaaagtagtacttggtcatcttgaaacttcaaacaccaagccaggataaacagcagagatttacaatgcttcattctccctcccaggcctgtmttcctctagtttctagtgtgattttggctgacatatttctgcgaacttgaattattttagccttattgttatagaagtgattagtctccttccagtagggagtgtagacatggaatttttttgtgttatgaaagatgcaatttttatgtcaaagataaaacacaagctcgacatcatcccagcctgttaaattaatccagatctgaggaagaacaagcatttaagctagtctttattaaaacacttggctgagggatacagttgtgacgacagtttgcaggataatgaatctttaaaacagtgttagattttgacattgataagtacagtacttaacataattattattccagatttccgctggtgaattttattaacgagtcaaggaaaaaaatgtttagaggaatatttacgagtggctattgcaaggagtgggtcagtaaaaaaaggcaaatgtcaaaccagattctaccctttaaagaggcatttagatcatgatcaaaatctgggctcagaagacataacacttttatatgagtgggcctcttgaaaagatatgagtggaattgtgaatgctttattgaaaaacagaggaaaatttttccactatagagcaatgtacttcatcagctgacagaaatgaacataaaatgtgacaaattctatattagaaagaattgacagatctctcaaagttgctgatgaataatgggaaaaatttaaaatgtctttaaataaagtttgcttttgatatgttttcatgaaaaatggtaactgtttctcatgtaaattagcatttatgactactgtcttctgcctttggtaacattattttttttttcatttaattgggaaatgaacaatataagagggaagcctagagcaggtcaaatcaagaatatcattatgcagaaaaatagaaatataccaatttcatggtatttcataggtgttgtctctatgcaatgactagtttatttcatatcttgctatctttctttacccttgaaacagaggataatgggctagattgtcttctaagactaaagaaataacagctaatatgattatccagctgtgaatggatttggaaaatttgcttttctgatgcctcaaagaaagttttgtgcttgctcactgttcagcctttcatcattgagcactctttgagtagagagatgagaaatttgaaaagctgatcttaccctatctgtcttgcctgccactctatgcctttcaaggcaggagattataagaactatgagacccagttctgatgctctgcagtcacaacccctctttcaaggatgtgggtagggacccagacactctatgatacctgcagccctttacagctgctgaggtggggcattcagtacctgacaaagatgtggatagttttgtagattacatggcagccagactgtccattacatctgccccaagattcacagattctacaaatctctatctatatttattgtgctaaaactagagttgtaaaaatgcagatcaaaaacacagagattcccaagcacctcaaacttaaataacaaagatgatcgtggtataagatgtgaagctgttttttctcttatttatgagttatcgttctgtgttttattatattatgatgtctcctttgtcaagatatatatatatctcttgcaagattaccacaaatatatcttgcaagattatcaccaatgatatatgtatatcattttgacttttattttagattcagagagtgataggtttggggtatgactgatcccattacccaggtactgagcatagcacacaacagtttttcaactcttgcccctctgcctctctcctccctcctccctctagtagtcccagtgtctatcgtcccatctttatgtccatgagtacccaatgtttagctccyacttataagtgagaacatgcagtatttggttttctgtgttttgtgttaatttgcttaggattatggcctctagctgcatccatggtgctggaaaggarkgattttattcttttttatggctgcatagtatcccatagtgtatccataccacattttctttaatcaatccaccattgatgggcttttagatagattccatgtctttgtgactgtgaatagtgctgcaatgaacatatgagtacatgtgtctttttggtagaatgatttattttcttctagatatatacccagtaatgggattgccaggtggaatggtagttctgttttaagttcttcaggaaatttccacatggccttccacagtggctgaactaatttacatttccaccaacagtatawacattccctttcctccacagccttaccagcatgtgtgtttttttgactgttttaatactagttattctgactggtgtgaaatggtatgtcattgtggtttcagtttgcatttctaatgattagtcatattgagcatttttaaaatatgtttgttggtggcttgtaagtcttcttttgagaagtatmtgtttatgtctttttcccatttttaatgggattatttgttttttgtttgttaaattgtttaaatttcttatagattctggatactagacctttgtcagatgcatagtttgcaaataatttctcccattctgtaggctgtgtgtttacaatgttattattttctattgctgtacagaagctctttagtttaattaggtcccacttgtcagtttttgtttttgttgcaattggttttgaggacatagtcataaattatttcccaagctgatgtccagaatgctgtttccagatactatacaaaatgaacatcaccaatgcatatagtcaccagactgtccaaggtcaacattaaataaaaaattttaatggcaactagagaaaaagatcagatcatgtacaaatgaattcccatgaggctaatagcagacttgactttttagcaggagaaattgggggcctcttttcaacattcttaaagaaagaaattccaacaargaatttcatatctcaccaaactaagtttcataatcaaaggagaaataaaatattttccagacaagcaggcactaagggaattcgttaccattagaccagcctttcaagagctcattaagggagttctaaatgtggaaatgaaagaaccatacctactaacaaaaaacactcttcagtatatttttctaattagaattttttttatttttttaaatcctttttctttgtctacagagactgtggtaggatttttttttcagattttcaaatgtatttctttagccttcccattcagaaatgttggatttttctatttatgaaaatatgccattaaatccatcagcatgcttttagtgttttctctgcagtttctaaataatttaaatgtctattctaaaaattttataggttagcatgctgtagcaaacagattaattttttcagcatgaattttacctgattataaataatatccagtaatactgttgggacgtacatttatcttgtatccagacactcagtaaattctctattcactctagtgctttctacctgagctcatatgcattactcttccacaaactacacttttttgttttcatcccctgaaatttttatattttctgatatccagagataccaaagctgtgttgaatgacattattctatggagcagatttgttaggtctgtgcttacaggaaaggctcatcattttggtttcatttcttttttttttccacaataaaatttataacaccttaacaatattttggtgatttttttttctagcttctttaaacatttatcttttaatccatgacattttgatttacttccaaatctaaacatagtttgctttttggagaaataaatatagtccatttttatttgtggtaagaattgttatgccatatctagtgtctctcattctgtttcctgatacttagtgttgtttcctagtctttctaaattttattttagtttttttttaatctcaactagtgagggactaattttttaaaataataatcacattccattgtgtgttttcttttaaagtattatttttaagacctcttttctttttctgacatgtcttctgagcatcttagaataccttaccacattttaacaatataattattttttattaaatggctccaataatgcatgtctgtgttatcccttgctgatacacattccagtttctcttattttaaaataaataaactaaaaaagttatattttcttaaatatctcacaaatagtgtcttcattcttgattcctttcactcaccactaaatttcttgaaaaagtagttacttttcttttttgtctttcctcaatacttacccacttcttaactttgctgttgaactgccatctaaattcaccgttcaactgaaaacacttcctaaatttaaaggcattttccatcctcctccttgatttcctcagtgtttccttctgctacccacatttttgtctacttggggaaaaactattcttgaggcatcacctggtaccagttcagttctctgacttcttttttcctctccttgtcctttggagacaccgtttctattcctacccaccaaacacacacattctctaggactctgcacaggggcacattttctccatatttatgttggccagcttttagcccatcatacatttttagtcaccctgtctggattattggctttcaattcagtaattcctgtaccttgtcttgagtttcagatctatatttcattaacaccataaactcagaatgttcaaacaccgtttttgcccaaatgccattcttcggtcaccctctctatttctgtgaatgactacacctttttctctcccacccaaactctaaacctccctttttggctttcactttcttttcttgtcccccatacaattaattgctctgttatataattctttgtatatatcgtagtttctatttgccattcccaaagctacacccttagcttaagttttcatacactccgccccaccaaattcttgccatacagtagtatcatattaatcctcccaaggcacagttagtctcagaacaagggcgagtctgttaacaccctagttaataatgcagtgcccttaactgatgttcttctttgaatcatttgttgagagggacaattctgtccttgttatgagcatggctgtagtttcatgctctttggttgtgaatccttagaaacccttgataactgtgtgtccttaggaaagttacttcatcattcaagtccttggtttccttatctgtagagcagagataataacattacctgccttagtcaagttgtgggcatcttacacatttttatagtcactcaaggtgcatgtgcttattaaagatatatattttttgaattgcaaatggcctaaagaaagtccatgggaagtagccagtgctttatatcaggatagatggatggctgaggcctaagtggtgtgttcctggattcactggaaagtttcaaaaagtgataataaaagcggarccggcatttgcaccttcaaagtccttggaaaagaaagctggcccaatccataaaggccaggatatactttttcagccaacagacaatgaagaaagagacactgaagagcagtaagattaaaggacattcaaccttcattaccaatgagacaatgtccagtgtggtataagaactttgggaaggaggatgactggttggatcaccaggttaccagtgagtgaacaaattcctaatcaaatacattaatttctgcccagtaacaactttatccccatccttctttacatcactatttacagacatttgtttatgttgaaaaaaaatgaggaaatgataagatgctccccttatgagcctgagtcttcacttattcaacaggctttccaaataaccatgctagactcattgctgtgctgctactatttcagtgttagggataaagaaaggaatcctaacagcttctagagagaaaataactaggttatctgccatgggacaagagtcagatttgcattttgcataaacaacaccagttgtcaaaaaacaataaagcaaacatcttaaaaatacttaagtatgttgcacttcaatttatatgcgaagtcaaactactgtttgtaaataaggttaaaacaaagactttcaggcaaatgtggattcagaaaatgcaacttccgcacatctattatggcatggcatttgtggattcctccagtgaaacaaaaatgaattcaaacaaaagagaaaaaatgttgggatttttaaaaaaaacgttggaagcaaagaaacgagtaaaacttgattaagactaaataattgtagttacctaatgtaaaaataacactgttaattaaaacagcaagaataacaaagccagaaattgtttttaatcaaatgattttaccttgagaggtattgaggtaatggacatattttctaggagaacttattatttatatatataaagaaatatatatatatatagtacaaatacacatatttatagaaatagtttatctcactgctttaaatcacagtaaatgctttacttttaatttcatacagctttaaaggagaaaattagatttttatattcatcaaagaggattatgggttaataagcttaaaagaccctcttataatggtaattcaacattcagtgtgaaggagaaaggcatagtttatacaaggacaagacctctccttgaattatgcagtttagtactctgagccttcactattttcttccgtctatgtgcaatgaaatttcagttttaggaccaggtaaatagtgcttattacatttaagctgtgaaagccagaattccctgaagcacatcgtacagctcagcattgttggtatttgtgttttcatagcatgtttcatctgagggaaccaagttctgcataaatataacgaatttcacattccataaaatgatcccatattgttatattatcaccagcaaggcatagggtggagaattaccgggttttcgagaaaagcttgagcaaatgggcaatttcggccaccatcttgaaggccagactcaaggacaggttttatttgggaacacttggtcttgggattgcctgcgttcgctgccccatgttccagcatcatcctctgatgtgttcaatctgaaccagttccccataaaaagttattgtaggaaagttttgtgccctgaagaaaggtgagaccttcatcctattcaggattccctcactgagcagactctttccttgtccttcttcagagatgtgcaaatgtgcctttcagcttctaacacacgcctttcagctctgcctgatatgtgaccaaccctggatttttggttctgttcatttggggttttgttctgtttggttgatttttaacactctgtgcctcagttttctgacctgtaacatgtaagtaatgataatatctgccccagagaaatcttcccgagacaaattgtaggcatgagagtcacagagcaggccacgtaagcaatgataatatctgccacacaagattcttcctgagacaaattgcaggtatcagagacttagagcaggcttagcagccagcacacagtgcatgtgggccctgtgtgcttgcagaggttcgacccccatctccacctgctttccatgacctgtgaatggatggttttgcaccaaaattcatgtaccatacacacctcagaaatagccctaaatayttgggaaaaggtagccccaaaggaagcttttggaaatgttcaatgctcgttgacacatcttaaaaattaagaaaatggcaactagaggaagatcaagaagtactgagaatgaaggttataaaccagctagtgtgttgccaggcatttggccttttactctagacttctcttcctttttcaccatcatttggcaaaatttagaaatttaaacatctacaaagactcatcaatcctatctgctgtaggtacaactgtccttgactttcatgttttctaatattctcttttcccctctgtattgaaatatttcagacttaaagtataaagcaaaagaacaaataagcggaccttctccttttcttcctccgtccgattaaaggagcctggggaaaaggcgcaatgccaagagggatttaaatgcgctctggacttcagtttcctcctgcataaaatgaggattctagaccttatcataataggttttcttccagccttaatagtccatgagatttcacatttttctggtattattttcaatctgttagaagccttcaaagaaaattatatgactggttgccttttttttcttttcagttttactgtatctccaattttgactgtaattttcaggtattttctatgaatcctttcactccttcctatcttttctatcttgtgggcagaatgttcaattcttttggcacattactcacatcctagctaattattttcagtaactaaatactcatgtgtgctcattataaaaaactcttcagagcaaagcataagaatataagtttcttaagtgaaacttctttgcatttacggggaagaatactatgacatgatgggaaaataagattttgcctagaaatatgttctaccattaatattatcagttgcggtccaagaacctcactattcttcatactagtgtttcaagtaataagcactcactgcaacaaatgccatggcaatagaaaaagccagggtctcctaatgatttaagaaaaactttgccaagtaaaatccctgcggggttagaaacactgacttactgtgagaattgaaatatataaatatgtatmcaatataccagtctcaggtcataacatccagaaaatattaactatcgataaaatgaattaaaatcattttgtatcatttaatatgattttgataagcaaaaaaggcattattttaaatttgtgaagtgagtcatttctttcattgtaggcaaaatagattttctgtcacattctgaaaaataatagaattggaagaaggtcttttgcccatggttatggcttaggcaaacagtgatagctcagaagataagctatagaacttagtggacataaaacctgtctcataaatttgagagctctgtgatacatcagttcttcggctaagaaaatgctatcatttttacatcttcagggttacatagtgggatccacttttagagatatagcctcactaaaagaatttctttgttcttttttctaacaatatgaaaacttttaaaatatgaaaagcataagtaatgccattttcctgctctgcttctcatttgggtaacaactgagtaaaatgcttccctttatctcctagaaccacaaatattgtgttgatgtgaattggaacattgatattaaaaacaattttggttgcttgcattctgatttgccataagattaagcctggacatttgagctctctggacattgcatttatttatggatgcatcatcagtttatagcaagcacagctgagctctcaatgttcytcattaaacatggtaaacttaacaaattctaagagtctggargatctaaacagctcttactaagctacctactagcatgyacatttctagagagaggaagagaagaatgaaagtacatattttttcttctgtttattgtatttatgtgggagaataaaagctgcagaccacagcatgcagtgcttcagagggagaggacttggcaggatgccttgcttgcctgacccctctgaaggccagagtgtaccagggcttaggtctccagtctgttctctgccatttacccttagggatctcacccattcttactgctttacaaccgtctacacactaataactccatagctcctatctctcccctgaaatccagactcaaagtccaactgyttagtatagtcttcatttgaattaatgaatatctcaaacaaaacatgaccaaaatagagctcttgatggcctcctaaaccaactttccccctctttacccytctaggtaaatgatactccatttacccactttcccaggccagaactctaggaggagccatactggactttttcctctcactcctcgtatccaagccatctgcagatggccccagttctaccttcaaagtaaacccaaagacactattccttcccccttaccatcctcatccaagccagcattcttctccctggacctcagcactcactgaattgtccttgttcacactcctgcctacctaatgtatccactatacagcagccacattgagcctttaaaatagttcattaactggcattactctcatcttaaccccagggagtgaaacccaaagccatcactttggtcacaagtccacgtgcaggcacagacacacacacacacacacacacacacacaaacgcacattctcctccttgtcacacttcctttatttcactgtccctgagtgtgcaggctcagaaatgaaaactgtctagaatgatrgccaccactatgaggccattggtgtatgacagctgccattaccataaatattaatttatatcctttggtcttttggacctcatgagaagaattagattcgattaagtaaaattcagggatagtaatgtcttaaaaaatactttacagtacgaactatataagtggaatgtagatttgagtagcagaagtgcacctccagacacaggatggaggaaccccacagaggccttcctccttcctgagcccactgcgtgggagcctctgtgactttcctttctatgttcttgccccccggacagtggcttgcgatttctgtatgttccagtattgctgctgctgtttttctaaatgaaataatgaggacagagtgtgaactgtgattttctcttaaaaatttcaattcttttgagccttatggagtaagggtcaatttaaaaagaaaatagagttgaacaaagacatgttttccccatatcctaacaaaatggaattgagcaaggcgggatggcttctggaacagaaatcattctctgtttgtagggcggttgcccagggagtaatgtttgcataaatgggtgctgatttactgacaagacgttgctcggtggttaggttaccactccttggtgacttggcagaggggaggcctgtggagaggaatgcagcctgggattcatccagcagctctgcaactctgcttcttctagattatgtagctgcctgcatgatcagtggcaggtacgcatcccaacccaggggtcctaatttgaaacccagcatcaaagcattcttctttaaaactgtttgtccagcaagcgtatccgaggcaccaaagatagaggaaacaatacaaaaaagtgcaatttgtttgatggccaattcttctagtaaattttgatttcatgtctgtattagtcagggttctctagaaggacagaactaataggatagatgtatatataaaggggagtttattaaggagtattgactcacacgatcacaaggtgaggtcccacaataggccatctgmaaactgaggatccaggaagcctcatcccaaagggatgtctgcatcccaaaacctcaaaagtagggaggccaactgtgcagccttcagtctgtggttgaaagtccaagagaacttgaagtccgatgtccgagggcaggaagcacgagaaaaagatgaggctggaagactaagccagtctagtctttccatgctctcctgcytgcttttattctggccgcgctggcagctgattagatggtgcccacccagatggagggtgggtctgcctttcccagcccactgactcaaatgttaatatcctttggcaacaccctcacagacacacccgggagcaacactttgcatccttcaatccaatcaagttgacactcagtgttaaccattaccatgtccattaatgaacatctcttccaaccttcacgtctttttatttatttatttatttatttgtttgtttagatggagtctcgctctgtcacaaggctggagtgcagtggcatgattccggctcactgtaacctgcgcctcctgggttcaagcgattctcctgcctcaacctcccaagtagctaggactacaggtgcacactaccatgaccagttaatttttgtagttttagtaaggacgggggtttcaccatgttgaccaggatggcctctatttcttcaccttgtgatccacccacctcggcctcccaaagtgctgggattacaggcgtgagcccccgcacctggcctcacctcttttaaaaatcactttaaccctactgagagttccagccctgagcaggagatatgtcaacatttatcacagacctaaaaactgatcaacagaactatgaacagtacaagttttaaatcattccctgcttatagccgtgggcacttcctttacctttcccattaagtagtgacatgtataaaaatgaatcctttatattacaggagagagaaagagaacagaaagagagagatcagtgggaaagattgatacaaattggagctatttttcttgctgaacaaaaactcagttttcaagtrtcaaccgtaaaatacttttcccattgatcttttttaaagcgtggccgtatagttaacattataacaacaatgcagagaactatccctttcatctactctttagggtatgacgcattttggatatgctatttaaaaactgacattgtattctctgtataattgttatcagttgaataacgattacttaattttgtatacaaggtctatagaattccttttgtcaggttaacctcattttacaccaggagcacaaagctcaaagatgttgagtgtatggctctcagtgaagtgaatgcaactgatctgacactgattytacttgattaaacacatgctaagacaacctggtgatgctgggcataggttcttcatgagtgcctggggaatgatgctcccttgccttctacaaagagaccctctcttgctctgtggcgtgccctgaccaagacacactgacctgtcactattacatacatttttcagtgagctctgtgaagagagcaataaaatatcatccagaaggagaagaaacgtgtagaaaaggaaaaaaagaaaaaagaggaagaagcaagttttagaatggacaaaatgagtaaattccatgatgctgagttgtttccatgttactgtgtgctggaaatgatattgttttgatttccatgaatctgttagccctgtgggtgtagacagggagggctgacatttcagtgcagaatgctggtagttctgtcaacaggagttacattttatgctaagtacaatttctaagacatatagtttcaaaatacttccttttctgtccctttccttttgccatgacaactctcataccctgagcaggcagtgtggactygagccggccagcctgggcgtgggtttcactcttgtgagatgtcaggcaagttgctctttgttgagactttgaagatgtaaaaagtcatgatgataatcatccccatgcatgctgcagtgttagggaggactaaatgagtaaaaaacgtgaagacggctaacayggtgaaaccccatctctactaaaaatacaaaaaataattagccaggcgtggtggcgggcgcctgtggtcccagctactcaggaggctgggggaggagaatggcatgaacccgggaggtggagcttgtagtgagtgagatcgtgccactgcactccagcctgggtgacagagcgagactctgtcttaaaaaaaaaaaaacgtgaagaatttgttcttttcctggcacacagagcttagaaaatattaggtagtttattacaaatattttatcttgatgttggcatctaaaacagtgaggatactgatctaaatgagaaatatttgctgactgatttaaacaaaaattgccttagataaccttctgcaattgacactttttttcccatgttttatgagtataaaatattattatgtgggtatttccctatcacaaaatatcatgagctttcaaaaattataaattcttaccactcctgggggaggagtcagtttgggggcagattaagagttcagttctagacttcattgtgaggagtttggtagaaatcccagaagagctgttgagaagaccagtggagccacacgtctagaggtcatggacctgcgctgggccagagatctgcatttgagagaagccagcagatcagtagcatttaccaccctgaggctgggcgcagtcaccacgggactcctgacattcagagagccaggagataaagagaagtcaggaaagggccttgggaagagatggcgcatccagcgagaggaaagccaggtgagcatggtgtctagacagagacagcccagtagacagggtttcaggaaggaagaaggcaatggcctgtgtcctaacaagaggagctctggtggggtggcggggagaagcctcactgcagcacagggaggccaagagggaaaacgggatcgagagaaggttattttacagatgagggaatgagcagcatgcctgtacgctatggaatgatccagcagagaaggaaacatggatgttgtggagaggtagataggctgttggagcgacatccttgagtaggaaggaagggatgggttccttccatgaagctctgacaggagcaggagcagacatttcccccttacaggagggatgtagtgacataggcggggatgctggcaggtggttgtttctcctgtcttttattagagttatatgtgtttctgccttctcattttacaagtttgtcatttcctcatgctctttgacttactccttttgtgtctccaaacaccccaccttccttgccctccacccatgcaaacacagaggggtggaaaacgggagcagttaataaacattgctgccactgaaaatgcgaatgcccagaggagtgtacatgcccaggactgctgtcaatagtaaggggaagcagcctaggacatcttgaaatactgaaaaggaggccgagatcttgggacctggaaatccctgtttaggggaaaaaatgcaaataagcattgcctacttggagagtggcaccttctgaaatgcatacctagaggatgtgactggctgaaacattcgtgtttcaaattttagatgccctttgagatccctgttaggttttagacactgagagatctagaaatgttgtttctgagtttggggtggatggctcccaaggcttttgtcgtggaagtcgtcctgagcaggcgtttcccatgactgagggctgggactaaggaaccaacagtaactgtaaagtggttgtgtaggaaaggggcgctacgttcatggcactttacctgattgtgttattttgttgcttgtgttgttatttctgagtgtctgaatgtttttaggactgtattagtcaggggtctttagagaacagaagccataggatatatacaggaagagatctattgggaagtgttcactaacacaattatggagattgggaagtgccaagacctgccttctgcaagctggaggcccaggaaagccagtggtgtgacccaggccaaatctgaaggcctgaacgtccaggatgtaaaatcccagctcrcgagaaaaagactgacgttccagctgaagccaggaggctggaagccaaaacagggactaattcctccttcctccaccttttgttctcttctggccctcagtagagattggacggtggtcgctcacactgggagcgcagtctgctttaccaagtccattgattcaattgccagtctcatctgcagacaccctcacagacacatccagaaatcatggctcatctgggcatgccgtggcccagtcaagtggacatgtagaattaaccatcacgtggcccaattaacagaactataagaaagtacatgttttatttgtcagaagtaaatgtacagttagatggtgtaggaattgtggggaagcaaaacaaagccctcacccatctgcatctgatcaccttttgaaacaccagagtctccacagtctgggttctggagctcagctgtctggacccagatgcttcttcaccacctgtgagctgtgtcctgtaaaataagggtatttgtgrtgttaacatggaaagcagttgatacagcacctgtctcatagacacctctcctcaaacatgagctgttaggtttttttcattttctttttttttttttttttgagaaggagtttcactcttgttgcccaggctggagtgcaatggcatgaccttggctcactgcaacctccacctcccgggttcaagcgattatcctgcctcagcctcccaagtaactgggattacaggcatgtgccaccatgcccagctgattttgtatttttagtggagacggggtttcaccatgtttgtcaggctggtctcgaactcctgacctcaggtgatctgtctgcctcagccttccgaagtgctggggttacaggcgtgagccacggcaccyggccaactgctagtgctaaaacacttccttagatgacttgcattgatcctatgctgattctactctttaaaatttttcaggattgtttacaacaaaattaatcaattgattccaagtaataagcactctgggaaaattaattgggaaaattcactaaatgacattattgaacagaaagtctatatagagctataaatactttttagtctctcatgtcaaaggggccctgagggccttcctcattgtctgggtagctgagcagccagttgtcccatccccactcatagcactcgaaccagagtacagaattctatatggcagcatttcatcatctcattacataagcaaagtgggaaggatgtgagggagtgcactgtgactcaggcagatgtgcgattgtaatccctctgaagggggatgagagatcctgggttcaggtatagtccctaggaatgaaagcatctgattttagagtctgcagtcttctatgactgagctgtcaaattctgaacacatagtaacggttgagtatccagaatctgaaaatccagaatctgaaatgcttccgaatcggaaactttctaagtgccaacatgataccacaagtggaaaattccacacaccagtgcttaacacaaatttcatcacgtgcaattattaaaattgtatgaattattcatattgtataaaattgtttttgggctatgtgtataagatgtatatgcaaaagtggatttcatgtttacacttgggtcctatccccaagatatctcatttgtatatgcaaatattccaagaaccaaaaaattctgaaatccgaaacacttctggtcccaagcattttgaataaaggatgctcaacctgtaataacatgctccccaaaatgaaggagtttggaaagtgttagtccactggagggctgaggaggcagggtgctggatagttgaaaatcagtgaagctcattgagtcattgagtgtctgcttccttcatcacgcatacttttctgcgtatgcagaatgtgtagattagggcaatgtgtagattagggcaaagtcttctacaaacatgggartaaatatgtgctatgatgctgtcttccctgaacattaaagtgacatgaagtgatgatcagggttaaatatgtcacagtggctctccattcccaagccaatgctattctctgcctgtgctccagccccacaccatctccctgccatgcacacatgtgtacacatgccaggacacatttttaatttttaatgcataaacaaagtacttaataggggtatgctctttcattctttcctgcactaagggcgaaacacacgtgagggttaatcacctaagttcgcaaatcaaggaccaaaaacatgtgcctcccctgcaatagaaatgtctcctcascatgaggtttccrggggtcacaagtgtctgttcagatatgcacaatccagacctttacttttccctctcagctgaaacttagatgccaaaattcccarcaattagttctcccgaaaagccataagaaccaggcagagcagacagctgtgactgaggagggaggcagctcccagctcccactgaggctgatggacgggagggaccattcattggaaatgagtgtcgcagacccagacccccaggtgcagtgacatctctgccttcctcaggtctccagtggtgaatgcaggagtccctcacccttcgacacgaaccctcttctaggttcaaagaggcagatatcaaagctgatcagccaaagacttttactgaacatggagatcttcagttgtacccaaccaatgcactgcactgatggactgttttgaacccctgcacgctgggtggaraatatccctacctttcctcaactgaagtttctgtttccatatagttgctgtcctctccagtttttctcatgaaccggttccttgaatcccttctcctgaagatttgtccactcttgggttgtgcagatctttgtcatgttcacttgctttttttctataagtttttgtttctccttttcaccagtgaagagaattgtgtgtgtgtgtgtgtgtgtgtgtgtgtgtrratatatatatatatttgagatggagtctcactctgctgcccaagctggagtgcagtggtgtgatgcaatgtctgccttctgggttcaagcgattctcctgcctcagcctcccgagtagctgggactacaagcatgaggcaccacacccaccaagaagtgtatttactgcattgcttctgtaaaaagcacaaatctaaggaagcagaaggattaaattgtataaatctgaagtgtattagtcagagttctccagagacacaaccaataaaatgtgtgtgtctatggaaagacatttaagtttggttcacacaattataggggctgrcaattccaaaacctgcagggtgaacttacatgctggaccgagggaagagcagatgctgcagttcaagttcaaagcccgttcactgcagtattccttcttgcttgggggaaataactcttttttttcgaaggccttgaacacattaggaagaacaatttgatttatcaccaatttaaatgctcatttcatccaaaaacaactctcacagaaacatctagaaaaatgcttgaccacaacatatttggcaccatggcccagtcaacttaacacgtaaaatttaccatcacactgaattttcttggtgatttggtttaaaacactaagatgcagtttatgtagtcttttgaaaactaaatatttcaatgtgctaatactcagattctgagatgaaagaaacgagaaatgctgytggctaaaactttacagaggtttgcttttcagcataggtatggttttccttattctgcagctgttcactctattcaatccagttccagttaaataatgtgtaacttaactaattacatacatctctccaatgcagtgcaatttaagatgagatttggcataaaccaacatgacttctttgtgtgtatgtgtgagtatgtacatttgtgttctatttatctttataatacccagattgctgtactgtgttggttatttcattgtgtttcaccagcttttgaatggaaatggaaacagtctggttaaattgacaccaaacttattgtctctttctctgtaaatgtgctgaaaacctctagcaattggtgttgaaacccacagctctgtggtttctgagagttatacttgcagttagtcctcttatgtccatagcttgtaacaggacacttgtgggaccaggaaattgagttactaaaggataagtaatacctctgctgtgagcygacaccaccagaatgacccaacttacaagaaacagtttcattattcttgtgcaatttacatgaaagtagagattcctaggagtagttggaaaactcgactttgcatttagaactgtggcccagctacacacaactgtccaggtgctcggcgagagcctccagttacatactacctgctttccaaactggtgtgcctaataaattggctataaccagatgacctgtgtaaacacagtaataaaagatggagctacttatgtaagtgtgaacaccaagtacaatatattcttacttataagtgggagcttaacattaaatgcacatggacacaaagatggaaacaatagataccagggattgcttgagaggagaaggtgggaggggccatgggttggaaggctacttatcaggtactatgcttactacttccatgagtggatcattcctacaccaagattcacccacatgcaatttacccatttaacaaatctgtacacatacctccagaactcaaaataaaagtggaaaagaaagaaagaaaaggatggagggagggagggagggagggagaaggaaggaaggaaggaaggaaggaaggaaggaaggaaggaaggaaggaaggactgtgagaaaggaaaagggaaggagaagctatattgagctgctcagatccttctctgaagaatgagagaggcatgggcaggacagggttgttgactctgattttgctccctttacatatggattagtggggcagtcagggttctccagagaaacacaaacaatggcataggtgtatatatagagaaggaaatttactttaaggaactggcttatgcaatcacaggtgctggcaagtctgagatctgtaaggcaggccagcaggttggagagtaagttaagagttgatactgcagtctggagtcagaaggctggagacataggtagaatttccattttacagtttggaggtagaattctttcttcttcaggggatctcagtcttcactcttaagttcttcagttgattggatgagtcccaaccatgttgtgaagggtaatctgctttacttaatctgtcaactaattgtaaatgttaatcacatgttaaaaaaaaaaatactttcacagtgacatctatactaccatttgcccgaacaactgggcacaatggcctactgaagctgacataaaattaaccatctcagctcagaagcagggaagggtagctatgggaggtgaggaaagatccttgtacatgctgctggaggcagaatccagtgtcccaacaccaagcaatgtagaaactcaaaaaatcttcactgcatgactggcttccctaagtcccaaggcagtgtatttccttatttgtaaagtttttttttaattttctttggctacttgaaaacaaacaagggtgatttggacaggggtatatatctctaaagcttggggcatcraaactgttttgattgtgcacacctatgggtaaatatttttgaccagtcattatatatatttgcttattcataaattatatgtgctaatatttatgtagattataaatcacaagttaaaattaagggtagacaaagatttaaaacatattttaaaagatctactttttaatagctcaaaaatactttaaacctttaatatttttggtaagagtcttatgatggaaaatgcatacttggcaaaagcgaaaaagagggacaaaagaaccacaagacaaacagaaaacagtgaacaaaatggcaaaggcaacccctcccaataaataattatattaaatgcaagtggattaaactcccaatcaaaaggtatgtttaggaaaattttagttaacactttgcaatcaaatacttgttacaaagattggtttatcccgacacttggttttaatggtcgaataaatgattcaatgatgtaatactcagtgacctggcttccaaatcacgatattcacttctcaatcctgttcacactgacatggaagttttgataaaattcagctgatctgtctccatctgtcctgatgtcaatcagttcttgaaattcaaccaaaaaaattgtatttttatttttaagcaaatggatttaagactcattgaatctttatttggaagatttttaactgaatttaaacattcttttcctaaggtatatcactgtgcagatatgagagtgtttagagtgtttttgtcaagaaaatcacacaaaaagacatttctaattgcatgcttttcacagatgatatctccatagcatgttcttttaaatagatcatttctcacctcatctttattttattttgaaagcaaagtctcttttgctgtgcaaggtaacatatacacaggttcttggmattcagatgtgaatgtttgaggaaagccattattctccttaccacgcatagcctcctcacttttgttaatcactgtcactcaagggataacataaaagttattggtacaacacacacaaacaccaaaaagaaaaaataatttctagattttagggagacaatactggggtctaaaggataacagaactccttaggttaggatatcagcatttcccaaacaagcaaatgtgcaaaatttagcatccatcagtgttctggaagcaagggaccattggcgaatatacctctcctcaatttcaaggttacaggcagaaatgcaactgagactccttcatccaactgttgctagtgcagataacagctgctgccccctccacggcatagtggccaccagcacggaagwagcctggtcagtcttttcctagccttcccagcagacagatgtcctcctgcctctctctgcatggccagcctcctgccagcccagcacggcagcactgccttcagttctatttttaatttatagtgctgggaccatggatgttttagtagcatttcacacagcttagaacacattttgcattaggtctagaaaagcattgccaagaatacttattctcttacccccaaagccaccgcggtttcctccatcatccttagcctcacttacctggatgctgttgcacacggaccaccctatcctggttgtcagcctgcgtaaagaatctcctgaaagagattttcatgaaagggctttacagaaggcaacaagagcacagagaagttctgggtacactgcctttggcatgctcagaagcaggtccaatcctagcatgagcaaggaaattgatagaaccacaacagtttacccaaaccatcgtctgtttaaagagtggtatgaggtcttcaccccatgcctkcttctttatgtctgcagtgaaattcatacattcattttgaattagcaattgattgtcaaacatctgtttagtgttggattaagtagatattagagacctaacggagaaatccagcagtccagatcaacgaatatattgatctgtttatctcctggtttttatatcactagcagaattcttaatactactaataagcatctattaaattactacagtagacagagttaggtacacaccttctagattgacacagatttagccacaccaaaaaaaaggaagaaagaaacctataccagcaccaactcatcacccaggcactccacataaagcataaatggcccagtgaaaagcacaattccaggaagccccaggcactgaccctattcacgcctagcgtgagagtcaccccatgtctctgggtgcacttttgtgtttggcatcctgcccattgcagcacctcccacgggggggcctggagcctagtacccaagcctcagtgcccaccaacagacctcaggactgtgcactgtaactgagaaactctgaagacattcatggcttctgcattagtgagcttgggaatctcaygttggaggaaatgaattaagggtgtttattccaggtcctttggaagagcctggaatggggcttacttagggcctgccactttcatgatcttgatcattgaaccttgtttcttctggaagaccagccagagccctccatagatggaccgctgcatgaggctgttggacgaagcatatttggtcaggccgataggcttggggtcgggattctagcaagtggggccctgagattaatgacaaacacctgaggccaggcacaccctctgcagagttttgcatagctcagaactctctcttggaaggaggtttatgctctgtgctatacgggaaattttctctaaactgggaattgcagaggtcaggaaggtatctgaagcaactgaagaagttcaagctggaagaggatttccgaagtgtgactctttggagaggccattgtgtggatccaatgcctaaagtaccctttccattcctttgagctcaagctggaagcttccaggtttagcatgacaaaaccctacaaactggaagtgggttttcaaggtaacactagcagtttctgtttatagaaaccatcgaaatggaggttaaatgaacatttcaaaagaatttgtttgtaaagccttctaataaaaacatttaatggcaaaagatgggaccaaatagcctaaaggacatagccacaaactgttcaatgtraaaaacatgtgatttttttttctctcagctgaattgaaaactcattttaaaaattttacttcaactgtaaagaactattcgtttttacaataagactctcactttcctccagtaagactttcactttcagagagcgatggtaagggaggactttcccttcaggaacggaaaggagacactccctgctggggagcactggcttgacaggcttgccattgagaactaagctctgactttttatcttgcccaatttcctatctaaggggtctggggagtcatgccctacaaaccatacattctcatcacatgggttttctgtgaccctgtatatcatgacttactttccartctgagcataacgaggaagaaaatcaaaatgttttaccccaaaatatatttccttgctataccttgaaattgccctgcaaagtctcttgtgggaaaaatcaccttctatagagaatccccattttttccttcttcctttccagacccaggaaatcatcaactaagagacaggcacccttttaggtctaataagaaacattttacaacctgcgctctctctgaagtctgctatctgagagattcctctgcacagtacaacttggtctccacagtcctttaccttaacctcaacattccttttcattgatccmaggtcttcagataaactcaaaccaattgtcaaccacaaaatgtttaaatttacctatagcctgggagccccgccccctcctcctcactttgagttgtcccacctttctgaagcaaatcaatgtgtttcttaaatgtatttgattgatgtctcatgcctccctaaaatatataaacccaagctgtgccccaaccaccatggacacatgttcttggcaactcctgagggctatgtcacaggccatggtcactcatatttggctcagaataagtctcttcaaatattttacagagtttgactcttttcatcaacaccattgtcctttccttcccttctttggctgcatttaaaggcagcagtgatcacagstgccgcctggatgtcccagttgtccatctggatgtccaccaagatagcttcccagataacagccagacctttcaatccagccagggctggcctttcccattgggaactcagcagtgtaatttgtcagcaccccaaacacgcaccccaytcttgcaccaggctcacagacactgaggcatcgaaagcagaaagtagattatctatgaattgatgctgagcagtcccacctcatccatgtgtgactcycccctttgcaggtcagttaccttcatcatcgtgccccacaagtagaaataagatcaagtggagctttgggactccttgtcgtgacgaggtcacacctggacatggatgatggtcttgaacccaactggtctctcctggggcctttccttaggtcatcgctggagagacactggctcgtttccttctcctgctctttttccttgtatttcagctgctgcccggccacatctctatctctctgatattactctttaagatatctgttctgggtctatttatgttttgtttttttttaatttaattcttttttttttttttttttttttttttttgagacagaatctcgctctgtagcccaggctggagtgcagtggtgccatctcggctcactgcaagctctgcctcccgggttcacgccattctcctgcctcagcttcctgagtagctgggactacaggcgcctgtcacyatgcccggctaattttttgtatttttagtagagacagggtttcaccatgttagccaggatgstctcgatctcctgacctcgtgatcygcccgccttggcctcccaaagtgctgggattacaggcgtgagccactgcgcccagcccttatttaattcttaggaaaaaaaatctttaatcactttgtctaaattctatgagagataggaaccacctccgtataccaccgacatgttaaagaggccatttcctaggctgccaggaggaaaggaactagcatttatttgtgctcctgttacaccaggaccattttgtcacccaggctggagtgcagtggcgcgatctcggctcactgcaagctcagcctcccaggttcacaccattctcctgcctcagcctcctgagtagctgggactacaggcgcccgccaccacgcccggctaattttttatatttttagtagagatggggtttcaccgtgttagtcaggatggtctcgatctccggacctcatgatccgaccgcctcggcctcccaaagtgctgggtttacaggcgtgagccactgtgcttggccgggtggagttttctttatgggtctgatgatgatactgagattcccatacgtaaagtccaagattgcacagctgtgtataatgtctgcattgggacttcagcccccgttatctggttctaaatgctcagctctttcccacatggggcctcagtgccagtgctggcggtgcctacggctctgtgctcagttgatattgcccccctggcttcctgccttcctgctccatcctctcccactgtgggtcagggtcatggattctattccctagcagttggtcttccctccgtgtgcttgcgtttttccctggaacataactcttacaaaacagctaccaaggtagctggttaattactagtctcagcttcatgccccagttcctctgcatagactaaggactcctcagggatgggttgtgttctaggcacctgtttgtcctcagtagctagcgctgtcctggaacttgatgggatagtccaatgtatatcaagagatggatggatgaagaacggcaagactcatgctcgggtaaataaaagagcattcagagcatatgagcaaataaactgtctcacaagctgtcagaaggggagaggattactgcagctacttccaggcttttccactttcctgatgagggaaagtgcaagagtaaacaaataataggtgtctcggyggggatgacagacatgtcttgggaaggaaagcttcatgttctttcttcagttctgccttcaggcttcaatatgtagatgttttgcaaaggtcgcgtgttccactctcaaaccatcagaaagtttcaggctaaagagacctcagaacaggagagccagcattcttggtatctgttcatctggttccaaactccaaaagatatctacatttttttgagtaactgtttctcagtatttaagatgtgtgattcattgacttttcttcatacttttaacatgataatatccccttccaagctcataaaataacatgtcaagacttgttcaggagtgaaaaggccattctgtctgtcggaatgaatacattctacactgatgtgggtagcacaatgaggtaaccattgtatatgataacaattttgtgtatcatcttccactaactaaacttaactaaattttcattgcctttaagtaattaaatcaattaaaatgaaagtattccatagttggaaaggatattgaaagtgaaagcaatgcttatttaacctccctccctctattaagaagacgttctaagcgttgatggtgtagacatggggtctgctcactacgacagtatcagggatgcagaggtgatgccatggtgatctggtgtgacttctstagaacaaggacttcttctttgctgacagctacctgtctgtgccatttcaggtaaatgggctactctcctggagaataagacaggaaaaatgaattgtatgatccctctagatttcaacacaaacaactccagtgaaaaattagtgaggatgagaggaaatattttttctacaaagtatgtgcttcattatttaagttgtctgaaactatggtgggatggttaatgtgtcaatttgggtaggccatggtacccagatatttggtcaaagactagatgtttttgtgaaggttatttttaagatgagattaccatttaaatcagtaaactctgagtaaatcagattaccctctataatgcgggtgagcctcatccattcagctgaaggcctgaagagaaagactgaaatctccaaaggaagaaggaattctgcctccaggctaccttcagactgctcatctgccctgtggaatcttaacttgccagctcctgcagtcacatgagccactttctaaaagtaaatgttctctctctctctcaatagacagatagacagcaatggacacatcctattttttctgtttctctggagaactaactaatacacatgggtacttcagagatcactagaaatcagaagaataacatggagaatttaaaaacaataagcacacatttgaaaatactgatctagaaaacaagagtttttgttttttaatataaatatgtttatgtggggaaaaataattgatatgaacagaaagggtgtgtttttaatggtggagagaaaagagtatggcattacttgtcttatagctaagacatttgtcagacaaaggttttcttgtctttcatcttccagtcatctgagatcagcttggcatcagaagatgccagctgctctgaaattccaacccaaagatgtgaagtgtgatgaggatgtgatgttgctcaacaacttgttcagtctatactaattttggaatagcctgaaatccaccatagctccagtctttactaatttaagagtagcctggaatcyatgtctactccactattttcctgaaacataattctatattgaaatgtgcctggttctaactgcacccagtatgaggaggcacagcaggcagccatcctgggcctgatggtgggaagcagtgcaccttgtgaatattgtgggaatcacctgaactgctgacacttctaaaaaggaggaaatgaacaagaattagagggaatacactggtaggaacaaaaggaatcaagagtgtagatgagccaagtccaaattccaatacagtaaatagccaagtaaagcagaaggaatatctcttcccctctaaactaataaatacttacctgggtcgaagggtggtgagaagccagacaatctaggactgtccaggtgtgtgagtctaagcaggagttcccagatggacacggtaggtcagagggctgagtttgtacacaaagctcgggagaccattcattgggagaactgcaaatcaaatgatataggggaggatctgggtgcattgggatcacattgagagatgagaatccagatcccagaaaacttggtatccctggccaaggaatttacgttttaccattcagatgggtggttttcagtttacgtggcactggttagtgggtcatgaaatcaattccatgggttgcaatttgcatttttacagaatagaatagaaaatgtcagcgcatttcatgtaaaaaaggtaagtttttgtggggggaaccagttgctccagttacatctctctctatttattatcagtgtgtacgtgcacagggttttcttccagtccatcaatcctaatcacacaggtcaaaagccactgctgccggcaatggggaaccactgaagagtttaaagttgcaagcagcagggttagcttttgcatttagaaagatactgttgtttcagagacaggatagatgacacgggcagggttatgtagaggatggctttgggatactgtagctctgccacccccaggcaatgtgagcttaggtcatgttcctcaatggtttatgggcatagtcaccattcccaacatatgggctttctgtgtttcttatggcccagcacatggtgcctggctcagggtaaccactccagacagttaagttgtcaccaatgttattttttcatttacttaatattttgggttttaatgtatttattttcattcattgcccagtatatgaaaaacactgcataatcagcctaaaaataggccatatggactatgagacctgcaaacactacagggaggcgtggcactgagggcctttcagtggtgaaagatggtggtgcccctcccacttttcactctgcctctttctaaccagtttgattattctgtgtctacctagtttaagagactgtgatagcccgagccgatgggactgagcttatgtctcataataatatccattttctcaatattgattgagtaggtattgtgtgtaaaatatttgatcatttaaaaaatggttatatttatttttgtgacaaaatgtacatggactgaatggctttattcagcacatatactactatgctattatttaaccttataacagaaaacaaaaacttggtttatatactagaaatatatgctcaatggtacatggaatatgtgcacacatgcatgttataaaatagccatctccaacctttttgacaccagggacgggttttgtagaagacaatttttccacagatcaggggagaggatggttttgggatgaaactgttcaccctcagatcatcagtcattagattctcataaggagcacgcaacctagatccctcccgtgcacagtttactatagcgtccatgcttctgtgagaatctaatgctgccgctgatctgacagcagaggcggagctcaagcggtaatgctcactaacccaccactcacctcctgctctgcggcccagttcctaacaggccagccagtctttggcttgggggttggggacccctactctaaaatgaactccattgatcccatatctgctattccatatcccatgtgataacttttctaagattccgtctctgggtagtgctttatttcttcttgaggaaatcaatctttaatgtgattttaattattttagagacagatgttaggcaagagaggaattttgcaactagaaatgatcatgaccacttcagttcttcagctatgaacagcatgcctatgtgtattttaaatccagtcttgcatcttctttatttgtataacaagcattagaaaacattttgattgatctggttttcaatggaatcatattgttaaaattttgcttaagatatgtgtcataatgggaaaaaaagttaaggtatttcccaactttttcagctggttatttggggcatttcactactaattttggcaatttcccaaaggcaaaatgctacaaaacaaaattcagtaaaaaaacaaacatattcagtggtttttctacttaatgatcactcatagacaatgatgctcgagtgagcatgggatagtcaacagggaaacggaggaggatttatgtttagtattaattacacaactgagaaatagttctctccatcaaagagctgccttggaaacttcttattgttcactatgagtgtggtggagacatccgtgacagcatatgaatcaaactaattgtaactcttacttggtgatgaaaaaaaaatgacatgtgcgttcttctaaattaagtctttctcacacaaattactggttgccaccgtaaatcaagcaacatgtgttttgaattctgactgctagagaattagctaytgagtggggaaatgagatacttttgtttgcagctacactcaagtagactttttttttttggctttatctaaaaatacatgttgtagaagtattgactcaccagcttctacagcaagaaagatattcagagtgttagtccggccccttcattttcaggtgaggaaaatgatgccccggaaggttagggagtgacttggagtctcattcaaatgagtgggtgagcttggacttgaatttccattttctggttttggtgcagtgacttttgtgctctctgatggctgctatctcagtagcaagcagtcacctaaattcagacgtggccaggtccctgcataagcccatatactatcaggacacaaggaggtggtggggtgggatttgatccagactcttgactccaaagctaccacactctccttctcagctgagaactcagtgataacttaaaatttattattttctaaaagatctattgtatggcttttattgtaaagtacaacatgttaagtaagctgtgagtgtcaaattatggagataatagtaaaaatgcccttcggatgaaggatataaactttattgtccttaattcaattgtcagtgacatttttaatgtgtctgcaatgcctttaactttgaaacttttcaagggaactttctctatactgggagtcatcaaactaccacctgtgggtcaaatctggcctgccacctgtttttatgtggcctgagtactaagaatggtttttatattgttagatgatttttttttttaagagagagggtgttgctctatcacccaggctaggctagagggcagtggtgccatcatggcttactacagcctcgacctcctgggcttaaaggatcctcctgcctcagcctcccgagtagctgggattacaggtgtgagctaccacttctggytgatgttttaaaaactaaatatatgtatcttattacaagtgaaaattatatgaaattgtttatttttcacaaatcaagttttattggaacacagagccacactcattcatttgcacattggctatggctgcttacagtctacagtggcagagttgggtagtcatggcagagaggccatggtgctcaaggcctgaactattcacttgcagccctttacaggggtggtatgccagcccctgctctgctcygcctgaatggaggctccatgtcctgggatgtcatcccacagtgctgtgactctgcctctttcctctgaggctggagacactatagtatcccacaccacacagaggacatgcctccytggaagggtcaggagtactatatcatgtaattttattaaccaagttacttcatcacatgcttaagcaaaaccgaattttataaacttaacaatggttgggtgcagtggctcgtgcctataatcccagcactttgggaggccaaggcaggtggatcacttgagctcaggactacaagaccagcctgggcaacatggtgaaaccttgtctctccaaaaaaaaaaaaaaaaaaaaaaaaaaaaaawatatatatatatatatatatataaattagccaggtgttgtggaacatgcctgtggtcccagcatctcaggaagctgaggcatgagaatcacctgagctcggaggtggaggttgcaraaagctgagattaagccactgcactccagcctgggtaacagagtgagactccgtctcaaaacaaaacaaaacaaatcaaacaaacctacaatgtgcacgaaacctgatgtgatagcctgtgttaagccagcttctgcacctcagcactgtgggcattggagttgggtacttcatcgaggtagggtccaccctgtgccctgcaggatgcatagcagcatccctgccctctgcccactgggtccaagtagcctttctccaggctctgcccaacctccactcgtgtggggaatgaagttgtccctggttgcaaccactggtttagaatgcagccccgcaggaaagccaataggcaagaggtgggggacaggggaagctgagaccctgacaatacgtagtagccagaggcctcagagcrgggctgggaggcaagatcatgaagggcagcctccagggctgttgtatcctggaagctgtttccattctatttgaggcatgtctgtgaggccactggaatgtgttctgggattcctaccccccgataaacttacgttgtcagggcacctaagcactcttagttccttacacccatgtgtscagtgggagaaaatgatccactggaagatgaaggaggaggaaaggctgttccctgggtttagccgcccgctggcaggggcctcagagggtagggtccagtctcagcgtgtctgtcgtcagctgtccctagcttcggtgttggattgacccccactgctccctcctggcccccacggcatcactccttgcacttgtggtggtggtcgtggtgaggttgttttctgcttcatttgggagccagtaggagcatcgtatttccaggctcctggccttcacatcttaccccttttcccgctgtatgggaggctggcgattcagtggtttcggtgtggggtgggtgcagtttacgtacttagtgctctatctgctttgaggcgggcagagggaagtattggtgcggggagggcgcccacaggacagcagggctggctttctccctgtgtttggttacgcgccatttcgagtgtgctcaccccctggaggggagcagatctcttgccaaggaggacaaacttggggttccatccattcctcagcctggaaggcttcatttctaaccaagaraaactgttccattttattcattttttaaaacactttctgtgtttccaaccaagcaatgattttcatcatccttaggtctgaaattgaatatagctgttagccccactttgtgggtattcagaagaattctctgactttgtsagttctgagccactgcttggaggggtggggagggttaaaagtcaagcacacctccatcttatgcttagctctggaatcttctttctcctcttggccactgatttttgaagtttataatactgaaccatgaccttttttgtgtcgtggctgtagtgrtgaatttcctttgttgcattttagaaatttggtctattttggctgggcgcggtggctcacgcctgtaatcccagcactttgggaggccgaggcgggcggatcacgaggtcaggagatcgagaccatcctggctaacatggtgaaactccgtctctactaaaaatacaaaaaattagctgggcgtggtggcgggcacctgtagtctcagctactcgagaggctgaggcaggagaatggcgtgaacccgggaggcagcagagctygcagtgagccgagatagcgccactgcagtccggcctgggtgaaagagtgatactctgtctcaaaaaaaaaaaaaagaaagaaaaagaaatgttggtctattttgttaggtattgtayagggaagttctacccaatcgttttaatatgrcactaatatttggccacccrtattcatatctttatggttatcaaaaaatggaaccataattattgrtcattattaaataagtgaaataaacatctggaagtgcaaagaatgtgtaaataaaatgcattatttctgcctgcccttcccccaccaaatgatttggagggcaactgggatgaccaatgtaagtgaaagagttacagaataattaagtgacaaggggcactactgactatgtgccatcctaattcagagaaaagaaggatgcatgtaggcttgaacttgtcaaaagagactttgcgcccgtcgaggctaacatatgaaggttttctgcaaaccaggcrctgttccattgtggatattaattcctttaaccctgcgatcccctaccactgtggggcaagagcagattttaaaggagaagtagtaacaaaaccaaacaaaatatatcaggagagactgtgcagggaagaatcagcagccacaactctctagaatgttaatgaaatggtgggcaggtgtgtaggtaggactggatccaattatgaacttcgtgggcatgtttaggcttgaagttcttttagcagtagtagaggactccaatgagtttactaggtaattgatatcgttggtattatgttgatgatattagcaagttaagactagcgagtgtatagttttcccgataaagaacayttagctacaggagaacatttgtgaattcaagtatttattatatgatgtttttgaaataatcactttgaaagttaataaatacttctgttttacttttcagatgtgttactttaaaacaagatactctattctgtagctttgcagtattgggtaaatgatgagtgaggatcagacatttgatgtgagtttcagttttgaatccaagttgcataaaaagcctgagattcatctactgaattgagagttttgaacatttaaggatcttctgctctgtcataattgcttatatcatatgcaaagaacatcttgctacgggtagtggtatggtgtgcttttatcagctagcaaaaaagtatttaagtaaaatcactaaatagatagtcactaaatagagaacagaacagtcccagatatttcaatggatcactaaaggatgaatcatgaaacatacctaaatgtcatttcattaatttccttctttctttgttcaaaattgtttattaaatcttctcaaacctgtctaatttttgtttactttaattttcttgacaaaacatcaacatgaattaaaaaaaaaaactttctgagataattcatatggatttacgtctacaacagtcttaaaataaactgaaagtgagtcactgcatttgtagacagctgcttcatttccattgtctgtcttgtttgttttaaggcatttctaagaattatttgccaaatgttaatttgaggtagaagccacagtgtgagctgagtgataataatttgcgtattcaccctatgtcctcctagaaggaccaatccttctgtgtcttatcctgtggagtttcagtccagccttggccatacgtttggacaagaatgaacagaagagaaatatattgaatatagaactggacacaaggtgaattcacagaaattcaaactggaatttaggtagctgaaactggacttgaagttggagtttctgtattgcctgctctcagggccccttatggagaggacctgagcccccagattcactgtagaaattctttaacccagccgggtgcggtggctcacacctgtaatccctgcgctttgggaggccraggcaggcggatcacctgaggtcaggagttcgagaccagactggccaacatggtgaaacctcatctctactaaaaatacaaaaagttagcaggacttggtggcacgggcctgtaatctcagctactcgggaggctgaggcaggagaatcgcttgaacgcaggaggtggaggttgcagtgagccgagatcacgccactgcactccagcctgagcaacaaaagagaaactccatctagaaaaaacaaaaacaaacaaacaaaaaaaaagaaattacttaacccttggttccaccaagcctttggaaccattaatgtgggaggagcctgtcatccaagctgtggcagatggaaaacatgaacggttcctctccacgattgaatctgggagggcttgggacttacgttgactaacaggaaatagggtagtgactgtgaattctggagtcctggccttataagttcttgaagatcctctctcatttcctgggactgctgccctgagaacaccattagggaagccagtccaacctggcagagaatgagtctccacatggagaagacccaaagtcccagcccatggccagcagcaatggccagaaagacatgtcactggggccagcttgtagggtcagcccaccttccagccgagcacaatcatgggattgttgacagcaaaaccaggaggacccagtacctagccacccagcccactgaatcaggagaagaaaatccatcattgttgttccaaaccactagttttggggtgatttgttttgcagcaatagatgattgaaatattaatgcttcctaaaccaagccaggcttgagctyaagtcagcgtgggtgcatagctggtgagaataacacattattttccttagaaatctctgcataagatttaatattttaccagactcagctttatacatgtcaatttagtactcttaagcatctgtttactgtttgataaatatttttgttggcatgacaaagttgagaattcctgagtttgtttatgctaatgtacttattcaaattaatcaataaatattttttaatgtaatatagcattttctcattagccatgacttccatttccatgctgatcttgatttctgcttcctggcagaaaacttgscttcttttcactttggcagggctgcagtttataagttattcattccctttttggctcttccacactcaattctgggccacatgtcttctgtcatggcgtgtagctggagtcagccacaggagtagcgttcaacgatgtgattaacatgagcgcttggacttgtacctacagaataacagaaaggagaatgttgcttcatcagccctagaaagatcagatatcagaagacctttgagaaacacattggaaagaattaaagtactcttccttctctgcagttcccctggaaatctatgcatgcatatcaataatgcatattgtgataaaattgaaagagagagatgtacacacacacataatatacataacatatacmtatatatttatatacatcttccaatcagttcttctaatggagaagacacataggtgttcaacagtaaccaaaaatagaattcaaagtgtatttacttttctgctgtcaccctcaaggatgtcttaccatttcctcctgacaccttgttgaatgggagacacctagaactgaaagagacagcagtaatatacctcatcatttctcaggcgaaaggtcaagaggttatgtaatttacccattgtccacttaaagagtgacagagctgaggccagaatgttctcctggcttctgtcattgaaaaatcagattatttartgagttcctcagtgaaatcttattcaaagtgtaatgaggcattcggtcacacaatcatgcattcactcctgtatccatccaacaaatgtttattgtttgtcttcctatgccaggcartggcctctgtgttctgtactgggaacaaaatattgaagaaggcacagtctgggctcactaacacctacgcttgaagcaaacaggtgactttggcagagttcaggagccattagcaaagtgaatgttgacagctaacacagcacacagcacctagcctagctgtgggtggggagggcatccttagggaggaggtggttgaaagtttgkctggagaattggtggggatagccttagcaaaggactgggtggaaatgacgtgatggaaccagccatccaggtcccgggggagcgtgctccagtgcgggtctgaggttgcagggtcaaagaaaggaggaggaagaaataaagaaggtgggatgcctggggtatatcatatcttgtaatatactgaagggctttggccttgtccaacgtgttagaagacttcagagctggagctgagcttatttgactgcttcccattttagaaagacccccactgcagaagagaaggtgagggaaaaggaggacaggaggaragaagccagttaggaggtgattctctaggtgacagaggttgctgagaactgggcagagcagtaggttgaggaaggggcaggttctgaagtgtgaatggcaggagcctgcttcactggatgtggactggtaagaaggaaagaacagtcaggtatgaaagcaggtttctgcatgggcagctgggcacatgggcagatattgactacgctaagattataaacggagggacagcttttggagggaaggtgacagtttccatttgcaaacagctgcatttgagttctctgcatgtgacagagaccaatggattgtctcccagtacttgttctcttcttcttcctctgttgtaagatgatctctgtggctgggtacgtctcacccagaatagagatatgtcactgcatcccttagtgctcggtatagccaatggcatgtgagaagtgatggtgtacatcctagtgatgtcctggagaggtgccattctggaatgacaggggcaagacaacagtgaaagtgatgggccacagagtccaaggtggagaggaacagaggtaaatgaaggggaagagtataggggaaattagttaggttaaaagtccagaggagaagtcttatatttagaggaatgtttctcaaccagagggagactgttaccccccaggaaacagttgtcaatgtttgtgagcagtctggattgtcataaaaggggttgggggtcttgctgacctctggtgggtaaagggtactaaagtctagtctatgtctcagtctaytggacagaygctgctaaatatcctgcagtttgcacgtcagccccccacagcaaagagccatgtcgctcaaaatgctgatagcgctgagggtgagaaaccatggtttagagtataggcagatgtggtaaatgtgtgcagtgaacttgcaagtcattaaggaatggcaagggctgtggtaagctgtacagtgcatgacctatctgaaggggttcaaattctttaaacatgtacacataactatgcactctgcaagctaatcagagtacatctgactgaccaggctcagtccacaggctgccagttgccttcctctggacttaaagttttggctagtcttaagaacttactcagattcaataagcgagtgagaaaacacacccaatcaagatttctcaatgcattacatatataaagtaaacttgagttttcatcctatgtaacttgcaaggaaatgcattacatgattgatttcttaaattctgtaagctctaagccatggtttatttttgtcaggtagtgggacacatgacagcctgtttttagctaatatttgatgtgatttcctccaaagacaaagctattggtgaagcttagaaggaggagtccctgaaagaaaatctgcattctaattactaaaatgcattttctaaagacaaagagaaagcttaaaaaataccatgtgccagcaacataggtacagaaataggatatgtatgtgtagaaaattgatagccaagcaagctacagcagaagaacacctttatttttgagtttgagctgcagtcattgagttacatttaataaaattccaggatcatgacaggctttccgctttctgatgtgatgacttccctgcagttgccttttgcatctttaatccttatctgaagaagctcaggacattgtttcatgagcagagtgagaattagaacagttctgcagcctttctttcttcacttattattctttcctgaaaagttgttatgcagaaatgatgggtacatctcttggtatcaactacatcagtgcccacagggacaattagtgtttgaagacaggcacaatatttaaaggctgttatctcctgggttgtatctttggaggcttttctgtgggagctggcatggagcacttaatttatcagaacaaatatgcagagrtgtggacatctgcctcagtgcgagagtgtcctaggctcaccttcccaagcattcacagcagaaaatgtatgtgaccgcttcaggattcagtcatgtgttcaagagagaaatgcagtgcagttttttcyrgaaatctccccagttgacaatattttcaaaggaagccttctgatattggctacaattttgctctgggcaccaactctcacccaggggtgcttccagcctggattgggcttggcttggtggggagagattgggagtttgccgacagtgtgggatacttgtggtactcgccccaagagcagttttgctttggggttcaaatctctgacttcaaaaccatttaaaaaaaggggggccattgtccccactgaaataaaagaaaatcagtcatgccctaagacacttcactatggaacgattgctctcctgtccccagctggagctacattatttattcttgcacctatttatgtattgtccctttttcctgggtaaagtttagcaaactgcttaagagcaattaaccactaactactttcctcccactggttctaatcccaactcctccacctccttactttggattgtttagcaagccatgcaacctatttggtctccaatttcttcttcatagaaatgggagaaataataatatctacaacattaagtgctgagagaattaagcaagacaatacttagaaattgtttagacctggaactgatatatgggaagtggttgataaatatttgttgagtggaagaaagaatattgaattaagagcacactgtctgcatgcaagtagagcagttctaaaatcgcctgggaataataggagagggtgcatttccgtgcaaaagaagagacccgttttttyagtcaacaaccttgaatgctgcaaacatgagtttatagaccccctttaaggtgaaagttagcagagctatttcagggtctggtctcccctcccatggctttgcccccttctgttgctcattctcaccccttcaagcttctcttatactcatgatggttttataaattcgagcgtctaagcttggcagcacagcctactccaaaagagaaccatgaatgtgggaggagcctgtcatccaagctctgtttctcttcaagactgaatctgggaggggctgattctcaaggatgaagggaagtgagcccacagtttcagcatcatcagggagggagctggagtctgtgcccctctggacagatcatagtgttccttttcttatgcttttcagaggagcctcattgcctccctgagtttaggatggtaatgctatgctgccagcattcttaaggatgggaaccggactggctgattaatcccyattacttttgcatccaatgagaattaaaactttggagaatatagacaacaataatttgcatgtaggataacatctgccacgaagtagaatgagtgaattatcatgactccagcttctagttagagaaaatcttttagagacatgacctctggyttttattttggaggaagaaatgcacattagtacaaagttgtccctgtactcrgtgggatcattcctgctctgtgtaattctgacaccactgaaacgaccacattctcagcctttttttccatggactgcaaggcagacaagtgggggttaccagtgtgggcttcaaagtcatgaggtccctgccctgaagactcctcayaggtggaatggccttgccaaggctcaacctcctcttactctacgtgagggagaagaatcagcacttcacagaggggctttccagagcttttaccctgaagctgcagcttgtgggcacaccacgtgagtgaatgagtgacctctccccacgtcagagcagctgagaaaatcctaagcattcagggacggaggacataggttggtgtgcacatacttgcatgaatttgcatctgtcgcaatagctagggtaagcggtgataaaaatggctcccaaatcaaagtgsctgaacaatagtggtttctcacttgtatttgtccactgtagggggactgccactttgcaccatgaatgggacccaggctcaaagtcactatctgtgacactgctggtcccaaagaggagggaaaggaaagcatgatgaggcccacagtggctcttaaggcttttgttagaaggagcacatatcactgctgcttacatgtcactggtcctaccaaggtacattgcctcccaggggggcatrggagggagagtcaacacatttcagaacgatagtccagtccattgcaagtgtagcatgtacataactgcatcatgtatctgtcatctgtagcatagagttgctctgaggggttgcatttgaacataaaaaaatattctgttttgctccttgggacctttcatcaaatcgataccaatgtgctaccactttttccttcttmttcttatctccttctgtcaatgatattatcagcatctccactttgtcctcctcctcagaagaaatccaaaggctggcgccaccacctggctggccttctgtaccttatgttgagggtttttggccagtgcccaggagcatggtctgtcttcacccattctctccccagcgtgcctctactggcattgcccctgtcagactggatggcattgcttacctatgcatggatactctttgagaggcaagtcaaatcagacttgrctcccctgtggagcattttgctttttcactttatggtgtgtgagtgtggcggtcatgtttgcaggatgasattcccctttgggtgattttctcacactggtgctgatctatgcttgctcaggctttgcaggtgcaccagcctgcagggctgacttgggtgctggtgtgccacaaggtgccctgtgcctattccagggagcacagctgcagctctcatctgatgacctccatagactcttatccaaggattgaatatttttccaccttttgagtgattctcatttccctagaggctctattttagagaattgaattgactgttgatgataaacagttccggtttagaaataccaatttactgtcatcagtgactgaaggcatactttataatttgacttgattagcactttcttctctaactgctaactgaagagtcatcrcatgtgagtgataatttcattctttccagcatcttttaacaatgtactctctaaaaatgttctggtcatctccttgaacctgcaaatccagatggatggaaagagctggctgtgaagctggaagacgagttccatccagtctcaactcacaggtgacgaccacctggcttcactcccttggagccacatctatgtctgttgtgcctttttttttttttttttgtcaaaacatgtttaaatctaaatgatattatatgtgaccagggtttgttaagtgagaaaataagatatgcatgcaaggaaagcacttgctgtcttataaaagggtcacctgwtttgctgaagtgcctagtgactttaatatgcacaaaacattccagtttcctaggctgtgaaagragcaggctgactttccctctgcacacagatatgaaaacactggcctttaaagtcgctcctcagtaatctcagcccttcttcatcctcctcccacaagtcagagacactgcaaggaacatacgacccagactcagcctcctccctgggtgctagttctggatcccacttggagtctccttgccctcaggccatctggacttgcagtcttcgccaccgtgtgggaatttgatcccttgggttctttcctctgcgtggtgctagtggttgggcacttgggtgcagcaggatgtagtcatctctaggacggtggaaagtaagttctmgaaagggcctcccatggttctttgaagagctgtgctcttacatggacatggaggccttcaactccttagcccaacagacctattgtccagatgaccaagctgggcaccaaaggctgaccgatttggttgaggtggcagagaaagggtggaatcccatcttctcctacttcagagccatttctactgcgatgccttctattctccatcccatgtgaatatgatgaccaattttttttgtaaaagtcagagaaagataaagcaagatctttcaaatagtaagagtaagagttttaactgattgatatgaagcaaaaattctactgagggacctaagaaaaagctgaattttgtaatgggaaacagcaacagtagcmgttgttgggagaacagggtgatgaaggctgaggctggaggaggactgttattgtctgagacttggagacgtggagcctgctgcaaaggaagatgcgtgataggagctgggggaggtgcagcataggcaacattttgtgttgatggacaactagctttttaatactggaggacgttatgaaatgatttctgtttcctaagtacatgggtgaaggagccacaggtggcccaawggctgcttagggatctggtgtttgtccactctgttagctactttcttttagaaggagaaaaacttacaacatcctttctgtttatcccattgatttagcatcctgatgtaattgaaattgcctttaaaataagaattacaaaagaaaaacttaaagattcatatgaaaggagtgtttcattgttatcctcccgtttggaaagtaaaggagctttaagtatctattacatgcatggtttattgaaggaacagggtatagtatgtatttctatatcttagcttaaaatttaagtacaagtcttctttgcttcaattggattttcctaccaatcgaaatagtctaaaaaaagacataaaatgtagctacaatgtctgccttgcttcattagtttagaaacacttcagagctcagattgttctgaactttgatcactagtacattgaaatttactaaattaactctgtatctcttatatcagacataatttaaaagaacaagttctaagaaaaatgtattgctaatgaataataattggaggtttaacaaagggatgtgttaaatggaacccccaaatcaagggcaagttattaatcagataacctttgaatatgccaaaattagacagattctcagtagttgcatgagctttactagaaagagaaagaagtaataaccagtgtgcatccatcagtttaatgacaacttaatttttcaaaagtatccttaaggaatttctccaacaaacttgggaaaataatgtagctaagttatacccagtatattaagcacttaagtgtgtgtgttgctttcagataatttggcagggcacacagctacatttgcaaaatgctaaaatattaatggaaktattaacattgtcagattttacaaattgggctgaaatttatcatgkatgccataatagtgggcttttccttcagatcagaacattttaaatttaaaagaaggagtcttgcttcaccacttttgagctcaggctttttttggaaactcattcaattgcccagcactgtgatcacctagagggcatatgcacactcaaagcatggaccctgagctgtcaccaggtgcagtgctatctaccatccaccagtggtgccagtgttgaatgatgggggaaggcttgagttcttttattaggctgggtggcagttaccaacgtcttcatttcagcttaaattcacatggattctttagcagttccaacaaaagaaaaaattcttgttttgtacaacatatgaagtttactttctatattttttaaaccacctattaaaagtcagtcatccttctacatttgggtctaaaataaagattttaacttacatttggttgttaaatgaggctctgagtgtggaaaaggattactatatttgattctctttttttgatcctagaatctgtatctttcaggaaggaccggctctgtgtgatttggggtttagcataatcttattacagaatataggaggaggagagacaatgcttggaaaagtctgttaggtttaccacaagcagatcctaagacaagggtctggttacagtaatttagttgggaagtggttctctttagcagggtgagggcgtgggaccatgaggtccgctccctccaaagagggaagttagctcatgaaaggggctgatggtggaagcagggctcaatcttgcctgggactctctgagcaatgtgccgaccgatttctcactgagggatgttgttgcaaaagctggagtatttattcatcagctacctcttcattagcggacacacaggaaagcatacattcaggaaggaacaatctacagtgacccccaagcaaggaagaagggaatatgagtaggatattgacagcctcagctataagaagcatagctagaaactcatgtaaacactgggaaagttgactgattgttttaaattcaatggaagatggtattgaatccacctacacacaggttatcatcataagctctgctaatggagagttatgtacactgagcacctgtggcttggtgcatttcatcttgtctcagcctttgactcatcacccatcagaaagagtacaaaatgggttttaatctaatcaagccaatcttaagacatctctgtagatgaacagatgctactgggatttctaaatagcctagatccagacccgtaattatttatagtctacctgttaatattccttatcactgctttagaagttaacatttgttttcaacatgtacttgctttgattatgacagattcaatgggaaacctcaaagccacatgcctcccttctcccatcagggactcctctgttcatgtctgaggatatgaccagagagatctcctgattatttttgttgtttttttttttttgagacagagtctcactctgttgcccaggctggaatgcagtagcacagtctcggctcactgcaacctctgcctcccagattcaagtgattctcctgcctcagcctcccaagtagctgggactacaggcgcctgccaccatgcccagctaatttttttttatttttagtagagatggggtttcaccatgttggccaggctggtctcaaactcccgacctcaggtgatctgcccgcatcagcctcccaaagtgctgggactacaggtatcagctaccgtgcctgaccaggtctttgatgtttgtggatggaaatttcacactttcctcaccagctttcctctattggtatgaatagactttggatattacatactttgtatgtaatattttggcctcacacccaattattccatctattaatcaataaacagaaagaataggaagtgaccacccacagggtgcctcactgtagtgtacgctcaggacctgcagaaatggaattcagtggaggcagtactagcagaactcaatccctaaacttacagggcaacttctatctgctaaacacttccatgggcacatcacgagtttgattacctttagagtttcccaaaggtctaaccatttcatgagtcacagaggccaaagcatagagaaattgaagacaagtggcaagtttatgcgttttggggattagtagccaaatgtgggtagatgatggagtagttctttatatmaagatgatgaaagctagcaatagaagcacattaacttagaacaaaccccctggttttttcaagtgggttctgagacgagagcgggatcaggccatgccctttcaaaagcgctaatggtaaatcaaagaagaatgygacagggtctctggtatcatatcattcataaccaagacttcaacacacagtgcacttgctgtcagacgagactagatggacaggctggtgtttggaggaagcttaatgcctgactcttgggaaacaaaagggcaactgaagcagagcagtctctgcagccttctttaatttaccattagtgcttttcaaagggcatggcatttattgctcaaagattgatactttctgaataaatgaataagcgaatgaatgaatgaacaaatgatcaatgctcagttatgccagtacatggagaaactagcttctatacactgagcttcccctatgagcacatactgtgttttctgttgcctttgcccttgtctttccatggagggatgagcggggagaaaggatcatcagaatgtactcctaacccaccctcagctctctcagcagaagtttccaacagccaccaaagcgatgtgcactaggagtaracaaagagatagacacctgaccctgtgaacctggaagcaaatccgagcttcccctcctcccctaatccctcatcagcttgccaaaaaaagaaaaagagaaagacagacaatgtgatagataaagatgtgatagataaagtgtttcattgaacaaatatttgtttatcaacattgaatatcagttgctaaactctacaatagctaaagaatatgatgctttctaaaatggattaacattaaaattctccaggatggatatatgtcctgaagattacccttctgttagacttttcctccaaaaactattgtgtattttcattgaggagaatgagaaaatgccactctaactagaataagtttatgttaaaatgagtacaatattgtttactaatatttattgtttcctggacttactgaatataaagaccaaaagtactcaaaaagctcatatgttrtcatttccttgtgttccacctgtagtttcttatggatgacattttacagaagctaacatttctgactccatttttataatagcttagaatttctraagaggattaggtgcttatagaggaaacgaaatctttggaagtatatatcttatttaagaaatgtggaataggtggaatatcagctgtctttcttaagtgcaataaagctagtattttagctcagaaatgaacatgcaggcaaaaatgagtgttctctatcttagactgaccagtgatttctgaaattttaatattgtttctgctttgctactttaaaatcaaaatagatttaaaaatctttggggaaataactttgcatccctttattcttcatactgaagaacacacacttagaatgcaataaataataaataatataatgatacagtccgaccttagaaaatctctttttattcccaatatatatttctagaatctgtattttagcttccaggaaagaattcccaaaytggccttcctacaaatcagtgaggatctccaatgttatttggtcatyccccgaggtgtctgagagacatttgttcctccttccccaccttgtccaggagcggcttctgctctccctgctgccggcccacatcgccatggagatgaaagcggagatcatccagagrctgcagggccccaaggcgggccagatggagaacacaaataacttccacaacctgtatgtgaagcggcatacaaacgtgaggtacgacgctatgcttgctccttggctggtctgggagtctgcctgactggagacattttgcctgggatctcacacctcatatcaccatctctcctttgtgacagtggatcctttgcaggggaaataatcacacagattctgccatcccactcacctgttcctgcctctcagggccttcacattaagatgagaaaataggatgctgtttgctgtgttggattgagttgtccttcatagccctggcttctgtagccaagcgtccatcacagaaaggagtgaaggggacagcagggtcttcattctggaaaccccgtggtcagattgcagtaagattggagggagagtctgtgggatctccaggcacaagactgagtcctccaaatagactttgcaggagcagggcctctgtgaagacaacacatcccagggaagctgggtgttcctctctccatcagcacgatgagtttctcaggtctggaagaccagtgaccaaagtcacagaacactgatgtgcaccttagctaatttaccgtgaaagttactgcttttctgagactggtatactcatatctacttcccaggagtcgttctgggaattacagtgcctagaaaactaacatgttatcatcatgggattatagtagggaaagagattggtgtggggcttctgtctcccatgagctctagagagaaattatgaggaggcctcacttcaggctggagaggattgtccctcccatttctctcctgsccctgtctccgagccacagcagagcgaggcccacccagaccgtctcgatttctgtgcccctcccattcccagtaccacgtcttttgggggtttgttctttcatccactcagtatgttaatacactgctttgcattctagctgggtgtakttgtccattcttgcactgctataaaaaactaactgagactgggtaatttataaagaaaagaggtttaattgactcacagttctgcaggccttacaggaagcatgactggggaggcctcaggaaacttataatcacggcagaaggtgaaggggaagcaggcacgttttacatgtccagagaaggagaaagagagggaaggggaaggtgtcacacacttttaaacagaccttgtgagagctcactcactatsacaagaacagcaagggagaaatctacccctctggcccaatcgcctcccaggcccctcctccaacactggggattacaattcgacatgagatttgggtggggacacaaatccaaaccatatcactgagttatcgccataagtaacctgtgcatgaatctgacctcatctgttatgttttgatggtcttcgtttagtcattagagtttttagaagagccaggctgcttcaggtctacgttttttgaagcttattaaagagaaacaaatttaaccgttacttaaagacattgctgggacaaatctcatttgacaccagattttagattagctatataatacccaagcatacacagatgtcagtgtgatataggaaactcatatcaggaaggaggtaacagaaacacatttgtgtatgaatggcaactaaggaagcacgactggatggatacatgatagtaaaaactaaatacatttaaagaaagttcacacatgttaaggagtaaaattatttaaaatactggcttgccttcaggtttgtgagmgttttgcctatacaattatagaagaaacatttacttatctaagtgtattatgctattaatggctctttctagccttaaatgtctgaaattcagcaatgcccctcccatcttgggaaatatttttaagtcactttttgaccactcacgtgtacctgaccccttggccttgtcctcccacttaaagaattttcccatccctttgtctcatgacattgcattccctcagttttcttytgacaatctgttttgttcttttcttttccataaatcaagtctctcccgtaaatgagagtatgttgggggctctctcttacctcctctcggtttctctccagtcgtcttctgggactttaattcccacctaaatgatgctcatacacaggcctcaaccatagctttccatactcatctacttaacatgcatctaagacaccaccatcaagcacagcacaaccaaagttggactactcctcttcctctacacacttgttttgatttgcacaaacctwgatttctgaactctgttgctcagccagaaacaggatcttcattttcaatgcttccctctcccacacaatgccccccacaacatcaaattagtgacaaatctagttcattcttcttcctatctcccatgtctgtccacttctatttcagcacattgtaraccttcagttgggctctccagggttccaaggatatagttctaactgacctgcctgcgtccaggttgccacagcaggagtgatctttctaaagtggcaatatggtcaggctctaggtggggttttctccctctatggtcccataagtgcactgtactttctctaccgtaatgctttgcagctttgtaccttgcatcacaattgcctgctgttttttgtttttttttttttttttttttttgagacggagtctcactctgtcacccaggctggagtgcaatggtgcaatctcggctcactgcaacctccgcctgccgggttcaagcaattctcctgcctcagccttacaagtagctgggattacaggcacctgccactgtgcccagttaagtttttttgtaatttttagtagagatgggggttcgccatgttggccaggctggtttcgaactcctggcctcaggtgatccacccgctttggcctcccaaagtgctgggattacaggcgtgagccaccacgcccggccatctgcttactttttaaatccctttgctgtaacataacctctggaccagcttaagctatctacaggcagcctatctcagagctgctttgttcactgtaagctttgagcacaagaagcactgtggatgacgtgagcaagaaggaagtggagtcaactgcccatccacacatgctacctcccaatactgctttgaatcagggactctttctctgagcgagcatcgttcatccttcctcttgcacaatggctcagcacctgtgatccctgccactataagtcagcgtggaagaaaagaartagggatgatttctaggggatcatctgaacagagtggagggtaaagctgtcccaggaaccctgattttcctgtaaccatcagaggattcccacagatcgtgtccctcagcagaggagcaagtatttcctcaaaggtgcagccacacatcctgggcttagcagaaggagcagagtatggccaacagcagagtcctgccctgctctggctgagaccctgctgactggtgcccctttttgtacttttttttactgttgtaaaatatgcataacataacatttacaattgcaatcaattttaagtgcacagttcagttggatcacggacacttacaytgttctacaaccatcaatattatccatctccagaactttttcttcatcccaaactaaagctccgaacccattaaacaacaactccacaactccccctcccccaagtcccaggaaaccgccattctagtttctgtccctatggtttgactatactgtgtgcctcatatatgtagaatcatacagtatttgctctttgtacctggcttattttacttagcataaggttttcgggagtttcagcacatgtcagaatttcatttcttttaaaggctgcctgatattccattgtatggatagaccacattttgtttattcatccatctgtcaatggacattcggtttgcttccatcttttggctgttgtgaatactacagctatgaacattcatgtacaaatatctattcaagttcctgatttcagatctttggatatatacccagaagttgcactgctgaatcatatggtattttgtttaatttttttgaggaccgaacatattgtttttcagagtggctgcatcattttaccttcccaccagcaacacatgtgtactcctccaggttctcatccacaaccattatttgtatgctttataagagccatcctaatgactgtgaaatagtagttgttttgttccatgggacatcttaaggcatacatattcactttgtgaatctcaaaccatctgcagaaatttaggcttcttcataagaccttgatacaaatcagaaacatgttattgtgtaggaaaagttgcagtgcgcacacaggtgctgtgttttcctattttaaacacataaaaagctctgaggaatctcacactcgccttccctagtgtgtacatcccatgaagggagctgctctgtcatttccgaagagtgaccttcctggcctcctcactgtccaatctgcccctactcttctctgtcataacactgtctcgttttcctctgtagccctttttatgatttgtaactggacatttgttgatgttcacatttgttcaatacatcctcccagctaaattctgaacgtcaggaagatattccatgtctgcttcatcctggcagataggaaggactccagaatcatttaagtaatcttttataaaaagaggattatttttccagtttcttctttgactcagtacaaacagaatttttttaaattattttgctgcttcactccccatcttaactacaaaagtttaacctcaaaaaatgtttaacaagttcaaaaaaatgtttatatattcttaatctgagaaaatgacctcttactcatgaaaatataaagtataagcaaaattacatgattttaatggaaaaattattattactttcttaaaaaatgtataaactggaaaactctgtctcctaacctcctttcttcccacagcatcttatacgctgacatcgttggctttacccggctggcaagtgactgctccccgggagaactagtccacatgctgaatgagctctttggaaagtttgatcaaattgcaaaggtgagtattatggattcttttcttctctgaagatttctaaactcttggttttgtttttcttcatccacctatcaatagtttactttttcataaaagcatcctttaggaacattgtttgtagaagttgttggatttctttgctattgatctttcataagcctcaaacctgtctcagggatgaaaaaacgccatggcatatcattatcacgtttttatctattttaaaacttccccctatgtataattcagcacacatataataaatacattccaggcagtgagattccatttgcaaatctctctgcatggtattattttaaggtgctcttttaggcatttccatgtcaaggatctggtaggatcatttccactcctctagttgccaacatcctctattcctattgttaagcaggaccctggaagagttcctgaaatagaatgcatatcttccatgcaaagccttcacttactcttgtctcattttaatcctttgattcttgtgccacttaaacagaaatggaagtttagtgtcttccattcatatgctctttcatgggaaatttcacagataggaaatgacctgaaaccgtctgaaaccacactagaccctattatttattagaactgccacagttgctggtgggtggcaatatcgatgacaaaaagtttcttcctgcaagccctgtacttctcattaaatgtttctggtcaattctctctttgaattgttcccagcaacaacaaaaatgcttcattatgcctactaatatcagttatttagctatggaagaataggtcctaaatttagttcactgtgtgatttagatcacttttaaacaagacagaacattccagctgagtctcttaggaataaatctggcttgcagatgttagcatgatcattcttgggccaaactccccaaggtttttgccttctgtagttccaccgaccatgacaactctcactggagattgtaaaaaatcagtaaaagcacagctctgcttccttcctttaccaagccaaaggaagggggtgagttttgtgggtgttcatttataagaaaagaaaggtttgaaacttaaatgatgccttaaaagtttgaattaataaaaggtcatttttgttggactacctgttcatgttaggaagaaacgtttcagtcttggctgggaacagcataactccaatgttcagatgacattctctcctctacgtgcctgtctcggtgaacaaatttccccttcttagaggwtaagggcccacccaattccagttctacctcctcttaactaattaaatctgcaggmgcgctattgccaaataggttcacattcacaggtatcaggactractttaatatgtgaatttggaaggacacaattcattacccataacagaagtactcaaygtgacttcctctaatcagtggaacaaaggagtatacaccctcggctgactatccagccattggtttatccatcattggtcagaggggcagtgtgccttcgatatgagttcatggctcacagttcaataacggggggttattgtcagcaaacagataccccagtgcactgagtactatgtaaagcacataaccttacactaaggaactcaaaaccattgccattcactgtaactgtcatgttttctagtctcagaatagctgtttrggaagtatgggagggaagcttgatttatagaaacaaatataggatcaacaagtatgaatgcagttaatctaaatattaaaatataaatacaaaatttagcccagaaaaataatgaggtagtcaaattttacattaaaacagttgagcctaagatgagaattaagttttaaattacttggcagtattgaatggcagcttattaggtgtggtaatgtctatcagaagtgacatatctgcaggtaagaatcagctttggatttaaaataaataaaagaaaccataagcacagtagggaaggacttgagattctaatttatactgagtgctggtcatcattttctactctgaaagactcagctgggcatagaatgttttatttcacccttaatgtttggagctgctcagactaaagagattggccccatcaccatccttctctgcttctatgaagtgtaaatcattccagaacattctcccttctttctcattttttccccttttctttctttattcctctttggaaatcggcatgtaggggagggcagctcattctggttgagtaatgaagggaagcccaactggttctcattgctctctccagatgcccctggaatggtgtgagcagagctggcgcttgatgatattacatgaatctagatcattctgcaagtgcttaatgcaactgaaattctgtaatttattcttccaggagaatgaatgcatgagaattaaaattttaggagactgctactactgtgtatctggactccctatatctctccctaaccatgccaagaactgtgtgaaaatggggctggacatgtgtgaagccataaagtaagtggactgcttagtaagcattttgttatatgctttaagttctggggtacatgtgcacaaygtgcaggtttgttacataggtatacatgtactgtgttggtttcctgcacccatcaactcatcatttacattaggtatttctactaatgctatccctcccctcaccccctccccaacaggccctggtatgtgatgttcccctccctgtgtccatgtgttctcattgttcaactcccacttatgagtgagaacatgcggtatttggttttctgttcctctgttagtttgctgagaatgatggtttccagtttcatcygtgtccctgccaagggcatgaactcatcgttttttatggctgcatagtattccatggtgtatatgtgccacattttcttaatccagtctatcgttggtggacttttgggttggttccaagactttgctattgtgaacagtcctgcaataaacatacgtgtgcatgtgtctttatagtagaatgatttataatcctttgggtatatacccagtaatgggactgctgggtcaaatggtatttctagttctagatccttgaggaatcaccacactgtctgtcacaacggttgaactaatttacactcccaccaacagcgtaaaagcgctcctatttctccacatcctctccagcatctgttgtttcctgagtcaggaaacaacagtaaaacagtaagcattttttttttttttttttttttttttttttttttttttgagacggagtctcgctctgtcgcccaggctggagtgcagtggcgggatctcggctcactgcaagctccgcctcccgggttcacgccattctcctgcctcagcctcccaagtagctgggactacaggcgcccgccactacgcccggctaattttttgtatttttagtagagacggggtttcaccgttttagccgggatggtctcgatctcctgatctcgtgatccgcccgcctcggcctcccaaagtgctgggattacaggcgtgagccaccgcgcccggccagtaagcattttttttaactgtctaacaatttggggttgtaaatctcacctgtgactatttctattgttctgcctactggcattaaatacattattgtgcatttcaatataattgtgcagaaacccatttattgggatgtgagtaatgcaatggaaagtaagacttcattaagtgtttagtattatttttgtttgtttgtttgcttttgagataaggtcatggtctgtcacccaggctggagtgcagtgacaagatcacagctcactatggcctctacctcctgagcccagagtaatctgcccacctcagcttcccaagtagctgggaccacaggcaagcaccaccacatccagctaatttttgtattttttgtagagacggggtgtctctgtgttgcctaggctggtcttgagctcctaggctcaagcgatctgcttgccttggcctcccaaactgttgacatggtaggtatgcactgcctgacccagcctagtattgttactatgagccttagactacagtgaaactgagttggaaatctataggaaggcacggttttgtttgtttcaaaggtgatttttaaaagaaattttgaacatcttctttgatcttaaggtaaaagtgtgcacgttatcatctttccaatttctgacaaattctgtggcttcacacacattgtaagggaagaggtagttattacaaccagactgcagttaatataaaaaccaatacaaaaatattttcatcgagtcaaaaatgctcagctctgtgaatttaattttaatttgtatttgtaacatatattttctgcattgtatctgtaatttttttcactgtgattccagagaagatttgcttatataggatagtgatatcattaccattgactagctacaaagtaaaaatataaggtaaaagggtaatttttattaccagcatcacaattttattagcagtaccttctttaataatgccctttgtagaagccagaatattcttataaataataaagccttttgtttgctgactgcatgattggaatattgtacttcattgggtttttgattgtccattttggtaaatgatttgaccttatcctcaactttttttttttttaatctgaacagcgttggaattgtgagcttaatgttctcattccttgtctcaggattaaagtagaaagggctttatgtgagaatacatcaagtcctgttgtcactgtgttggtcatatgctgaagcgactaaaatattaacaggtgacttccccagcatggtcctgggaagattaatgcccccaccccccaccccctcgcacccaccacacacacacacacacacacacacacacacacacacagcctcagccaatgaaatggagagacccgcatgttccatattcactagctccatagaaaactcctgcatgcttttgtcagacagatcagaaatgggagggaaatgaagtcaatgagagagttgagatggaaagagtggttagtgtgaactcagtttcctacacaaaatgcatagtgtgagaaatagccataattgcttcttcccataagtaaatcatatgtactctctgatacatgaaaaatagtttttagctttttttcaaaagtaagtaactacttttaattctatggatctaggtataagtgaatccaatcagtggaactattggattgaaaaaaatatattttttttttcaaatttgtaaactgctgctggtgaaaacctcaatgttggtttcaaacataaggtgaaatgagtactattggagggaggtatttgttttatttccttttcaattagttgtggaaaagagtcttaggaagggcaaaattatgtgcatcaataacacattggattaaagaatccacccatttactaaagccttgtttctgcttttgaatgaactgtttccagttccataatgtttaagttattccaatgtcttgaagatgttttcggagaaagaatccttacattacatgcactggcatgtcaccagttcattagaaatactattacattttttactgtgataaaatatgtataccctaaatgttaccctttgaatcatttttatgtgtatataaaaatgtacagtgatacataaaaatgtacagttatgtgcagtgatgttgagtaaattcaaaatgttgtgtaaccatcgccactgtcaacttccagaaccttttcatcaccccagacagaaattctgtacccattaagcagtaactcccaattaccccttccccagctcctggccatctctattctactttctgtctctgtgatttttactattctggatatttcacgtaaatggaatcatataatatctttccttttgtgtttggcttctgtcactcagcctagtgttgtcaaggttcatttttgtggtggcatgtgttagcaccttttgatgcttttagtgtaatattcccccataggtatataccacattttatttattttttgatcattgatgcatcagtaatatcttatgtgtgcagaatctcagtaatgtcaacaggtttgagggacctctcccaattcttgctgatccctcaacttaatcctcaagtcaggcaatggctttgcgtccctgttacctgccacttgcggaacaagggattccacattcttcctctgtttgtttcatgtatagtagacaaggtgatcaataaaatggttattttgggctgggcatggtggctcatgcctgtaatcccagagctttgggaggccgaggtggactgatcacctgaggtcaggagcttgagacctgcctggccagcatagtgaaaccctgtttcttttttttttttttttttttaaactttcagttctagggtacatgtgcacaaagtacagatttgttatatatgtatacatgtgccatgttggtgtgctgcacctattaactcgtcatttacattaggtatatctcctaatggtatccctcccccctcctcccaccccacgacaggccccggtatgtgatgttccccttcctgtgtccatgtgttctcattgttcagttcccacctatgagtgagaacatgtggtgttaggttttttgtccttgcgatagtttgctgagaatgatggtttccagcttcatccatgtccctacaaaggacatgaactcatcctttttatggctgcatagtattccatggtgtatatgtgccacattttcttaatccaatctatcactgatggacatttgggttggttccaagtctttgctattgtgaatagtgccacagtaaacatacgtgtgcatgcgtctttatagcagcatgatttataatcctttgggtacatacccagtaatgggatggctgggtgaaatggtatttctagttctagatccttgaggaatcaccacactgtcttccacaatggttgaactagtttacagtcccaccaacagtgtaaaagtgttcctatttctccacgtcctctccagcacctgttgttttctgactttttaatgatcgccattctgactggtgtgagttggtatctcattgtggttttgatttacatttctctgatggccagtgatgatgagcattttttcatgtgtctgttggctgcataaatgtcttctttcgagaagtgtctgttcatatccttcgcccactttttgatggggttgtttgatttttttcttgtaaatttgtttgagttctttgtagattctggatattagccctttgtcagatgagtagattgcaaaaattttckcccattctgtaggttgcctgttcactctgatggcagtttcttttgctgtgcagaagctctttaattagatcccatttgtcaattttggcttttgttgccattgcttttggtgttttagacatgaagttcttgcccatgcctatgtcctgaatggtattgcctaggttttcttctagggtttttatggtttcaggtctaacatttaagtctttaatccatcttgcattaatttttgtataaggtgtaaggaagggatccagtttcggctttctacatatagctagccagttttcccagcaccatttattaaatagggaatcctttccccatttcttgtttttgtcaggtttgtcaaagatcagatggttgtagatgtgtggtattatttctgagggctctgttctgttccgttggtctatatctctgttttcgtaccagtaccatgctgttttggttactgtagccttgtagtatagtttgaagtcaggtagcatgatgcctccacctttgttcttttggcttaggattgacttgacagtgcaggctcttttttggttccatatgaactttaaagtagttttttccaattctgtgaagaaagtcattggtcgcttgatggggatggcactgaatctaaaaattaccttggacagtatgttcattttccctgtttctacaaaaatacaaaaattagccaggcctggtggtgcacgcctgtaactttagctactggaggctgaggcaggagaatcacttgaacccaggagatggaagttgcagtgagacaagatcacaccactgcacttcagcctgggcaacagagcaagattctgtccaaaaaaaaaaaaaagtttattttgttacacccctacccccatgaaagggcagcaacagagaggacatctcagcacgttccaggaattgtttgtccactttcatcctctctcccatgcaaggatgtgcatttccattcccattcattgagccatgcgtgggatgggtaccagacaggaattttcattttttaagctggtgaggggaacgtgcacacctggcacttgggtttttgccagatggtctcagtgtcaggaaccagcagcatgagtcccagacagctgcctgctcttctctctgtgttcacacctccacacttagcagcacctcattccctgctagcccaggcaccacggcagaggcacttcagctgcagttttggaacatttccaatgcttagaaacatttcttttttctgccatgaacatgtaaattatttttaatcaagtaatattcaggaccttgattttatgagggattaagccttctcttaaactgtactgtttacctactactcttgcaagctttaagcaatgacttcaacgtttttctatagatcatgtaaattgaatatacatgcaacaaaacatgtggctagttggccgggcgcggtgggtcacacctgtaatcccagcactttgggaggccgaggcgggtggatcacgaggtcaggacatcgagaccatcctagctgacacgctgaaaccccgtctctaccaaaaaacaaaaaattagctgggcggtttggygtgcgcctgtaatcccagctactggggaggctgaggcaggagaatggcgtgaacccgggcggcggagcttgcagtgagccgagatcacgccactgcactccaacctgggtgacagagtgagactccatctccaaaaaaaaaaaaaaaaaattgtggctaattgattcatttgaacccatggtcaactcattttttaaaaaagacaacatggagacggttttaatgttttaaccagtcagctcgttaaggagttcagctctgtcaagtggacagtctgagactcctttttcctccctttttatccttccttggctctctgctggcctattttggtaaacagaaacgccacgtggttggaaatgtcctctcaacaacataaaatgttaagaacaattatgggttctctaatgaatttttcagaatcatcattgctcaaagacagaagcacagtacatttttcaaaaatgaccttgatccattagtaaacttgtgtgaagttgtgctgttgcactgggccttgaaccctttgagaggtaaacaatccacttggagattgtgtccacccaggctgaatttctgctgagggccgagatggagacagacagggagtgctagttgccctcagggcagttacaggacagaggcagcaaggctgcctagaccagcctagaggggagagaacagaaagcctttctgagtggggctgtgcctgagtccggaagaacaatgccagctggccacatgacaccaaagggaggcttgggggcatggggagcaggaagaggagtcagtataagcagagtccggaggtggggacaccccggtgctgggtgcttgcacagccacagcctgcagatgcagggcagaggggtgggggtgggtctccttgtcctgctgatgctctggctcgttttgtggggcaggaaggaaagttttggatgacttgcatagagccaaatgggtagctgggttttttgcaaaagcaagaaaggaagacagtgagggcaaaagaggaaaggaaatggggaaagaaaatatctttctatattcttttttcagagtgcgatttatttttatatcgtgggtccgttttgtttgatcatttttagcatgctaaaatggtatcattatatcatttaagcatgacatacatgcctatgccattttgagatgttaatgattcatttcactacgattcacaagtggtggtgtctttatttgattgtgctgcagtcggcatcgttgcttccctccacattgcctcttggggtaattctttcgatgtaactaggaacatcttcctgtatacttgttttgcartactactttaatgtattcagccagcaagaacaaataagcattgccaagcatttccattttttcttcattgaagttcatcatttttctctgttaatgagttggtgataaggtcctaagaagtattttttctctttttgttgaagaatgtgcacaactggaaaggcttaatgtcatgattattttgctaaaaattcttatgtaggctaaaatcattattaagctcacaaatgagctatattgttctcttgttagcagaagatattcgttggagaggtacattgtgctaagaactaaaattgcaaaccctgtttaagactgtttctgacattacaaggcaatgtcacgtgattctagtatgaaaatgcagacatgtgccagcacatggtagctgcttgatacatattcattgcagaagtaaaagttatagccaaaacgttttgtcatcactatagtctggcctgatctagctttaatagcaagaacattggtctaatctggagtgactggaaggaaaatcccttcttagctcagaggagtgatctcctgccataggaaggtttatggtcatttccgacagtttgaaaaattctgaataataaaatactgggaaaattggccaagagttaaaggaaacagtggatgttacttgatcaygatcttacttcccttctctttaggaaagtgagggatgctactggagttgatatcaacatgcgcgtgggygtgcattctgggaatgtcctgtgtggcgtgattggtctgcagaagtggcaatatgatgtgtggtcacatgatgtgaccttggccaaccacatggaagctggaggggtccctgggtaaggccaagyattggatttctttcttcaagcaggcagaactattaggaatgacagattatcagcctaatgacggagtgctcagtttttgatcacttctgttgcctctgttggtatcatgttactcacrcccaacggcctcttatgttaagcagataaagaygagctctcaagtccctgcgtcacgaccccgttgtccatagttcaaagactgtgaatatcagacagtaaattacaaacttttacttatttgcaaatgtatgaatagagatctgatttaaagatgttttacaaaacagtccagatatggcatctgtctagaactgttgacctctaaaaccattatattaaaataagtgactacagcatccttctctggggagaataacgtatttcagtcaagagaatctttatcaagggctgtagtttagagaagcacgagagcaagcactgagaaagaaagtctacattattatacggattagcatacttcctaaaatgcccatgacatacatttcaaagatattctcataaaaattcaagataatcaagttgtatttgctataattcaccacacccaccatgcaggtttcggtgagtgcagagaagctccaaaactagtagtgcacgacctctaagagcatctttccaaagcagtggtcaatagaatataaactttaattgcggtcagtgctcctaagaactttagtggataaattatttcagaaatcatgagcaaatagaaacctttcttcacacttatccttttatgtcttgactgtgattttaaaatgcaatttcagacgtgttcacatttcttctgtcaccctggagcacttgaatggcgcttataaagtggaggagggagatggtgacattagggacccatatttaaaacagcayctggtgaaaacctactttgtgatcaaccccaaggtcagtatcattgtaaagagtctatgatgaaaagggaggaggagcaaattattgatattcataagtgtttttagtcaatatccaatataattctttgctactctttgtccccaaaatattttaaatgcatatggtggtttaattacagaagatgttttgtaattatgaattcaaatacttattaaatgagcagttgaaatgcactgcttttctgcaggggtgttgatgcaggttgctagttcaggctgtcatgtgtgttagtcggtgtattccttggtggatgctgcatctgaaagcctcccagtgggcacagctgttgatacctgtcagttgggaaattaaataaagagaaaatgattgacttagggctttagaagataaaaatccaattaagtaaaataggatgaacatatacaaaaaaagaagagaagaaatatttgaaagattaacacataaatattacatagacatgcttgcgagattgtctgtatgcacaagcatatttaccttccgtaacataagaacatctactgcctgagatgatccaccccatacaaacagtgagaaactatctcttatttcattcacaccacatttaggccagatcaaggggcttagagttctcatttcttttaacccttctcaaattcctgccaaatgggtattatcactatttacagattaagaatctgaagctttcaggggttatgtaattcttcccaaattacacagctggtaaatggtgcaaatatcagcaagaaagacctctgaaccatgaaaaccaatatcataaaatcaacaagatcaactttatggacatttacttatggtagcatctgggaagccccagtttcacctttgaagacaaactttcaactagcttgatgatcsatctggagatagatgtgtggcaagcagcagggactgggagatgatggacgggggaaggctcaaaaaatacatgtacaaagaacattacgttcaggtaaagaacaccaaaacacgatgtttggggctatgtagcattagaaacagcactacagttatcactttagaaaaacacaaccatcaagaaaaagctaaacagatcagcacattctgttttaagaatttacttaataaaaaatgtccattaacatatcattatttttttctaagtctcaattacatgtatgttttgctagctgaaaaaagattccctcaactcaaatagtgtgttccccagtaacrctgaaggaataaggacagaaaacacagagggcgaatagagggctgtcaggaggaatgaccctagtccaatgaggtcgatgccaaaaggatcatgtgtggccctgtgctgtgccaggtgtgatgctttgtttctcaccccaagggagaacgacggagcccccagcatctcttcagacctcgccacacccttgatggagccaaaatgagggcctcggtccgcatgacccggtacttggagtcctggggggcagccaagccctttgcacacctacatcacagggacagcatgaccacagagaacggcaagatcagcaccacggtatgccctcccctgcctccaatgcctgagcactgggggaaagctaacttcccaaaaccaaaggctgggcatctcctgccaaaataactcctttctgtaagaaacaaacttatcaccttcttcttctcagagaggcccttatgaacaaccatcagggtatgagtgagctccatgctgacattgctaagggttccaccctagcgtgattttgcattatagcttcataacccaagacagtgctatttacaactgatagtagcaattaaatacaactatttattaattgaggggttttttaagaaaaacttctatcatgaagtagaaagccttgaggttcttaataaaaagacaaaggcatgatgcccttggagtttaagtagtatcatcaagcccatttcttcattgcccaaatgtccaggctgtgtgggcagcagtggatactatcttgttatggttccatgtttccctgcgacctccagcatatgagaaagctccttacaccagggacatctgcgataagatggctgcaatggagaaggaaaatagaaaggcccataggaggagagaaaagtaaatacaaccaagcacttaggataatccccatagtatttttagattttaaaactatctgggggtaaaatttcatgtataatgctattaaatgtgctaaggatgcagttacagctttttaaaaatacagtattacataattcttattgtctgatgagaaggaacatgccagttgtcaggtgaaagtggagtttttcagtcgccctgggcccccacctgtcccaaggtctcaaagtgacactcccactcccaacaggcaggggctcagcatttatgttttggcttatttatatttcttctcccaacttctcttcatcttttttcaactaaaaagtaaatgtgactatcagacggaagaccatgacccatcagacaatccgtaagattgcacaagtcctagcacttgcattttaatagcaaaggagggaccatagatagaaaaataaataaatgaacaagatcatgtgaggtgctgatgagggccatgaggaagayaaaatttagtgatggcatctggagtgaatgggatggccactgtagtaggtcagctgagggagtctcagagggagaaatgagtgaataggaagaggaggtggcagaagaacaaagtcagtggcgcaaagatgaaagtgagtgtggtgtcccctggagacagagaggaagctgctgtggctggagcatcatgaacaatgagcaaagggaggtcatggggtgagatgcaccacggtaaattttatattgcattctgtgtgcaattggaagtcatggagaatcttagcaagggagggtcatgatataatttaggctttggaataatggagcaagactgcaggggtccccggtgagaatgatacccccttattctaagagtttagcagtggaagcaatgagaagcaaattcaggggctaacgtgaaagtagagccaataagacttggtgatggattggatatgcatgaacattaggaacagagatgaatccaaactttttggccccacagctggaacaatgatgatgccattaattgagatgacaaatacaagggggaaaccagattatttaagatggaaaattaagacttttctgctggaccgcttctaacctatagttaagtgcagtgaggatgtagacggttggatctgcaagtctagaactcacgggacaggtccaagatggaggcatgaatgtgaacgtgatcaggttgtagatgacatttgaagccatgagactagataaaatcatcaagaagagaacaatccaaggtgggaggcctggggcagctggggccttccagcatttagatctgttagagaaacagcatcctaggactccagtatccaaccagtgaaagcctatgtttctgtcactcatgaaaaacagtaatttggataagttagcctcagtcttgctagttagtgctgtgtctgataactccatttcccattgggatttattgtacatcagcaattggttggttggttggtttttaaggaataagaatcatatataaatagtcgaatgtgatttcctgtgctgtttttcatgtgttcctgyggggaaaaggcttacttttccaggtatattgttgttgttgtttatttcttatcagcctttattgtcttaagacttaagagtgactgtctcttttattatctgagcgtaggatccaggaatggtttcagtctgactttaatctgatgctatgtgttgatgaagatgccttcttcaagatatggccagaactgttgagtgcctcaacttcagaaatttgtttataaaaatcaaaggacctcttgaacgaactctattttcttaaccgtctggtcccacctgttgcagattcaaagccaggcttggattgccttagtagcagtatagcatactttaagaaagccccaagtttttggtgatgcattaagcccaaaccactttgacttaactgtgtgtctcactcactttcagaaagacctcactggagttttcactcataaatcccagggtcaaacaactgacattgctgaaagtgattcctttatctaatcccctatacagaactccattcactcttgattcaacattgatagagctcttgaataatacagtactttactgtatggaatgaaacttggagctcaatcactttttcaaaaaaatctttcctttccgtaggctaaatccatatcttaatataaccttggaaatgaaagcagcaaaccaaagtttctttggagcagttttgttccaacttttattttcattcccactataaatgtgtaaaggcaatctttccttgaaagcctattattgaatatttgacagtggcttttccacttataaattctgtctctcttccatttctcttgggaactaccagcgctcctttgccgatttcttcattttgtccaatggtttctgatttcacatacttaaccaatggtactgtttcttaacgccccagttcagtgatggggatgactacagattttgtggttatatttttgttctttctacagcattttctaatatttgtctgataccaaagtccattttcacatggtcataggttactgatggtaactctgatatcagtcgccggcaggccactgtttgaaatcagatctgataatacaggctataaatcttaaaactccagacaacaatcctcatgcttctagcatccagagtttagagattacagcaacattccaaagataaactgagtttacaacttgattcacatttaggattaagctctttttctccacatgagtaattaattatttgttagttaaatgttactgtccatgataaaagaggaaatatgtttcacctaattatcattgcaacattcttcttgaaacatgttttgacaattaataaccttttttctcaatataggatgtacccatgggtcagcataattttcaaaatcgcaccttaaggtatggtatctctctatctgattttttaaagcttattgctctttattcatttctgagagtaattatcatcaattatggtaatttcaagggctacttctgaaagagcagctccccctgaaaagccctattaaattgctttcagcttctaaaaatagaatcattggggtcttattgttagaattgagagagggagaaagaaaacaccacctggtactcattttagaatgttaaactgttttcctaaagagactcttcttaatattaatgtgtggtaaaaaaaaaagtgaattgtcttaaaatgggtatgttgcttacaattacatttttctgcctgtaatcccagcactttgggaggctgaggcgggtggatcacttgagatcaggagtttgagaccagcctggccaacataacaaaaccacgtctctactaaaaatacaaaaaaaattagctgggtgttgtggcatatgcctgtaatcccagctactcgggaggctgaggcatgagaatcacttcaacgcgggaggcagaggttacagtgagccgagatcgtgccactacactctagcctggtcgacagagtgaaactgtgtctcagaaaaaaaaaaaagaaaaagaaaaaagttacacttttctgttgaattctaaaggtaaaagcaggataaatccagtctgtctatagtgaaataaagggttatccactctgctcaaaaaaagagaaaagtttcccacaaatgtctccacacgccctgtcgcagccaccgtaaaatcccaggcaccaactccttttttcccctgttcctctatctttcgggcacagagttttactttaatattggtttgggagttaatcaaatcaatattaggacattcagataaccagtgtaagatgtagttccaaaccctaagccaggctttctttctccccagagaggtcaatttattggagctattgatagttttatagaaactaaggaaaaatatgagatctgacctattttctatagaaaaggaattgtacccaagtaaaaatgaaacataggttgtaacctgctgaaacaaggcaacagggcacattagcccaggatccttctaagtgaccgttgggatgagctctaatttggacttcatgcaaaatttgacattttaacattgagatataacattcatagtctttatgttatgaggataatttggttcttgagcttttgaagcattatawttaagtggcatatactgtaataaagagaacttaagctaatttgaggcatattagagagcccataagacacctggagacagcacggtgcctctggccaataagatgctgacacatctatgagcaactgaccacagaaatgtcacagacttcctttcactttatattcatagtctcttctgttatctgtctcttccttccagcaatcctgctttaagagtctatttatagaagttacgatgggtaatgtgtcatggaaccccagtattacgtggggcagcgtaagccgggatgagtgcagtctggaagacaatgataagaagctgttgtttttatttgcactaggctatagaaactctaatttggtctctgcagcgttactgcaaggcagaatctgttgccattatcattttggaagggaagaagctgaggcacaaagggataggagaatgccagcgtcacatggctggtggagatgaagccagcatttgtgcccaggctctgtgaccgcagagcacaagttcctaactgctcttcaggcttgcctgctttagtaaaggcctcttccatatttattccatttgtctctgtagtcattgatctttggtggcctcaaggcctcctggagagaaccccagttctgagtcagacttacccaggatgcccaggcacttccaggctttgtaaagtggactgcctcataatacctgtctgagcctccagcctggcccacacactcctgtcacatgtccctccccatgcctgcttagacctatcagctcaagcaaggtgttggcatgggcctggggaaggagccagggagacagaatggagatgtgttggacacaggggttggggtcctagagcagtgggaaggccaatggtggagcccaggggaaggcaccaggatgggaagatgagagatgctggaagtcagagggagagagtcctggaggcaaatgaagactcctggtggggagatcatcagccccaggggaccttatcctctccatggcagaggtcacaagactgcagagacaagaaaagtgtctgtatgtcaagaattattgtccggataattagtgaattcaaatcatgcagaaagcatgcatttattggctactttgcatgtcacatttacagcattgagctctctacaggcatcatctaatcaaatcctaaaacaggttaacaaaggcaatatcattgttagcactggacaaaatatcgaagaattacattttcctgtaagcctcaacattcttacactgctccttcttagactttgcagaagagaaagccatcaaattgaagtcaagaagctcaagtctagatgtgggactgataaacgttaaatgaagggtctaaggtcctacaggtctcagctataaatgagaatgtgcaagccacactagttgcttggtaaaggattccttgctttttttttttttaaggaaaataaaaattaatttgcctgcttcaaacaacttggaatttggtatgctaaaacctcttaattcatttggctcaatatctgtgggaggatcacttaatatgattcattttatttttttaaccaaaactgctctcagcctgtttgaagaagacagggcccgaaggcacaaatccacaaacaggatgatggaattggaaaactcatccatctcattaatgataattctgtgagatttaattacagataaatgagactttgcatatttaatgctattcttatctatatgtagaggcaattctgaactcaggaaagtgtgatttttattccagattagatggtctattcatttgtaatctaatcaaccataacacacagaattcatgcctaaaccatgatataggcatagccttgttcaggctagcaggccgtgcttttaatctttgcagtggatatttaacttctaagaataggtactattttggttttctcctgacatcattctcatgcaaattgtcaaattaaccttggagagctcttactatttggcacaatttattcagcaagtatcttatattatggctaaaggttatttgcttctgaaactaagtgagatggtttgcaaataaaagtggagttttctgtgaatagtgctttgaaaactgaggagcatttaaatacatacaattaagctttggtatacctgaaataagactgtagctctgcaaatttttgagagttgaccaaggaaaacacgaaaaaggaatgactattttgtcaaccaagccacatttttacaggggaatttccagaaccaatgtattctttcataaaataaagtttatgaaggcaacaagtcaaaagctaatacatctcctaggagagaaagttactttatctcaaacaccgagtatatatctttcagtgttgccttgtaaatgcctagtaaatttcacagtgagtgaataaggacacatctttactatcccaaaaactttagttattcactcaatccaaagagtggctggatgttaatagagaagagcctgctcataggctgttgtttctttttctacttgattagcagaattaaacagagcttttgacatcatagaaaaataggcttactgacacagaaagacaaatttggcatgttctcactcatatgtgggagccaaagaagtttatctcatggaggtagagagtagaatgatagataccagagactatctggatgggagatgggtgggtaaagagaggttggtcagtgggcccaaactttagttggataaacagaataacttctaatgtttgatagcagaatagggtgactgtagttagcaacaatgtactgtgtaattcaaagtagtcagaagagagaatttgaaatgtttccaacacatagaaatgataaatacttaagataatggattccctaaataccccgattgatcattgcacatgcatgcaacaaaatgtcatctgtatctcataaggatgtaaaatattatgtatctctaaaaaattggcttaatatttattttactaataatatccttacccataatattccatttttcatatagaaccaagtcacaaaagaagagatttgaagaagaattgaatgaaaggatgattcaagcaattgatgggattaatgcacagaagtgagtacttctttctcttaaattatctttcatcttttattatgtyccagttgtattttatcatgggctctgcaatagttaccatgacaaagccaagtttctgagaccattcattcatttcacttcagttgtccctcagaatagtttttgttaaaagtatttatttcatctttttaaaaaatatttaatccctgcctagaaaatattcccaagttgattgctgataaacaacctgaggtgtaattggaaagaggaaaattacagcacgatgtgttcagcaagtaatatttttaaaagatagattctatatgggaaaaccttcaaattttagcatatgatactatccatccaaaatgcatctgttcttattacaaaattaatgttgagatacctgtgttctaaatcctagaagagaattagcattggtgagtaatgagaggaagactgattttgggggcacaaaatgtcatttagcctctgaggccaagaattgctgttacggttttaaatggtccagagttgtgggaggaaaacaatttgaagaaggtgatggccttctcagcctggacagaatgactgcgctcatcacccttcatgttctccttgggtacgtgtgtcataactgaacccatgcagagcagaaggcacatggctcagtatggtgcctggtgcacgtcagacattccattcctgtttgttgagttgaactgtagtgaaaacatcaggaggtccaaatgaaaagccttcacagaaaagcttccatccttatggagacctatttaatttttatcatgaaagctgactcttgaaaagtgtaaatgattttcacctagagctctttgtctctaaaattaagttacagggcctcaaatagtgcatggctttgcaaaatgcatgcctgttttagatttttttttttttttttttttgagacagagtctcgctctgttgcccaggctggagtgcagtggcacgatcttggctcactgcaagctccacctcccgggttcacgccgttctcctgcctcagcctcccaagtagctgggattacaggcgatcgccaccacacctagctaattttttgtatttttagtagagacagggtttcaccgtgttagccaggatggtctcgatctcttgacctcatgatccacccgcctcagcctcccaaagtgctgggattacaggtgtgagccaccacgcccggccttagattgttccttgtaggtatttattatcgaatatttacagggcttatgaaagaatcgcatgagtgtgatatgtgtgtctatggtgggtgtgtgcctttgtgtgtcagtgtgagtgcatattttctaagcaataaagcatcttggtcagggaagagttgccattcggatgtgctagaacactgaattgtcacctgtctagatgcccttcctgtgctacaagtaggtgaagccttcttcccgtcacagagtgtccaaggcccactggcagcaccagggccaatgctctgttttgcctggcactagggtcagtgtgaaaaacaacctcacctctgcctcaaactgtcacatactgagaaataaataacttcctgcaatctaacagcagctaaaacctagggaggcacctgatttcataaaatataggtggaaggatgctttcactcaagcagaggaaatagcatctgatactgtgtgactcgccagaataagacacaagatcagaagaaagagggaatcttgttatttgacaaaagttagcaaataataataataataacattaatattttaaaaactaattcctaaagttaacctcrgcatgtgttaacgcaggacacctatctttttaaattatttttgtatgcaccttttggaacgttcctaccaaacaaatcatcagagagtgccaccattgtcattgctttattgttgttaaagttgcttttaaattatgtgtttgctttgtgtcatttagtatgcaaatatatgtttagttaataccttatgttttaatgtagttgtatttcaaagtaatgcttagtgctggtgtaactgcttatgttgtaattttcccaacatgtttcagaaattaaatagagaaaagtgtgctgtactcaaaaaataaaagggaaatttttcaaatggaagctcttatgcatatatttttgattaacctcagttacactttgttatgccttactcattaactcctcttgttctttgacatgaagttcttctgatctttgtattttcacttgaggactcaactggggctccaggcttgatgtaccattcacttgtttcctgctattgccataaaacagtgatttctgtgcagatttttgcttattcattcactgatgtgttgaacacgcatttgttaaaagacgactgatgtcaccatctgctcagtctttccccagtgcatgccatggtggtagggagctctctggtgtcttgtcttagaaggactccaaggacactcatactatcagatcaggaccttactcttatgacctcatttaaccttcatttcattcttagaggctccatctccaaatacagccacactgggagttagggcttcaaagatgaactttggtgggggacacaaacttgcagttcataacaataagaaagtggtcttctcatttagtacctcctttgtggcaaggacttgcattcccatattcctgaataaatctgggtgcaggtgtgggtgtacccatgcccctctagtaagcatagtattcagaatttcctttagtttccgtaacctcttgacaaaagaaaaaaaaaagaccttagtgtaaataagtagggaatcacttattgtgataacgaaggatggggttgactttcttcatgccatagaccactggggtcaggaaaaatgtcaggaggccctaaatcaagcacacacacattccctctcccttctctcctcttctctcccctccactgatcttgtctttctctgtagttccaatccccccaagtaatagttgacctaatcagcacacacgaatctattcccttccaaatatccaaatcacatttatcaatctccttgttttctataagtcaaaatattcccaagtcaattgctgataaataacctaaggtgtaattggagagagaaaaattacagcatgatgtgttcagcaagtcacatttttttattattaaacttgaagttctagggtacatgtgcacaacgtgcaggtttgttacatgtgtatacatgtgccatgttggtgtgctgcacccattaacttgtcatttacattaggtatatctcctaatgctatccccccctctccccscaccccatgacaggctctgttgtttgatgttccccgccctgtgtccaagtgttctcattgttcagttcccacctatgagtgagaacatgcggtgtttggttttctgtccttgtgatagtttgctcaaactgatgatttccagcttcatccatgtccctacaaaggacatgaactcatccttttttatggctgcatagtattccatggtgtatatgtgccacattttcttaatccagtctatcactgatggacatttgggttggttccaagtctttgctattgtgaatagtgccgcaataaacatacatgtgcatgtgtctttatagcagcatgttttataatcctttgggtatatacccagtaatgggatggctggggcaaatggaatttctagttctagatccttgaggaatcgccacactgtcttccacaatggttgaactagtttacagtcccaccaacagtgtaagagtgttcctatttctccacatccccttcaacacctgttgtttcctgactttttaatgatcgtcattctaactggtgtgagatgatatctcattttggttttgatttgcatttctctgatggccagtgatgatgagcattttttcatgtgtctgttggctgcataaatgtcttcttttgagaagtgtctgttcatatcctttgcccactttttgatggggttgtttgattttttcttgtaaatttgtttgagttctttgtagattctggatattagccctttgtcagatgggtagattataaaaattttctcccattctgtaggttgcctgttcactctgatggtagtttcttttgctgtgcagaagctctttagtttaattagcatccatttgtcaattttggcttttgttgccatcacttttggtgttttagtcatgaagtccttgcccaggcctatggcctgaatggtattgcctaggttttcttctagggtttttatggttttaggtcaacatttaagtctttaatccatcttgcattaatttttgtataaggtgtaaggaagggatcctgtttcagctttctacatatagctagccagttttcccagcaccatttattaaatagggaatcctttccccatttcttgtttttgtcaggtttgtcaaagatcagatggttgtagatgtgtgtattatttctgagggctctgttctgttccattggtctatatctctgttttggaccagtaccatgctgttttggttactgtagtcttgtagtatagtttgaagtcaggtagygtgatacctccaatcacatttttaaaagatatattctatacgggaaaatcttcaaattttagatactatccatcaaaaatgcatctgttcttattacaaaattaatgttgagatatctgtgttctaaaccagtagtgggagtggaggccacctcagaagattcacagaggtgattaagtgtgtaggaagaatatacacttcttaattctgaagacaaggtgagaattaggcccatccatcattgctgcaagggagaagccacaagccagacccggtgtgctttggcaaagggaggcaagtgtgtccactggtggggactcagtcgtgtccccaagcacagatctaatgctggggttcacgaagcaccacatgggttctggggacttaaggcaaggaagcctgatcctgagcccttgccgtccacctgtaggtcacaggccatggaaacctagactgggtgcatgctggcccaactagtaaaggaggtgctggttttattttcacttccttgatttcactctcactcgcaagctgacattttccaggagcatttataaactatatttttttctcagtaaaggaaatactgtttttagcaagttacctgcatatattattcatagtttgataaagacaccgttctgaaagtgagtatggttaaaatttgtcttaagttgtattttctgctcattttaatgttaaccaatctttgattcctccatctagtcctatgaaatagaataatagttctgcagctggtacagtaataagaaataccaaaaaagtttgtttccctacagcttatacccttgaatcaaagaactatgcagccataaaaaagaatgagatctgccaggtgtggtggctcatgcctgtaatccctgaactttgcaaggccgaggtgggcagaccacctgaggtcaggagttcaagaccagcctgaccaacatggagaaaccccatctctactaagaaatacaaaaattaaccgggcatgctggtgtgcacctgtaatcccagctatttggcaggctcagacaggagaatcgcttgaacccgggaggcagaggttgcagtgagatgagatcacaccactgcactccagcctgggcaacaagagcgaaactccatctcaaaaaaaaaaaaaaaaaaaaaaaaaagcatgtcctttgcaaggacatggatggagctggaggccattatcctcagcaaacacaggaatagaaaaccaagtaccacatgttctcccttataagtgggatgagagatgagaacacacggacacatagacaatgacacacgctggggcctgttggagggtggagggtgggaggagggagaggatcagcaaaaataactaatcggtactaggcttaatacctgggtgatgaaataatctgtacaacaaacccccatgacacaaattttacctatgtgacaatcctgcactaaataaaaatttttaaaaagaagtatttttatttttctcacttttaatggcagtcagtctagaatacattactgacttctctgccccagttgaaagtgccctgtgggatggtctagttcctgggatgttcaagctaatcatggtgtgtgcctggcagtgagagtcttccaaattacttgctgaaaacagatgtttaaaagtcagacaatgtggtacaatgcatacttccatataatttttatttatttgtcaacaactgagagatacatagtacttatgcatgcgtttttatgtttgyatcaacctattctgaacggattgctaattatattagtatttttatcaattttttaaaaactcgggacaggcgcggtggctcacgcctgttatcccagcactttgggagactgaggcgcgtggaccacgaggttgggagttcacgaccagcctggccaacgtggtgaaaccccacctctactaaaaatacaaaaattagccagacgtggtggcatgcgcctgtagtcccagctacttgggaggctgaggcaggagaattgcttgaacctgggaggcagaggttgcagtgagccgagatcatgccactgcactccagcctgggtgacagagtgagactcagtctcaaaaaaaaaaaaaaaaaaagagaaaagaaaaaactttattcaagcatgacttttaccttctagaaatgaaaaaaatgacaatgaaagtattttcactaagtctgaaagaagcaaaaccttctcacccaaatcttaaaagcactctgatggtttggatgctctgtgatctgttgccctctagaagctaacaaaaaaaaaaaaaaaaaaaaaaaaaaggtgcttctctaggaactagatccttaaggaggtgaaaccactgtgtgatttcggaaaaacattaaggaatcaaattattgatgtctttactcctttagacgacttatctcccttgttatttaattcagatcccttgagtttcaattgatatgacagttagtttataatatagaattttccaaggagggcagtgtgtgattaggaatattctattttcagatcctgttagcagtatccagattccatatccagttagttggcatcacgtgtttttttttttttttttaaatgctgttcggaatgatacacaataaagaaagaagatcgcaagtcattttaaaaaatagttccagatgtttgattggagattcagttttatgatgtgttggccctttctatttccaggcaatggctcaagtctgaagacattcagagaatctcactgcttttctataacaaagtactagaaaaagaggtaagtttttttcttcttcaaaatcatcaatcgagttttctgaaatttgaatttcttcatgaaattgtgctcatgttttttatatgtgacatttaaactgcctctgactatattcgaactctttctggcttttctggtggttctttcatgcatatattgctttacggtatttcttgttaccaagattccatctttgatcagttaccattctcaaccctctcgatagtaaatggtatctgcaatgtgtgcgaaatatcccaattaaatgaaagatgtgggagatatctactcttctcaatgtgaaattctttcagaaaagtcttaaaaaaaacagaattcttcttgataaatctgcaatgtctttacacaaattattttaatatgttgactaaaatatgagttttacattcaatgctttttccagataattagaacttttaagctttattgcatccttaatactttcatattatggcttttaaagtaagagctatttcaggcacaaataagtaagcagacatttagtttttacatgtcaagctatatatgggtttgccaaaatgaattcagttaattgttgcagaaaggacaaccattcttctagctcaactttattttattcgccttttgttttttgttgatctggagaaggaaccagacttagaagtaatttgcatcatccaactatataattacaggcctactttgaacaaaagttacattaatggtagcattcgcagctctggtattaaaattatgttgataaaatttagtgcattattttatgaatatcaaatagaaatattaaatatgataattccttccaaaatctatggacacaccaaaaggttttttttttatgttggtgttcaagaggatctgttgtctactgctaagtagaggactctgaccattgactgcagacagtttaccaaattgatgcttgttataatgcacaactattgaccaccttatacttaataactttagcaaatattaatggctacttattgcttagctgctacattatttctttcctgatagaagtccatttctttgttaataccacaaagaaattcctactcatatctctgcacaaaggcctgaagaagttaaaagataaggatttaattgagtgcatagaatgtaatcacatttcagcaatgatgctaatgtagcttcttcatgagcatggaaattatgctggctactaagtcacaaaatataccccccaaaattctagtaaacagaaagtgatcatttaaaaatgcagctttacattccccatgtacacatatttgcagatgccgactttaaagcaaattttagagagcagcaagacttaagctcagtttttgtccatctgtcctcagcctgcccgtcagagcatgaggtagggcaagaggtcacaagagctatcagaagataaatctctggagacccctcagagatccctcatgcagcactaaactagagaggctaaaatcccagaaatacatatgtgtccctataacttgggaaagtttatgcaaatgtagccaatgcaacctgacagtattttcaggaggtttcaatggcattggcacaaaattttatttcctttaattttaccatacaacctttcgtaaggcagttgagcctcatggttgagagtctgagttcagagcctggtgaaggtcctggtttcccatgcactgtatctcactgattgtagtcaattgttccagtccacagtttcttcatccaaaaataggggctgttgtgtggattgaatgattagtacagggaaagcagggaatgcagggcactgtgctgaatgtggcaggggtcatcatcagcatcataagtatagccctatctggaatttttatcctgcctaagtaaagcagggtcagacctaggtaggcagctaatgctggtcagcttattcatggcatggggaaccacgtggacccctgatgaatgcactggacgagagaaaggaaggggatcccattggctaggctcagaacaagccaactaagaaccaagttggcaaaccttttcagtcttataactttacccatcacctctcaatagcattaagacaaataataaaataaaatactaaaataaatgaatatgtcttgcatttcctcagtagtattcaaaagtaagatagtatatgagaagtcatgccctttccctcagtagtcatagacaacagaccctcatgggacccaggtcacaggcgcgattcacagttcactcactcaaccttctggtcaggtgcctctctccttactagagagattcagttacttatagatgggtttgagaacagttccactcataaactgtggtccttggaagtcactccttcacagttcatgtgggggaaggaaaaactcattgctgagatgaacaggctttctccttagctcacgttggctgcaatctgcacaatttctgagtgtggtgcatgctctgggtacaactaggctgctggacrctgtgtgcagctcttctcttggagaactgtcactcacaggttcctttctccccctcagtaccgggccacggcactgccagcgttcaagtattatgtgacttgtgcctgtctcatattcttctgcatcttcattgtgcagattctcgtgctgccaaagtaagtacttctggtttccactgggattctcacctggggtgcctttccactggagcccagttatatttaaaggtgtgaaaggatgctaatgtttagacagaggggtgatttaatgtcatggtaaagggagagtaacccaggacctcggaggttaagtggcccccatgtgtcttccttagcataatgttggattttcaaagtggacatgttgattcaaacttctagggattgaaaaaaacaatttamccttcttgttttgatgttggtattactctgatgcgcagtctaggaaatgtagcccaataaactttacccacaaagagtgcaatccccagatgtggtttctaataaacaaataccattatcttatattgaaagggcatgacctttcactataagacacactttgcccacccatccattttgtccaagttctgtgtgttacacggccctctcttctctgaaatccactctgcagccgtctttgattgttataggtcaaggttcagccgacctctccccggagagacgtgggtacaaatgggagaatctgagcaaaccacatttcatgcttcgaggtgaattccttctggttccacttaatggtgaaaaacgaatcgctttatgatccctaggtcatctttctcttgcaccttcttaattagttcaagaccaatcaggtgactttcttcaagaaagctaattctcattttatgatctaaagaaaattcttgtccttcttttaataactggggatatggaaagaaattttaagatagatttttttttccttctgatcatatatttttttctttcttaacctattttgttaaggtcaaagcaaccattttcaatctagtagaattcaattgtttgcttgcgtttaactctcatggtgcagccagcctttgtgggcaactcaaactgcttagattgagtagcgttttgtctcatgaacgtgctgagcaaactacaaagaagttgtctgtttctccgcctctgtacttcaaaggattttcttctgggcactgagccaaatagccaaaaaccacttttgggatacaagtggtttttgattacatggatgaattgtagagtggtgaaagttttgttcatgtatgtacagttccttagcaatgtgctcccttgtggaaggggtttccagtagacttctcctctccccatgattggaggtgtaatacatagaccaaaggagcccttcttcaggacttacagaatcttcagtgaaatttcccaatgttaacattatcagttttccattcaaacaaatgttaacaaattaagctccttagtgtcaggcctgtaccatggtactggagagaaacagccatcccagtacacagtggcttatagactggtagagcagaaaagaattttgaaagctacatacgtgaaataactattacccagggaatgggtccttattgttactcttacatagatagattcattaatttttctacatcttccttttggatgagcatttctatattctctacattataagtaatacaggatctgtcacctactgggaggtgctggggatggggagagtgactgggggcattttaaaagatgcctccaaagaagacaaaaagacttccaggaaccaggaaaaacgtttcatgggatttcacttttaagaaacacatcctcgtcatgtctttgctggcttggctttgattttcttgtctctcttctgtggtgttgcatctttatgaggacccatggatgttcattctctcaagcttcatcacccattatttttgtgggtgcacacaggttgcatttgctctaaggaaaatccacagcctcatctaatggagtccccagacctgcacttgctgtaacagcctcaggcttcttgttctgtgacttcttcatttttctttcatgttaatatcttcatttttttctttttctttaaaaaaaatcttgctaggaaatatttcaaagatacagaaaagtacagagtatgatataataaacacacacgtgtccacaatccagacttttgcaaatgtttaccctgtgtgctctttactgtagatacaattttccaccctctagattgttattatttgggtatgcttcctttaaacaatacctgtttttattttggttttatttattcaatttgatatctttctttatattaatttcttctatatttattttgtcatctgtattttgattttataattgatgtgcgtggacccacttctaccattttattttgtgttttatttaccttgcttttctttggtccttttttttcttttttctgatttctaatggattgatcaagttctttcatttttttttatggtaaattaaaagcaactttattagaaagtaaagaaataaaataatggctactccttaggcagagcagcctgtttattcttttatttcttttactcattaggaagtatatatatttttttcattaaagattactattaaagttcatagaatatacatcatgtatatctttcttttagtgattatcattaaaatttcaatatatattatttatattaaagaataaaatatataattatttataatatgtattatatatttacatgtttttaatgttatatattttttgtcaatatcttttgggatagaagtggtttttgttacatggatgaatgtagagtggtgaagtctgagatttcagtgcattcagcacccaagtagtacacattgyacccaatatgtagttgtttatcctgcactcctctcctacccttccccctttggagtctccatagtccattgtatcactctgtgtgcctttacatacccacagcttagctaccatttataagtgagaacatacagtatttggttttccattcctgagttatttcacttagaataatggcttccagctccaaccaagttgctgcaaaagatattatttcttttatttttttggcagagtaattttccatcgtgtatgtatgctacatttcatttatccattcattggttgatgaatgcttgcattggttccatatcttggcaattgtgaattgaattttaacatttatgcttaattcaatacattctgaagttattcataatctctcttcaatgtcattatttcctaggattttagctctgacagtaattatagtcaatgtttatttaaatctgccacattctttaccaattaatttgctcatcaatgctttttaaaaattattcgtttcttcaaatttatttatatttttggtgatgtatatgatttgttagggtttttggagggggagtctatgagtaacaatagctgccttttttgtttatattaaaatttctttatctactttatttcacagttcttgaataatagtttaactgggcataaaagtctaggttaacttttattttcgctcagaattatgatgacattactctgtggcattacatcttctatttttgttaatgaagtatttctgtcagtcccattacattcctttctagggagtctgtctttcctctctgagtgcttttaggtatcttttttgcttgggggtcggggggcggtatttcactatattgtttccataagtgtatttgttttcatcaacctaagtgactaggtgtgatttttcaatctgaggacacatatctctgctcagttctggaaaattctctgcctctatctcttacatgttgctgtcgattgtctcgattgtctattctttcctctggagttcttgtagctgcatattgtgttctcatcctgggctccaggtgttttcatgtttcctgccagtttccactttttatttctttggtctgcattctgataaattcttcacccaacattgagattataatctttatgattattgttttcatatctaagaagtctatgttgttcttaaaacctaacctttttgtatatataattttatattttgcctatggaattttgttttgttttccttgcagatttttttttttttttttgatggagtcttgctctgtcacccaggctagagtgcagtgcagtggcacaatctcagctcactgcaacctccgcctcctgggttcaagcagttctcctgtctcagcctcctgagtagctcggattgcaggcgcccaacatcacgcccagctgatttttgtatttttagtagagacagggtttcaccatatttgtcaggctggtcttgaactcctgacctcaaagatctgcctgccttggcctcccaaagtgctgggattataggcatgagccaccgcacctggcctacttggagattttaaacatattatatggaaatatcacttcttttattttttttttgttattattttgagacagacttctgctctgtcacccaggctgcagtgcagtggcaccatcttggctcactgcaacctctgcctcccaggttcaagcagttgtcctgcctcagcctcctgagtagctgagattacaagcacctgccactgcaccagctaatttttgtatttttagtagagatggagtttcaccatgttggccaggccggtctcaaacttctagcctcaagcaatccgcctgcctcggcctcccaaagtgttgggattacaggtgtgagccactatgcctggtggaaatatcacttattttattatgttccttagggttgataaatatgtgattctgccatttagtctatctgttaagtctgtccttgtattatctgtaattttgtctgtacgttcatcaacagcaaggatttgggtccatggtagtcttgtatgttctgagttgtaatggcatcactatgrgatagatttcagtgtatctttgccaggtatctctgggattcaccaattcaagtcaaaatattttattaaatccttagactaaggttcctgcactaaggaggtcaagtgaatttgggtcaacacctattggcatggagcaagattggtgatcccaattttcaaaactgaccttttctttatggccccagtcagatggttatcttccctaaaaattaccagactggtggagaggttttctgtttcttgtttyttggcgggacagcccttcagggcccctgactttattcaagagttcagttctaatttcgtgttagtcaaatgcctgggagcatcaccttccttgggtagacatcaatcctacaccaagaggtattagtccctggtttctcctgggccgtttagcatcagcacctctcagcagtctgatttgaataccttctatgtaccaggaatctctctttcttgcctattatctcatctctttaaagaaaccattttgccgtattttatgaggcatttttgttagaataatggtggctctcacttctgttgactttgttttcttaactcattaattatacttttgctttgtttcatttgtttagctttctttgtggtaaattgcctcgtgtttttgaaaaagggaaagaattaaatgagtgagtgagtaaatgaatgaatgaaaaactaataatggagaaatttgttacctggaaaggaccactaaagggaggtgttttcctgaaagggagcccaacatgatccttattcagcctataatcagtgaatctggctctagtctcagaatttgaatagatagaattaaattattggttgactcctctttttggagctgctctctcactctgtctgccctgtagtataactttattakaaacatgagctaccttcaaagaccaaaaatgatcaagcatgaattgctttttttgcttttaagtagtttcattcatattatctgccaaactaaatggattatgtttaaccagtcatgagggcaattgttaaaacaaggatgaatttttttctagcacaatttaggtaaawaacatgtgtttcattagcccaagaaaaactaagaataatgatgttttacttaagaaaaaataataaaccaaattataatgttaaatgtcttagaattattatttctactcagatctctagtatcagtttcattacttatttcaacactcaatactagaggtggtaaaacgtgttcaaatcctgggataggttgtacagagtgatgtagacaagtctcgctgcgggattagatataaggagttgagaaagtaagttttgcagggtttttaattttgttttattttgtcctgaacaactggaaaaaatgctgccatttacacagagagaatcctggggcaggcacaggttggggagggacagcaaactcaagggctcagttctggacattagatacatgtgcgtgttacacatcaggtgctggagtttcacacaaaagggagtttgtgacctgtagaatttatagaacttctgttgaaccccctagagctcctatggattctacagagctgggtggagatacagtctgaaaaacccacacctatgtagtatttaaatccaagagatgggataagctcccccaagtagagggtataggaagagaagactctgtactttctggggaatacagtgtgtctgaaaattcagatcttcagcccttatcattgctgtaaaggtagaactcttcttacttggccaaagatcatctcttttttctttcccacatctcagaaccttcaagtgtccataacatctcaaagctaagtcctctcatcagagaaaggctactgtaatggtgatgaatatttaaattccatttcctcctttcaacttttgattctttctttcttcttttctttttcactgaattccctttcattttgaagttctatcatttaaaaaagaggaatttttatttcatgctaacttataattgaaagaaaagtttgcttcctttggttcttatcattctgactgaatcccacgcaacagatgtgagtggagagctgatgagaggcttgctttagggaggaagtaagggaaatgaagtcaaccaggaaagagtccgtgaaagtcatgacattcaatagaatgccaaagacatcattatttacccagagagatagcttgtaattaatacatttcgtaggctttttgaggggaatgtgtgtctccactggacttatctcatcaataaatgtgtttctcacccctgtcagggccacctttaagcamttcattgactgggaaaaaaagcagaaaggaaggaggaccttgtccagaatcatcctcttccatattccataacaatgcacttgaataaagcaccaaagtcaaaaatgaacactaaaagtaatttttcttgcctcatgacagggaagactcgaggttgtttttcagtaagtacataataagttatgcttcagggttaaaaagaagcagttttgcaactgggctgttaattaaaattgattaagttacaccaacatcttggtatacttaatggacctgaacatgcttttgacagaacaggcaggataaatggttaaaattaagagcgtttgaccaaccattactttgtctcacagtatttgttgttccctggtgtcttagtccatttggacttctctaacaaaggaccatagactgtgtagcttaggagcaatagaaatttagaagccatggttccagaagccaaagtctgacatcagggtgccagcatgggtgggattgggtgagggctccctttcaggttgcagactactgtcttctccttgtatcctcacatggcagaaagaaatagttctgcagccaattctcataagggcactaatgccattcatgaggtctccaccttcatgacccartcacctccgaaaggccccatttccctaataccatcacattggaggttaggaattcaacagatagattttgggagacagaagcattaagcccataagaactcagatggaagagaggtccatctgaacataaatgccagtatgccacagactagaatactgaagagcctgaagttgagcatattggtgagagtttgagccaccccaagtctgaatctcaggttgtcacatacttttctatatgcaagaccatatcacctacaaattaagatagttttacttcttcttttacaatctgatgccttttatattattttcctgcccaatttccctggttaaagcctccagtacaaagttaaatagaagtagccacagcacacatcctttcttattcaatctgaagagaaaagcattcagccttttaccattaagtatgatgttagctgtgagtttctcatggtgaccttttatcaagataaggaaattccattttattaatagtttgttgagttttttcattgtgaaatagtttggattttctcaaatccattttctgcagctattgagatgataatgtgttttttcttctattctattaatgtgatctattaataggttgactgatattcagatattaaagcaaccttacatttcttgggtaaaccccacttggtattgatatacaaacctttttacttgtggctggattcaattgactaatattttgttaaggatttttgtatccacattcataagagatactgatttctacttttttttgtgatgtctttggtattggtgtcagggtgatactggcttcagaacgagttaagaactgttcccttcccttccattttatggaatagtttgtaaaaaatggatattaattcttctttcaaagttttgggccaggcatgctagctcacacctgtaatcccagcactytgagaggcagaggcaggtggattgcttgagctcaagagtttgagatcagcctggacaacatggcaaaacccctgggcaaaggggcaaaaccccctctctaccaaaaatacaaaaattggccatacatggcagcacaggcctattggtcccagctacttggtaggctgaggcaggaggatggctgtagcccgggaagtagaggctgcagttagctgtgattgcaccactgcactcttgcttgggtgacagagcaagactctgtctcaaaaaaaaattaaaaatgaaatgaaagtttgggaaaatttatcagtgaagccatctgcacatgaatttttctttgtaagtagatttttttaattactaagttaatctctttactttttataggtaagcctatttatatttttcatttcttctttagtcagttttgtgtgtcacaacatactcttaagaatgatcatccctgcttaaatgggcatgtcatatgttacagcaaatcaaaaacagatagtcagctctattagtaacactctattcctttatcagctcttaatagattttgacatttgaggaaggagtaagcagtggtcatcagatacattcacaaaaaaatgttaacaactcttctgggatgctcttcactgtgtccagcatattattataaaataggaagagtcacattttaatacccttattgttttttaggtctatttgacctgacttcagaatgtctctgtcaactctcttcatggtggaataattattcaaaaaaaaagaaacattgaaatgcattttaggaaacaaaggcctatataattcattgtagtacaagaatccattatttaaactctgattcacaaaataaaccttatgatttgttagtagattaacacataattgtctctaaatcagttgatatgtgtttaattgaaggccaatataattccataatcccttgttccatttataaaaaaaattagagtatggcataacccaaggaatatatacatatttgctcaatacttctaatgataaatacttcaagtaaaaactttttttttgctattttcaaaagaaaaaggaaggaatttagggaagtcactgttacagttcttccctaggtttctacctaactattaatgatattatagtgcccagagaaagctttatctagttaatggattaggctccaataaagaaaacaaattgtcttaggtatttccgaaagggaatttaatataaagaagtatttacagaatgagagaaaagctgataaaccaaataggggatagtatactagccatgatattagcaacagaagaaacctcctaccacctctagacttgtaaggaaacaggatagaggtgttgttagcagaaacccaggctcctgggctttcttgcagatgctagaaccatgcaaagctagagctagacgaaggtaaggtgttgtctgacaaggatctggaattttagaaaaggcaggagttgcaggccattcagaaaatggctgctaagtagagagtaaaagaaatacccaatctctttctttccattgccttccagtctcccaccagttctcatcggccaaactagctagagacatttgacaaagagtctgtgaaatgaagtctctaagagatggatagaaatatacttgaaagcaaacaagaaattaccaacacacttagtgacaaattttcctaaatttgttaaaatccatcactctccaaaggcaagaatctctatgaacatcaagcaggataaatatgaaggaaaccacatgtggcatattatagtcacacttctggaaaccagaaaaaagaaaaacattaaatgcacccacaaaaaaagacattacatacaagggatcaatgacagaataaatggctgccttcttatcagaaatgatggaaagcaaaagacacttgaacatctttaaaccactgataggaacatgatgaaccctgaattaaacattcaactcaaatattccttttcaaagtcgagatgaaatacattctgcaagtaaaaaaagagggaattcatcaccagcaaacctacaagatatgctaatggaagttcctcaagctaaagtgaaattatgtcagaaggaaaaaggaatctaaggaaggaatggaaagtattggacatgcttactttatgagagagtataaaagacaatgtatttatttttcatgtctctaaaagacaacaggtgatctgatgcaaaaacaatgacatgtgacatatactgagaattcttatgagaatgggattaaattgttgtgtcatgtattttttgaagtggcacaatattaatgccaaataactaatgataagttaggacagcgtgtattaagccttgagcaatcactaaaaataaaataaggatagctaaaaagccaagaggaaatgaaaaatacttttaaatatttaattaataaaataataatggaagaacagaaaaacaaaaataaatgagacaaatataaaacagatagtaaaatggtacgtttgaagtagtagcaacaaatgtgacagaccacactatacaaataaaagcaatgggaaaaataaacaatagatagccagagggtaagattaaattcaaacattataaatgggaaaggactaaatactccaaaggaaagtatgaccaagccatatactctctacaagagatgcactttaaatacaagttaggtagcttgaaagtgaaaggatggaaaacgtatctgatgtaaacaataagcacaaggaggctactatacatatattaatatcagacaaagtagttatgaaggcaagaaatattaacagagataaatatagatagtgagtaatgataaaaaggtcatttcaccaggaggcataaaatcataaaatgtgcttatacctaataatggatctataaaagacagatatgaaagcacttaacctacagtagaccataaaagcatcttatgcatatctgacaaaatcaaagaaaaaaagagacaaatctacgtcagaattagatatttagtatctcttttctagttattattattataccaataggaatatataggaggtctgagcaacaatatcaacttcctaaaactaattaatgtttcataaaacactaaactgaattgaaaaatacttgtttacttaaagtgcacatggaacattaacctacaaagatattacttatactaggccataaaagcatctccataaatttgaaaatacagaaacaaatatgaggacaaaaaaatcatatagtctgacgtctaaccacactaaaatcaaattagaaatcattaacaatagaatattttaaaatatccccaaatattttagtgttaaactatatgcttctaacccaggagtcaaatatgaaatacaagcgaaatgtaaaaatgtttaaatatcaaaacgtaatgtatcaaaatgtgtgggattgcaattaaagcagcaatttaggggggaatttgtagctttaaaatgctttaaaattagaaaagaggaaagagttaaaaatcaattgtccaaatttcgatcttaggaagcagaaaaagatgagcaatttagaatcaagcaattagaaaggcataaatactaaaaagaagaaatcaataaaatagaaaaccatcagtagtgaaaattaataaagccaaaatatggctctttgaaaaagactgaaaattcctaaaccactagcaagactgatgaagaaagaaaaacagggagaaaaatcacaaagcacccaaactaacaatttaagggaaaaaagaggactcactacagactctatagatattaacaggatatatatgaaatgccataaattacttgaggccaaacagatttacaatttagataaaatgagtttcttgaaaagactatttaccaaaagctgaaacaaatagaaaatttaactgtgcatgtatctatttattgaatttgttttaaaaatttttcccacaaaggaaacttcatacccagattatttgtgtgtgaattctacccaacattttaagaaaataagatagaaagaattggtcaaatattaacaaattttatatttgtgaatggataaaaatgtcttattcatggaaagaggctaaaagattggggctacaaaccaaaggccaaatctacaccacgtgtaggagatctagccgaaataaaatgagaaaggttggaaataaaggatatagaacagctattccaggaaacagcttatagaataaaggaaatatcaataatataaattcctgacaataaagaattcaaatgaaaagtattcagcatttaaaaaaaagatttttattatgattcaggcaacaaaattttaagtcataaatatttatgcacttcagagtctctttgaaataaataaagcagaaagtgttaaaatgttcaaatacatggacaaacctacactcctagttggaaatgttaatatattctaacattgacagatcaagcaagccagcccattagggatttgactaactcataaggttccttcaatagttatatttagagaaacactttgttaccagcataaaaaacacatagaattttcaaaaattcataagacatagaagttgagcatatttatcacatcccagaagaaaaataaattgtcaaagtgaaataatagaggccacaatctctgataaaatcaaatgaaattagaaataacaagaaccaaccaaaaataatattcttgtggaatttaaaattcagacttctgagttacttttagtattaaaagaaaatggaaattgaaagtataggctttttagaaaagagttataatgagtagctatgaattaaaggctgtgggatttggcaaaagcagtaactagtagaatatttatgtccttaaatgcacttattagaaaatacaaaatattttctaacaaatgacaatccaagataaagtatataagtttaattaaggaagaagaaataaattttttaaagttgaatcggaaactaattaatatagaaagaaagaacagaccttaataataaaccaaacacttattccttgagaaggtcaacaaaacatgcaaaacctcacaaatctgatctaaagaaaatagcattaagcataagaaattacaaatatggagagtttttaaattataagaaaatattatatagaatattttacatttgaaaatctaaatgaaatagataattttctaggaaaatcatcaaaattgactcaagaaacagaaccaataaacatggcagaaatgtgacatgtctatttctaaaacagaacctggatcaggaatacaactgggtagacataaatccagacaacatcacttannnnnnnnnnnnnnnnnnnnttctctttctgtgggactcacaggagtgcacctgcaggaggatgtcagcttgtggctggcttatatctggttcttccatcccatacgttgtttctggatgttactcctcttcttagccaaatcctctgtttcttcactgtctctagccaacctcattggcatgaggttccattttggtctcagacaccatccaacctctccttggatgttccatttgcatttcatctttgatgattcactgtgcttcagtcctttttatacctctgaaacttctatccttggattaaactaagttttaaaaggctttgaattatttaattatttaagggacctttcggatatgtatacaattcttataagtaagcctgtaatctgtcagtagcaggatttgcaactcagtaggcatgtttttcacatgatcatgggatgcttttgagttcattggctcactcaagcatgtaaaaagcctcgctacacattttgctgcatctatgttgaacaaaataggttgaatctggtttcatgagattggggagggtgaggactcaatgtctcctgggtcaacaggaacaagggtggaacttgaggacttccaggctatcaaggtgaggctgtccttaaggcggcagctgccaggatctcactggcagtgaagaggccaccgagatgggggatgtggccaagtgccacatgaaactgccaggaacatgggcgagtcatttaaaaagattctttatccttcataaagaactgatgcttctgaggcagttttattgagtcagaataagttaattggccatcgctgtgtggacccttttctatggacatgtatgtggcattttagctccatttttatttctcaaaaatttagtgaggattgcagtctgcatttaataaagtcctcgttaacccaaaagtattactggtagctttccagaatgagagaaacgatctccaccctgacttgctgctttttgtttcccggtagaacgtccgtcctgggcatctcctttggggctgcgtttctcttgctggccttcatcctcttcgtctgctttgctggacagcttctggtaggtattcaaatgtggcgcttctttgaaaagtatgctcatttcatgaaagctgatttcttgcctaaaactttccaaaacaaggagcttattgctttaccacttcaagaacgccagatcccagttaaggaaacacacacccttcaggtctataaccaggaatatagactgggacccctcatgcacaannnnnnnnnnnnnnnnnnnnaatatgaagatgattcaaaacgttcgatgtcacatcagaagttgcattcttgcttatttggtgtcaatatatttttatcatttcctttaagttttcagagtatttatagcagcaaatgcaagtataatatgaggctttcagtgtacaggaggattaaaactaacacaggagcagaaaaccaaacactgcctgtcctcactcataagtgggagttgaacaatgaggacacatggacacagggaggggaacatcacacactggggcctgttggagggtgggggaaaaggggagggatagcattaggacaaatacctaatgcatgcggggcataaaacctagatgatgggttcataggtgcagcaaaccaccatggcacatgtatgcctatgtaacaaacctgcacattcagcacctgtatcccagaacttaaagtaaaatttaaaaaaaaaagtaaacctaatacattgctacatccactttcaagctataaaatgttggagtagttgaagaaagcatacgttaaaatatcttttattagtgtttaatttaagccaatcaggtttaaatgctagttctggatatacagattaaacctaaaattgaaagtctaaagcaagtgttgctagctggccatgagtctatgagagcatcgtaaggatgcaaacaatgggatagaaggccctgaagataagccactgtttcgttttgttcaatggagatgacctgggacagagaggccactctgagcttctcagcagctctcttccttgcccccatgggcattctcaagagaagcttcagtgatttttttaataaaaatttttacatgataattaataacctattataaaaaataaatagaaatgttctttaaaatatttttcaatggatgcattttatatgagttctgcagttacagactacagtctagatattttcacattgtcaaaattatgatttcttctgctggttagactgtaacaacgcatttagatgacaccgccaaggaagcctcctgaggtttgtggcctgtctgttacctctcaggagtattgtggcttctatgaaagaattttttctcattctgcatgcgtttatagtttgcatctgtggctttattgcaatgttgttttgcttttcataaaacacactactactgctagcaacaacatcaggacagcgcgatagtggcctcttagaatcctcgtcctcccttcaaaagctctgaaaagtggcagtcctgacycccacgctgtccattgcattccagtctgatgtgctgaaaggctttggccaagggtggttaagattccaaagcttgtctctgcctttccgcagtcgactgtaagcactttgtcctytgtgccttatacctttgcaaacttgtgtggattttgtttactgtttgatagtttagatgtttcaaattgtattgaaagctcttccaaaaatgggactgtggcttctgctttacccaaatgcacacatagcatctcgattctctgaaaccccctgaagacattgtgggttgtatagaggagggaagacccttggttaatatgaatccactccgaaaggccctgatggaactctttggcaaagtttgaaaacgcttattgtagaaagaagcctggttttctatgttcccggaatcatccctcaggtggaaaggcacacaggctcccctgctctcttccttgcccccacaaatctcctgaagcccatgtctcaggtttccaaaacaggaaccatcattggtggttccattggaaatcccaacctagttctaattaagtcagttcagatcattgtgactaactagccatatttatcattttctatcccagggaatctggtcttggatatgggggcatgtggtatatttagggtatcaggctgactttttttcattctactctctaagttgttatattaaagaaacatagagctgggggcagaaaaaaatatctcaggaacaactctgctgcgtctgtgggaaagcattgttcctctctggtgcctccctttcagcctcgctggaatcccacgccctgctgcccctctcatagctcctcctgtggccagcctgaggccccggtaagctgtcaaggtgacacccacagctcctcctgccctcccgtccctggagcttcccaggaccctggcctccacaggccacatgctagaaagttctttttgactccgtggtatcacaaagggaagatttcaatgctacaaatgcattggtgcttacctcctcctcacaagaagcctggatggtgtcaaagtgcccaggaagcctagacgtggcgacacttggtcctcctaaacttgattccataagatccgtgaatgaggctccccctagtggccagctgcaattcctcctccttggatgtaatccatgaaaaaaatcaagaaggaattcttttcactttaataataggtccttttttactgtttaaatcattctttaaggattttttaatttgcaacatcaaatatattggtgtacagccaatttaagaaggcttaagtgcactctgcactctgccatccaaattcagtcaaaaactgctcatcacaaatattctgcagtggtcatggagaaacattgtcacttcctaagtgctcattccctggcttcttaatagcttcccagttgtgtaaggttttataatgatttgcatttattatgaattaaatactgagtttattaaagagtacttaatacccgaaacttgccttctattaacgtatggtaactttctgaaaacttcgatgccaaagacagtatttgtgctctaataccagctttcagttctccgtatgaagaaataacataaaatgtaatacttcataaaggaagctgaagagaggtcagcctggctaatgttttcttccaagagctttgcctctgtcattctctgttgcacagaaagcgtaatgccaataaatcaaattgattgcttgttttacaactggccttgataaaaaggtagaaaaatatcaaaataggcaaaaaaaatggtgataatgatgaattgcagattttttcctgttgatagaaaaatcgtacaggtatttgttcagtgacatgttctcaaacacatggcaggcatttcttttctgtgatcattatttctgtgagaagcccagccctcgcctccatcggccccttcactcccacccgaggcatgccccatgctggctccctgctacccccacattgcccaggtctcagttcttgtgcacgtgggtgggcccagccaccgggcaccttccaagataccttgaaactgcaccaagcccttctttttacaccgtgggactgacaatctgtgtcacgtagcttagcctccatcatataagatctcactgagacctctaaattgtttctgtttccccttgaatatatagagttccttgtactgtagcatttttatggggtcctttcttactttctcctctcatccggctctggttagcactccctcatctcatggaggccaacctttctcaagccgagttaggtgtcccctgcagaaccttctccaaatgtcccagcatggggacagrctctatgtgtcaatgatcacgtggatgagagaaggaatgtgagtcagtggccttcatcacgctgcgtcaaaatgccttgttcacatatgccatgattccttgactctgacgtgcctccagctgtctcctctgttggaaattatcatctaactttcataatccaactctgaagagcccgcctttgcaccaccaactcctctcatgctgrctggccgggattcccattttgcgttattacttttattcttgtggatggaaagatcttcagtgagttcactgtagccctattttgttcattgtactacttcaggcacttgaaaaacacaagataaatatttaatatcaatctgcttgaaggaatgttgggttgcacccaagtgcggtttcctggtaccactgctcagaaaacattccacccccattctcaccccaactggactccttccgaacttgaagctctgaatccagctcacagtcatggcatcctgctccgcattctggcgggttcccagcctctgcatctgggcctggcatcctgatgttctcacttgttggatctccttagacacctctgcctcaggtgccttcctaggcccatwtagcagccccttcatctcaccattgccagctattctcaggcagagaaatatgtgccctaggggaccttctccagatggcttagcaggagggcgggttctatgtgtaaaggaatgtgtgggtgagagaagggatggtaagtcggtggccttcgtcacactgcattgaaatttcttgctcacattcaccatgattccttgactctgaaatgctttctacatcggatgctatttagcatttcagaatttaaaactcaagaggtgagagggaacctagagataacctcatccagcctctaattctgtggatgagggaccaaggactccaaaggtgccatccacttaagtgagtttttatttccaattatttaaaataaacatttccccccaccctccaacacacacacacacacacacasasacacacacacacacacacacacacaaaatgctgaagaagctgtaatcaggcttcttgaggatgcaaatggaggctttggagtagaatcaggaatgcaatgactatgaggtctgcaaaggcttcctatccttgggtaagaacctttggaataaatccaaactatttatgatgggcaagatcccaatgagtggttctgattccagcctcatcatagtttataagtagtaaatgttatattaaaaatacctacttactctgctaggcacttagcttctactggctcatttatggtcacaagggcccttggaggtaatatccatttgacagtttaatagaaccggggctcacagatgctacataacttgccttcccagtggtatatagcaagtaggtgttggaaccagaattggaatcaagccttggaaccttatagtagaagcaggttgcagagggtgccaggctgtgtgtggggtgagtcacaggcagacggtgcccagcactaggcagggatgcccatgttcatggacatggaccagcatggcaccaaagttgccttgtgactactcagcacccattgatcaaaatcacattggtaagtcatggtaacctcacatagtacctattcctattcttctctactctagtttcctaaagtatgtttttcagctgttggtcccatttatttaaaactaggttctgggcaaagtgtaaattcatcttaaaagacatttgataatttttttaagttaatttataattgtatttagattaaagtaatctagtaagaaagtactcagtattataataatactttacaaaatgttttatacatataatagtccttcaaagtattttcagacattattttatttgataatgaaaataatccattttatctaggcagaagctaagactagaataagagattcaagttcacattttcattacaattagcaattaaaaatagtactagttgtcattgtagcagtaatagtaataagtgcacattcacagtcagatttaactttctaaactacctgaggcagacttacctttctatgataaatacaagagagtgactctaaccaaaaattccaccaaacaaaccaacccccaaaacacctttagaacgcatatgctggatacggcaaatgaaaatgccagaaaatatcagaagaaatttttctctcagtgttgttaccttgtgctttcgatagcagagataatacgatgccagcccaccaacgttcttccaggcagagataaaagcgcaaatagagaggtcgcctcgggaaagggaaagtaggtcacacagctaatagaaaagctttctaccccacagcagtgtttttcccttgaagtctgtgttctttcctgtcaatatccctccaccatattttatttttggttagtatttgcctggtgttccttgttccatctttctactttcagcttttccttgtcaatgaaaagaatataggttttaggtgtgtctctggtgaacagcatgtagctctatgtccttttctctgatccaaacatctctctctcttatttgacaagtgtgatccatttacctgtattataattattactaaaatcttttaaaaccaaatttgtatctttttgcttctacttgtttttccttcttttctgccttcttttggactcctggagtttattctcttttattctctctagtgacttggaacttatatactctagtttgttttttcagttattaccttaaaaccgtaacatgtacacatgattaacaaagtatattattaataatatctccactttcttgttgaacaatacagggaccatgctctgagtctggtaatttttctcatcttccatactagcatggtttaaatttttctaaacttaaactgctcaaattattcaatgtttattcctgtttttgttaaacaatgtatttgtttactattttttccaaataccattccacctttctggactcagtttccatattactaaaatgcttccttttataatccttcccatgagggtttgtatataatatacccactcagattttgtattttaaaaagtctttatcttttccccattgtgattatttataattttttctaacattctaaaaacaggattccataatttcctggcctctgtgggaatgagattaactctcctgtccatctaactgttgtagacacttggtcccttgtctcggtgggagtttttgtaggatttgctctttgtatcatgggcagtagattccaggtgtcaaagtgcagcctgacttttatttttgagactcagctgtgtattctctaccacagacctcataatccgctctaggtctgcaacgtcattgtccaatatctccttgtgttttgtctcttccctggtctttctgttctgcttttttcaaacttttatcagaggtatgttgaatctcttcatcatatcctctgtgtctcagtctctttttcctattttccacttctttatctttctgtgctattttgtggtttatttcctgagatgtttcatagcctctcccattcacgggcagttcatccagttcctcaataaccatttagtttttaatttcaatatctacattttcatctctagaaagtttatktggctcattttaaaaaatacttgttatttttccttaacaactcactcattcatatggattataatccctcttttgttactttaatcttaatttagaagctatttcaggttgttgtcgtatctgcagatctcgtggtgctaattcgactacctctaatgtcttttgattcttcctcatayggtccattgccttaggtactttataatttggtttttattgtgaggttatgttcaggaggaactgccccagcccccagatgggacatccctgcacactgtagtctaaagtatcatttaccrgcagtgtcattcttgcttctgccatagccccaaggattttctctggttttgacctaattaacaacccttcaatttggaattcttattatgaatcaggtaatgtgatttcaaacccaacactttagggtttggattgatccttggaagcttattgacacttccctgagctagtgaatggggctcttctagacttctttgtacagaaagtatagcagtttgaggctctggattttattcaagagtcttagttgcaccctgtccacgtttggctggcccaaggaaatatcttcttttccctatgggtgttaaaagctcaccccctaagtgccatagcctgagtcctgatccaggacactcctggacccaccccacagcctcagttcctttatcactgagctctctctttgtttctgtgccctggtaatttccctttgagtccatcattaaaaatagtaaacagaatcaacacgtatttgacgagttcctaccatttaacaaacactatactggcctctgggaaaacagagacaagtgcgatatggtcactgtcctcaaccacctctgcatttggccagagacaagcatgtcagcaaaaatgatgcaatgtggtacccagtggagcaacagtgcagggatgtggctcacccagggcgaaaagaagaaacaggttgattttgtaaaatatgattgattggcataaagaagtcttcctatgggaaattaaaggacaattaaataatcaaagtacacatcacagtctttgtgacattaaatgttacaagtaattattgctccggcttattcctgccattcagaatgacggtcctcagctaattaaaatgccaaagtagatgttcctttaggcaaatacacaaaagtacatgtttatatgaaacatgaaaccactatattttccaagcaagatttttaagatggatttcgtttttctaataataaaagtttgcttctcagccactctgatatctttataacttttctggatttttttttcattttattaagttcacttaatatgagcttctacttctcttcaagtgtctcatcttattgttaaaatggaaactaatgaaactgtaaatgaagtctacttttataatgattaagttaaattatgaagaattaattttagagtgaaaaatttagatttaacttaatttgagagactaccagttgtttccattgcaagtggatcaaaacaagggaagaaaaaaaaaaggaaagagagagggaaggaagagaagctggctgatatttttggtggagcatgtatgaacattttgtttttctgaggaagatctgcatgtactggattaagaacattgggattcatcccacgtttttcctaccacaccccactgctcgttgtccccatcatcaattctatgataggattttcctttttttttttttttttttctgagacacagtcttgctctgtcactcaggctggagtacagtagtgcaatctcagctcactgcaacctctgcctcccgggttcaagcagttttcctgcttcagcctccttagtagctgggattacaggcacccgccaccacacccagcttatttttgtctttttagtagagacagggtttcaccatgttggccaggatagtctcaaactcctgacctcatgatctgcccatctcagcctcccaaagtgctgggattacaggcgtgagccacagtgcctggctaggattttcctatatatttcttcttttattacatctcccactgcatttagtatcaatcccttgtttgttaatggatgaatgtgatattcacatccaagtgcatttctagaaggtacacggtgagctcactgtaagtaagagccgatcatggggttcagtgagatgatcaaggaagggaggaaacagatgtggttgaaattatgccaggagttaaaccaaagatcaaagaaaatgactccactgactgggctcacagcaggcattttctcattttcagttgaatagtatcttccaaataaaggccaaaatattttttgagatgttgtcatttataacatttaattaggatggtcggaattttgataaacatttttccaccagagcctttaatacttaatcaaaaacaggataaactgaagccaatgatcatatcaagagccaagttgtaatttttctacagagctacacactgaatcaagggtctccatttttcttaatcaggttccttccattttagaatcttagtcctgtttctcctcttatccccatcattggtttcttctgctccccccaccagcttgatcctccacttcctctttcatccctgtcattgcaactgtcacctctctgttctcttctactttcttgtccttgccagcagcaatgcctaccaatttttacacttcagaacaggtttacttaccttgtcactgcttggtgacaaggaaagataccgcctgtctccctgacctctggaacaacacatttggcataagttttaaaacaattgtgagggagaactttgaggtatgcatggaaaatgcatgggtgaataattgaaccaagcgcatcctgaacctgttgtgccaaacccatgtctgccaaacccccatgcgtctagtaagtagctgcaagtgctgcygattcgtcattttgcctggcatgtcacacgaacagaaaaaaattcctgcatatctgcccgggtstgttttagtaagttactagcctatgagcagaatataacatattcctattagattagcatatttgacaagattatcaccacgtatttttctaaatcttcaaacacagtaacttgttttaattttgtaatttcaaaaatttgtctgtgtaataactagctaatattttacctaattgacagtgatatgcaatcttagctagatgtacattttcccctgaagtaataaactttttaaatgttctactgttaacattttcattatcatatctattgataatttctgtgtacagaaattatcataatttcacaaatataagagcattgattttaataattttctcttaaaggtactaactgtagtcaatctggatgtgaatatataaatactgtcttaatttgcgagaatcaaaccaaatgccattatctaatggaatctgagctagatgagcataatatttcatttgaagctcggctcttcatattgtattataggttggtgcaaaagtagttgcggtttaaaggtaatggcaaaaaacaaaacaaacaaacaaaaaaaaactcagctactcaggaggctgagacaggagaatcgcttgaacctaggaggcggaggttgcagtgagcagagatcgtgccattgaactccagcctgagtggtgagagagcaagactccgtctcaggaaaaaaaaaaagaaaaaacaaaacaaaacaaaacaaaaaaccttcttctacggaacacagatctgactgtgttttgtgatattagtattattagaagtagcatgcattaaacaataatgataaccattcgtgggtggatgttctctggctacctgaccctctaagatgctgcatgttcagagcattaagggacatcttgctgcatgacagatttcctgccatcaccaacccctatccaaacctgctcttaagtagaagcgtcaagtacagatctggttcttctgttgccggtgatcagatgtcctgcagagctgggccgagggcgccccctgccgccagtcagcagtccagctctgggcagcctgtgcggctgagggcagcagtggctcaagctccctggtaggtactcagagaaatgagacgagggcgcaggaaaatcagcccaagaagtgaacccggaacctggtcctgcgtctccctcaggggggcatgtgcgctgtacacaaacattgttcatcttttcctatcaggagctggaaggaagaaaaaaaaaaacatggtggaaaggagtagagaggaggagattttgttgttgtttacatagatataaaggaaataggattttggtcactaaaatgtttctaagaaacattgtgttttcttcattgaaataacaggaagagctaacacttgtaagtcctgttgcacgcaccttctctaactcgtttaaacctctgcaaagacagaggaggcaggtactgttattatccccgtttcagagaggaagaaactgggaccccatttcagagaggatcattaatttgcgcaagtttcccagcagtagaggtttgaagctaggccatggctgattctttaaccttctcaactcctctctcctgtgtttagacgatcattcaactgttgaatcaacattgaacatacagcaatgcttagggcaacaataattttaggaacaatacaaaaataagatgtgaaagaagtagagaactgaaagcgcagcctatttgtgctgttcaggaatattctttatttgaatttgaatttcactgatgtcacaccagctttgtttgccaataggttaacttggtagtatcgatcaaagggcataatttatgttattccttcttctgaatttcttgaaatcatcaccttgttttgtttccaagacacataaccttgggaccacaggcccgttagtgtgaagataacaatgtcaatccctggaggacttttacttcctgcttctcatatcagataacgtatgcaaattatgcccacgcagcatctgcataggcagagttgatgtcacccacagttcartggaactctgtgtactgctccacactcatacctgggagaatatggtgagaatccttggaaaggtggccctcaagatgggtgagcttatgcactgagaccccatggtgaatggggagcaaatgctggctgtcgttccccaaagatctcaattccttcttgtatcaaaaaagtttccccaacccccatatgtatagccgcatattcacaacagccaagaggtgaagcaactcagtgtccattttatgaatggataaaaaaaagtatagatccatacaatggagttttattcaagctttaaaaaagaaggaaatcttggcataatgctacaacatcgtgatctctggtgacattatgctgaaagaaataagccagtcacaaaaggagaactactagatggttccacttataggaggtcttagmatagtcacagtcatggaaacaggaaggggaatggtggttgccgggggctgggaggagggaggaacggggagttgtttttccatgggtatagggtttcaatttggtaagactgaaaatcctagagatgttacacaacaatgtgaatgtggttgtcactactgaactgtacacttgaaaatgrtttaaagggcacattttatattatgtgtttctaacaccgttaaaaattgtttggagggaaaaaaggagcttctccgtgtgggagaaaacccccacaagaccagacgagaccacacaaagccatcaagcctcgtgcctgagattttcagacaccgtatttgtaagttcaggcgccaaactaagtctgtggcctgggctgtattcttgtaatctgctaatgcagtgttaaaagggttaggagatgtgttgatcgcttgccacataaatcagctgaataaatgataactttcatcatagctgtgatcagagacccaacacatcccccagggtgatttaattaactgacatttttcctttgagaaaggaatcacttaaaaacataatttcaggtctgttttaaaagacatacaagcacattgtacctttgtcataggcatttaatttgttctcaattggtagcaatgatgccaacataattttaataaggtttgtgacttcgtatgggtccccaggggaggatagaatctacatgtttagtctatgaacaatgttggtgcttcttgtggttgtaaacattgtcatcaagaaactggagagaagtcatcagctagcaatgcttctctttttctttctctcttctcctagcaatgcagcaaaaaagcctctcccctgctcatgtggcttttgaagtcctcgggcatcattgccaaccgcccctggccacggatctctctcacgatcatcaccacagccatcatattaatgatggccgtgttcaacatggtaagccccagagcatggccgtgttcaacatggtaagccccagaccacagccgtgttcaacatggtaagccccacaccatggctgtgttcaacatgctcagccccggggtgagtcagggctcacagcaggcagggtgttcttcccttctgggacctgttctgtggaattttggaaacttgcatttggctcctttgcaacaccagttgctgcctattaaatttagcatctcttggctacagcagtcatttctctaaggaaaggggtgctttcacagagccaccttgagagactgggtgactccttggakcagttccccacttccttgctcatggtggcccctcaacaggctacagaaataactgcaatgtcttaaggatagtcatgagggacaaaggaaccctcaaactaaggagagtgcggtgtcctgccctggagtttaaatgatgcgattgcaaccccttgctccccgtctcaccagctgcacgactagaaagacgttttcattgaactccacaggctccattttcacttctttgaaagtgggaaccaagacttctctaccaaggtggttctaaggattcaatgagccagtgttcccaccacacttaggacagtcctggccattttgtaactattgaaccaatggccactctgactatatcagtctcatcagtgccggttatctcccccacaatagacacttggctcatcagggtgctttgagacacgtccttattgttctcacatcagcagcagcagctgtaggagatctgatgcttcctgtagtggaggcttcactcactgtgggaaatgcagtgttaggagatgtagtccttgccttccagggacccaaagccaggttgtggtgacagaccatatattatttcatcataataacgtcgtttttataaagtagaaagcattcatgcagcaaaatgtaatatttattgtatataaagatgtgtctggtatgtgctgcatgctcagaccccaaagacagttctctgccttccaggagtaggagtaggagacagacagctgggtaacctcatcatcaagtcattctgaaatgaggaggtgaaggcagcaacagaggcatgaggggaagggagagcagggcctgctcgatggaatcctggagggcggaaaggaggagtctgccacatgggcctggaggaagtgaggggcaagggcaggtgggcggaaggggagaaggtgggatgtttgcatctgggacaagagtagaaattcatattacgaagtagagaaaaacaaggctgaagaagtgggttaggaccttgaatgtttacatggggtcagtcctccaggtcacgcgagagatcgtaaattcctctcaaacacctgcagattcaggtgagggtgatgccacctggaccccagatgggccaagcactagcagcaggggtgggatggcctctccatcgctttgtgtagcctggaaattgatcttagtgacacctgcaaaggggccttcagagagaagctgtagcttgtcctccctgctgtctagaggtgaatgtgtgcaattcccataggttttcctgtgtcatgagtttggggacaagtatgctggcagccctacctcacctgcctgtgtgtcccagctccctctcaggagctccccaagaaagaacatgaggccagccctgatgtgggctccccaggcatgcgggccactgaaaggtgccaccacagctacctcctccagccacctgctcagcctccagagcagctagttcaaaggctcatctgttgctggggaaggaggggctcaccaggcaagtccatgcaggccacagcctcccagggctaaggcaggcccttggctggcagtcccctgtggagaggtcctgacaggccaggtccaccgctggaagccctcctcctgcccttctgtaagatgagcgagtggcacgaagtgggtctccccttcttcttaggtgtttgcatcacccgaggctcattttctgctgcagggatcataaggcctccctctgggggaggaggcctcctcttctaggtctcaggcgtgcctggatggtgacgtcatttatttccaattagggcttaatccagagggaatgggaaacagctgaagagggaaaatgtgccatgtctagacaacaagcaattccctggggtaccactgggctccagaaagatagaaacgccagggctcaggtggagacctgctccattcatctacctgaggcacctgctcataggagccagactggccagccagggtattctgcctgaagaatagggttggggggtgggggtggtggggagtggttcttgctatggtcccagagctttcttcagggggacagcctcagggtggggaactcaagatgagagatttaagacagggacaggagaggctttcttgaaagagcctttctgcagacacaccacgagccacaagaatgcctcagctctctgcataggcaatttcctggatactgcaaggatgtgaagaaatcacagggaaggaacctggacagagagagaggcaggcaaggggcattggcctgagatgccagaagcatgagtgtgttttctaaaatgggtttttcgggctcgactttgtaacctgcatttatgcattagtcctgctcttccaagatccagctccccaggaaagtgcactgccaagcaccaagtggactttggtagatgaaagctgtgagagagactgggtcggaagttgactccgtagccaaggggctgaggatgaaagcacacttgaagggcagcagggtgcacaagctaaggttccaatttactcagaacccttgggtgactgacacatgcccgtaaaattaagccgcctcctggcccgtcaggagtgtgttcaccatgcatgcaagcaaattgagcacacttcctgagagttgaccttcactggccagtagcagcacatatgagttaggggacaatacatttaatatcatatacacacacgtaagagtgagatcattttttctttctctcattgtataaatttcagttgtggaacatgatgttttgatatacatataaattgtgaaatgattactgcaggcaagcaatttaacacatccatcaccttccacatagcttcttgtgtgtgtgattagagcacctaaaatctactccctcagcaaatcttaaatacaacagaatattattaactaagtcctccagctgtgcattagaaatccagatgcattcatcccacatgactgcagctttgtaccctttgacctacatctccccatttcctggcctccccaacacctggtaaccaccattctactctctgtttctgtgtattcaactttgttttattccacgtatgagatcatgcagtattcatttttctgtacgtggcttatttcacttagcataatgttctgcatatccatctatgttgttgcaaatgacaagatttttctcttttttaaggctggataatattccattgtgtatgtgtgtgtatcaaaatttcttttcttttcttttcttttttttttttttttttttttgagatggagtctcgccctgtcacccaggctggagtgcaatggggtgatcttggctcactgcaacctctgcttcccaggttcaaatgattctcctgcctcagccccctgagtagctgggatttcaggcacccgccactacgcccacctaatttttgtatttttagtagagatgcggtttcaccatgctggccaggctggtcttgaactccttaccgcgtgatccactgcctcggcctcccaaagtgctgggattacaggtgtgggccaccatgcccagcccaaaatttctttatctaatcatccatcaatagatagattgtttccgtatcttgggtgttatgaataatgctagaatgaactttgaggagatctttgttttttttcacatgccctaggaaagtgccttccattcattagttattaaatgaaagaatgagtgaatgaataggtaagcatacagccctttaaataagaaacgatttcttttcgtaacatctagtttgaccttataaaaccaggatttatcacctaattcttaaagacgatataaatgagaaacaaatctggtttggaagctaactctattttgtatagcataattagtcatgattgacagacagttcagtcactgtctataaatgtttgacaagctgatcatttaggaggagacattctttcaacagtagctacgatcctttagagagagaacacctgccttcagcaacagaaatatgtcttccagtgttgttttccttcctccacagaagacacattaaaagtatgatggatgacccttgaggtgtatttctttctcaaaaatcattcatcacactttttaatacttttaatgtgccttctgcagattttccacataccaagcggccttctgtagcagtaggagcaggaaataagctaaattaccttcccccacttttcctgtctatcgattaagggggagaagaaatcagagctgctcaagcactgaattcctccaagagtgcagaaaaataccatttgtgttgatacctggtgccatgaaccacacgggtgctcctcttgtacttatgtcaaagaaaaatcataaaactgtaggaaagttggtgttaggtacagaaaggaagtaacatgacctggctgtagagccttgtttataatgtcttattaatcacagaagaggcaggacttgtccatggggctctgcctctggccacacctgaggatctgcagatgccctgggcccctgagctctgactgtgtgaggcagaggcagtgcccggggccacacacaggtggtgctgatgcagcactcagactgcccaggcagacaggcaggttaggagggagcacctgtgcagggtggtgcaagggaagcatactcctgtcactcatgtcaggaaggcgacaccttctgctgaggatgtgagtgaaacctagtctttacctacatgcagttcaatggtcccagggttgtttccctttttacctagtcccactttaacctgcccatcctggagcagtttctggttaaaggagtacagcttttcatgtttttctccgtatttttttttttctgaacacattttccagactgatggagccccatccccaagtagtatttctatttctcagttgttaacccagtgagactaatccaggcatcggactcacatttcagcaagaataacagttatttgtgttggtggagtggggggctgtgggcgcgcatatgctttaagtcacggggaagaacatttaatttgctctcagaaaacttcatcgttttaaagacatagcctcaatcatgtcctcatgtatagcacctatgattttttttaagttttccctttgagacagaggaagagtgctttcattttctttgttttttttgtttgtttgtttgtttgtttgtttgtttttctgtttctaatgtatttttttttttccgagacggagtctcgttctgtcgcccaggctggagtgcagtggcgggatctcggctcactgcaagctccgcctcccgggttcacgccattctgcctctgcgtcccgcgtagctgggactacaggcgcccgccaccacgcccggccaattttttgtattttttagtagagacggggtttcaccatgttagccaagatggtctcgatctcctgacctcgtgatccacccacctcggcctcccaaagtgctgggatgacaggcgtgagccaccgcgcccggcctctaatgtattttttaattatgtaaaatatatataaataaggtatattattgaacaatttttaaacatacaatttagtaacattaagtacatttgcaatgttgcgcgaccatcactaccatctatctccagagcgcttttcattttccctacagcaactgtgtctccatgaaacactcactccccatcctccctctccccagccccaggtcaccattgtgctgcttcctatttctatgaatttgcctattctagggacctcacatgagtggagtcacacaatatctgtccctctgtgtctggctccttgcccctggcatcgtgccctcgggtgttccttttcttctggaagccccagtccctctgcagccggtgagccttggtttgccctgcgtttttccagccagtggcaagcagcccttattaattgcctctctgtcatcgcttgccatgactctgtacctcaaaggggagagatgcattaggagtaacatgtgacggcttgaggctgcccygacctgtccctgctgttgactgggtggatgggctggttcatcccgaggctccacgtcaatttccagtcactgatatttattcccagcctgcattttaatgacccttacaaaagccagggtcaacgggaacagtgtgttcagagaactggctttttaaatctcattactcattggtattgaatgccaaaatgtccaagtcagttttatttccaatgaattgtgcgattttaacaggatatcttaaacacttgatgtttatccatgtgataccaacacctcaatcaaaagtggagaaaaacaattggttgtccatgcttgtttcatacgtagtgttttttccatcttagtctccagctagctgttgagaatcacatatgagtggccgaatgtgctgccattttattcctgacattttgagaatgttgtcacttgattcctcacagcattttgcaatttcttctgagaaatttccaagaaatttattataagtaaagcatatataaatctgtgagmcacccagacaaggagttagccatagttaactatagtctagtcaggtagacttctaattccaaccaaatgacaaacacaatgatgtcatcaggcataaaacaatactaaagcacctgttcacaatttaatgtgattcgaaaaatgtaattctgatatgttttaaattgcctgagaaatgtaaaatttgcaagtaaactaaaaatatgcagtgttcattagcattttatttaggatgttttgaacagattgatgacatcattgtcccaattgtgacaaaggatgtggaaaattaaattgggtccagagaagagctgcctaaatcattatgatgctaaaaatattttcagtgsagaaagttggggcagttttacctggagggaaggtgggcaagggattagtaactctcttgagtatttgactggctacaattagggaatgacatgagtttgttactttaaaatgcaaagaagacggaggaagggaagctgattcaaaattgtagtatgattttagacagaatgaagagtttcttgaatttacgggtagttgatattaataaatactagaaagacatagcagaagtgggttaggaaacgttgtgtgtagtgattggagttttctcttgtactttaagttcaaccatcatatttattgcaaaacctccttgcaagacacatttttcacaaagtaaactactcattcattgtatgtcaagaatgcaacacttcattttacctagttttttgcctataggtgatatataatcaagaagtttttgttaattattttaagatccttggcacttaagactagtaacccaccaagctaaacaatctccttttgtttgccatttattgattttttaatatttaaatcaattgaatttttggtctatcaaatctaaatctaaatctgtacccttttggagcctgatgtttgccaagcaattattccattcgtataagtttttccaaaatgttagcacatttgtagttcagccagggatgtgatgatttttacaagttctttcatcatacataaagaaatctactacgtttctttgatgcttaaatcagcattttgccaaatttagtcaaatgatataacggcagaaataccrtatctcgtatctctattgactgtgagaggaatgttcccaagaatagactaagtaaatgtcttcttatctgtccaaataaattagtttaggtatttgacaagaactatgcaatccagagaaataactccacagaaacaaacaaaagcaaccatagaaactatagggaaattttactttttaaaccttgaatatgtatggttaaccctatgcagaaaacacaagctgtttaataggtttatggatgagattaatttctttcagtaaaaggaatgggctgaagtcatgagtctctggtttgtttccagaacattcctctgacccttagccacatgacagaaaagtggctgatccgtgggtatttagtctgtgtgcagcttctgtaggacagacagcgagcgagcgagagagagagagaggatgagagagagaaaaagagagatacacatttctactgccttgctaacaggttgatactgtccttctgatgcttatattggtgaccattacataagagctaattattttctcagcattaccttttttgtttttttagtttaaatcccctttccagcagtccagagaacatccatccttttaaatttttcaccccttatgattctgagttgccaggcactcacaaataatagatacaaatgtcgaggctggtgattgcattttgcccataaaattaattttcattctaaacatcaaaaattcataggactgtattgactcatttaatgtttgagccaagatrgcaaagatactggggggaaaaaagcattccgaaggctccgatttgatggtagagagttgaatgtatatatggtgatattggcttcaaaggtgatatcggtttcaaatgtaattctaaccacgccctctgcccagagctttgtgtacttttaatttactgtttgataaaggcgcctccaattcctttaatgtgaattttgaagttctggaattctctattgaatgtatagaacaataaattgttaattacttattcaatagaaattcccgagtccacataaacaatcctgtttactgtgcataaggaacacagaattcataaagttagcacccacctgctagttatttaatctaatttacattaattcattgaaaaaaaccttctctttgcagtttttcctgagtgactcagaggaaacaatccctccaactgccaacacaacaaacacaagcttttcagcctcaaataatcaggtggcgattctgcgtgcgcagaatttatttttcctcccggtaagaacattgcaattatgactgctttggtggctctcctgtatgctcgtagtctgtataacatatatcctttagtctcagatctgttctagactttgcatttcctctctggtatcaatccctgagtggttctgaatttacaaatgtcagcctctgctagaagtctgggcccttgggaactggctacacttatatctgaaaacttacaatgttattgtcatgctttcaccagtaatgtttccttcttctcttaaccactacagcatttctagcatatttcctaccatatggcattcaattataaggcactatgtttctgggtttcttacttagagacattgctaattgttccagtgaattaatattatcccccttaaagctgtgataaaactgcccacatctcattatcttccctcttctttggcaacatacgttgctgagtgattctgttccctagtaattcttgctaactgactcatcttaaccagtgtcacaaaggacctaggttaaaacttcaaaacttattaacacattagtcttctaagtggagagttaggtcagttatttactgcttaacaactttgtccttccataaatcgtttgtggaaaaaaaaaaagttttgctactctcctttgcactttccaaataattatctgaaagtagtgcagattatgctcgtttagtttccgtgtcaaataatgggttttgacaatgctaagggaactattttggggactgaaattggtaatttaatatgtacgctttcaaaattccttaccaaaaattttaactccgttagctttggcaatagagtggatttatttcctattcctccttctctgatttgcttccttgatattttgctctggtcctttttcccttcccatcatttaatttcttgggaagctcacagctccatgcacagatagaagtggcttctgggccaggcggggtggctcacacctgtaatctcagcactttgggagkccgaggcaggcagatcacgaggtcaggagatcaagaccatcctgcctaacacggtgaaaccccgtctctactaaaaataaaaaaaaattagccggatgtggtggcaggtgcctatagtcccagctacttgggagactgaggcaggataatggcatgaacctgggaggcagagcttgcagtaagccaagatcgtgccactgcactccagcctgggcgacagagtgagattctgtctcaaaaagaaaaaaaaaaagaagtggcttctggtgttctttcctggaggcttctgaggccttgactaggtcatgggcaaaatgaccaaggtccaaaagcaatgtccccttgggcttgggaagaggggggtgctataggttcatcccctacccagaagatcctgcgcttcaaattaggtgttatcataaactccagtaagggctaggcgttgccttctctatttagttatgtgaaaagtgaaaagctagagtcattgtgagagtttattgactgtaatctcactgtgggccatttgtgggccatttggagctctcttttttagagaaatatttaaattaacggtgtggcctgcctattcctccttgatccaatggcgttagcatccatatgatccataggctggttgctgggaagagagtgcaccgaccaaacagtccccctttcgcattcacgtggcactttgagtttaaaattttaacatgaagatgcattttgacaggaaaaaaatgtatagctgcaatatttttttaaatctctccttccactatgtttgagccgaacaactcaccacacttggcatcactaaaagaataaggaaatcattatgaatttcatttaggtaaatctgtataatatcttatttgcaatcaaagaaaattattaaaaacttaaagtggggaaaggcaacatttactcaacctttaaagattctgaaaaagcacacaatagggtctctcaaatctaggtgggatttagtaaacaggctactatctttccaatcatgaggccttgaagatcctggccagcgttgccaaggaagccccaggtctacgtggactggctgcccagaaaccacattgtgaactcacgggtttagcagtcctcaaggagcctggagacatcctggcttcctccctaaaggatcccagggaacagtagaaaagccattttgtgagtgtgtgccaaacaggcgtcatttctctcaaaccctatgttatgtgatgcctgaagttgaccagcaagctgagaagcatgcccagttcactgctggtggtggtataaagtgatataactcttctaagtggtaatttcaatagttatcaaaaagcacaagacagacacactttttaccctgtaacactaattttgaaaattaattttaaaagtgaaaaggtttaccaaaaacatgtttgtgcatgtgtttatgtaacatcaacaaaaagaaagaaaacaacctaaaaatatgaaaatgcaaattttaaaatacattttattgtaacacacgataaggttatgcttaaccaccatataagacattgtaaaaaaattaatgacatataaatgcatatgcataataaattattcattgaaaagtattgttttaaaaaatacaaaacagtattattttaatttttaaaaataatactaccaataataagtagcaagaaaaaggctggaaacacmtatacaaataatgaatagtggctaaagtggatgttggggattatcagagacccttatttttatatatatcctttcatatatttcccaatttttaacatctggtgtattatttctctagtgggaaaacatagtccttttaaaatacccaaattagctataaagatctttgccaagttgtttgtaccacagcaggcacttggtatgcattacatcatttcatccaaaaatgaccctggtgaagtagatattattgggattctcgttttgcaagtgaagaagctaagacccagagactttagkgttgataaattactcccgataatggtggctgttaccttactgtaaaatgcaagttggtttcaatgattaggtcaaaactggtaaacattactagcaatcaggttaccagtaagtacactccaatagaagtcggttcagtatcctattgccagaatcgctgactatctggagccttacccggtcagctaaaccgtggagccaggacaggctcccagcctggtatcctgcagtgtcctctcccacacatccctggatggctatttgcaggttcccaacctacctttttatgccagatcatctcttgcacagtctccaagcattctagaaagccatttaacagaaatggactaaaagtatgcttcccattaccatacatattttagtagttgttctgaaatgtgaaaataaaaattttaaagcctaagaatgaattttgaaatgtgaaaccttagcatattttataggtgttgacacctagttcaaaggttcaaactgtgaaaaactttaaaaatttaccccaggtccccacacaccaaacaatccacatatacccattgatacatacacaccctcttataagtggttccttattctgctctctcattcgattaggctgaactggttgataactttaattataacagtggttttcaagcataattttagaaacagagctgttccaaaaaccaaaacttacaaaggactttagtttatcataataatagcagaatttacaagcttctcatggactaggctgttctgaactcttttgttacttaatcttcgtgagaattctccaagatgggtgttatcatcatctttactttgagtgactcatggaagacacaggattgccttgttaagatcagctgctttggggaatccgaggggacaggatcactgaataagagccttgcccccaccagttcctggggcaatttcctgggtttgaaggagcagttttaaaatactcaagactattgattaaatggctactaggttataaataagggcttctcaaactmtttgtgaaggcccttttttcatttcgctttgttttgtgtttttaatttctaatctatgacagactaatgcttttgaaaaatgtaatggtgaattaccagcaaaatgaactaaaaaggaagccatatgaaatgcaagctcatatttcgttatattcaacagaaacaagctcactctgccaagtttctatccacattctgtacctgtcttgcagaactcactgctgtactttgagtggtcttcttctaagcaacatggagcattaatgtaccttgtatcagaggcctcagacctgccctgaagtagatacttagtaacttctctaaggtgacaagggctgaactctcatagaaataaggtctcctttcaaagagcatgctagacccctcctccctctgagatactgcctgtccacctgttcacagctctgttgattctattgttttactacattaacccacatcatctcttcttttccttttcctgttctctgtcgtgggaaggcatgagaggcagaagagtggagacttgacatcgggcaattgcagctaagaaactgtgcttacaacactctgtattccttaaaatgctgccacctgaagtgaagggtggccttcacattcccatgcaaaggaagactttaactccctgaagagtgacccagttgatgtgtaatccagtgcgaggtgttggtcttccttttgaagccacagtgtcaggtcgaagtccttactgatggatttctactcattcctgcttgagtgcctccactcaagcatgccccttacaaagagaaagcctgccatatgatcactgcaagctcctattcccaacttttctttcttccttccacaagaacaggactgttgagctaatatcagtggccttccacataggttaatgtagatggctttagctggggaaatcaaaggaagagctcaaatgacaaaaataagcagttcttaccaggcttactcaacatgatgaaattaaaatggagtagtttaaaagctgggctatttttaaagacaaggtttaaaaaacatcaataagatctatgttttattaaaagtcttaatttttttgagtgttgtctctgttctaggaatgctgagatagaaacacaaacccttgttcacagaaaccccgtaatgtagcaaataaagcctttctgaggatggcacctgtttccctgcagcaagtccctcctggcgtgcaggactctgggctctgtgcattacttttttatctctgttgttttcaatgacctacaaggagaatatgattaccctcattttacagtgtcatgcggacactgtgatataagcaagttaggtcactggctgaaagtaagtgagctaatgagttagtgaagagttgaattcagagctatccaaagcctatctgaacggtgcctgcagtggtaaatggggaggaaatggctcacctggggcaggcctgccttcagcttgttctgccctaagatggaagataccagctcgctggccgccacttggttcgtccgctttcttctggtgcctgtcaaactcccggggggattcatgactcaccctggtcaaggcttttaatttaagtccttctgttttaaataggccctctgacacacaatttctcttttaataaaatgtctgggcttccttatgcttttaacagagctatctgtaatgatttatattctcttaatgaattaaagaattgaaaggccaaaaaagatcctatagacttaacttacatttaaggaatgtataggaggccacagtgttttcattttcaagaaatagataacattggcttatagtgatgtgtcttccatataagttttttttacaatttatttctaaaaagtggcaatatacatgcttctttttatttatcatgcaaggttgagtcggaaagctttggatgattttttttttttctgaatttaacatatccaggcatttaccactggatcaaagatgagaaacaagcctctgttttcacagccaccttatatgttgaccagatgagatgggcggtggtcccctgattgtaattgtttcagcatttctcagaagagatcctaagtatcygtctggtgtccttccctgtttcagtactttatctacagctgcattctgggactgatatcctgttccgtgttcctgcgggtaaactatgagctgaagatgttgatcatgatggtggccttggtgggctacaacaccatcctactscacacccacgcccacgtcctgggcgactacagccaggtcttatttgagaggtgagccacggcctcttccttctcttactatagttctttcccagcctgtggatagcatgagtgtgtgttgagtaaatgcaagttagcgatgtcattgtcattgataaatcattctgagagaatttctttgaagtgatgcctcagaaagacaatatgtgtttttgttatagattacatctgattatgtattcccaaacacacatagaagatgtgaagtggtttggagagaagaactgtgttataactgtactatgttgacaaaagtaatctaagattgtcgacctcagcactattgacattttggactaaataattctctgttgcgggcgccgtcctgtgcgtggtaggtagggtgtttagtgacatccctggcctttacccactgaatgccagtcagagtctcttctgccccaagtcatgacaactgaaaatgtccctagaaattgccaaatgtcctcaggaaggcaaaatggccctcagttcaaagcaaaatattgaaaaaataagtagctgtattcacaagttacagtgttacatttttcactagagattttctaaaatactgttatggggaaggggaactatcagtcctgaaaattctttgttctgtggagaaattgacttccaagaaaatatatggttgctttaggtctttcaaccataagcctagatgcagcaagaatgattctaccaggtgtactcactgaggtttataaccggtttcctgttaccaaattacttccataagcttataatgaatatttgtttgaaaaaaattgttttaatcattatgatactttccacatcacatctcaaaagcaaaacaacattttataacaagtgttaggtttatttctgaacccaccagatgtcaaagtattttctaggagtgcttggcactgtcctccatcttatttctacatttattttaaaataatataaatgccttaaatatttgcattgatttattactccagaaagttgttttgtgttgacagtacatggccacctatttcttcactggagacccggtgttaggaacggcagttatcccactgtgtagacatttcttaccaataagaacctttgcagaaggtgcaacccattcttttcacctaatttaattttcatcatcttccacacgatgaaactctactaatctgtaatcaagcttaaggcagtggggttgcaaaaatgcataattatatttatgattccttagccaaaatgagaatggaagttaattttccaataaattctcaaaattgccaactaaacatgctttactattgctctactatatccagaaagcctgtgttgtattcctaaataaatgtagcattattgattttcacgcgcagctgataacgctactaagtttccttttattaaatttaaagcacctgaatatgttacacatctgcagcaaaagaagaaatcagattagcaagtttctggtgtggagagaattgcttctggggacctcagtggggcgcttgaagagataatctctgaatggaaccctagcagcaggagactagttatcaggttgaagaaaaggagttttgcctttagatcacattctctgtattaaaggtgttttgtatttgcgctcggtttgtctttgcaatgaccttgaagctagggagactgacttgagaagcctcggcgacttgccttcacttccatcagtaaagccagcatcctcctcgggggcacgcacctgtctctcacttcctaattttttaaaaaaattttgtggatacataataggtatacatatttatggggtacatgagatgttttcatacatcttgcaatgtgaaataattgcatcatggagaatggggtatccatcccctcaagcatttatcctttgtgttacatataatccagttacactttttacttatttatttatttgaggcagaattttgctctgtcactcaggctggagtgcagtggcacagtctgggttcactgcaacctctgcctcctgggttcaagcgattttcctgcttcagcctctctagtagctgggattacaggtgcctgccaccatgcccagctactttgtgtgtgtgtgtgtgtgtgtgtgtgtgtgtgtgtatgcacacacatacatatacatatacatatacatacacgtatatatttttagtagagacagagtttcatcatgttggccaggctgctctcaaacttctggcctcaagtgatccacccacctcagcctcccaaagtgttgagattacaggcatgagccacagcgcctggcctcttttagttttgattgtttgtttgtttgagatggagtctcactctgttgcccaggctggagtacagtggtttgatctctgctcagtgcaacccccacctcccaggttcaagcaattctcctgcttcagcctcctgagtagctaggattgcaggcagccgccaccatgcctggctgatttttgtatttttagtagagatggggtttcaccatgttggccaggctactcttgatctcctgacctcaggtgatccacctgcctcagcctcccaaagtgctgggattacaggcataagccaccgcacccagacttagttatttttaaatgtacaattaagttattattgattatagttgccttgtgctatgaaatagtaggtcttactcattattttttcctacttcctaattttcatcagaagttctggcacttcttgaactgatccctgaacgggctgcacgatattatcagaagcatcttcaatggaaagatgagtcttaactgatgcgatagcagaaaagcataatacctcaaaatcaatgaatattctatgatgtccacttaaaactaaccccacatgggagacccttaagagtgggaatttagaagccccccgatttctccagcctcattgcctgttttacgtaaccctgtgactcatgccagaggtaaaaccaatcaatgtcaatgttttctttctcttttctgagatccaagagcttttccccatcaaataattgaaatcagttttctcatcctttgccttgcttattgatgctgacacacacttcccaatatgaaagtgagatccttaaaaaaaaaaaaaaaaaaaaaagctgtgtaacatgatgccttgagagtgaacatcacttaatccaaagccagaggtgcccctgagggtgggagctggctcacaggacggccgggcagcactgccttttctgattgagcccctctgtgccattgaagtcacggcattttgtcccatccgtttggtgacctgtctctgggcgccacattcttgcctcattcttactccttgccttctctcttctgttctggtcttctttctgggacccttgcttggctgtggcaggtcagtgtccttcctgtccacccaggcccctagacctgctcctcattgaccttgartgctctgacgacactgtgatggttaatgttagatgtcaacatgattggattgaaggatgtctaggtagctggtaaagtattgtttctgggtgtgtctgcgtgggtgttgccagagaagactgacatttgagtcggtggactgggagaggaagacccaccctcagtgtgatgggcaccacccaatcagctgccagcacaaccagaacaaagcaggtgaaagaagaataagctggcttgctggctcttatggttttcatctttatcctgtgctggatgcttcgtgcccttgaacatcaaactccaacatcaaaggttctttggcctttggactccaggacttgtacagcagtatctccagggttcttagtacagaaggctgcactgttggtttccctggttttgaggctttgggacttggactgagccactcccagcatctctctttccctgctttgcagacggcctgtcatggggcttcaccttgtgatctggtgagccaattctcggtaataaactcccttcwatatatatatatatacatcctattagttctagccctctggaaaaccccaactaatacatagacctccctcaagcttctggctttcacccctcggtgtgcctgaggaccaagcagctcctctgtcctgtttcaccccggaaaggtggaaggtacccatcctggatgaaggggacatggcttctgttgcctgttaaccccttttctgtgatatacacatatgggctgaggactttaacacactcttctgaatcatgcagaagagaagatctgaactaaataccatggcttatgaacagtgcctgcaactgtgcctggcatctagtactcaaaaaacatctgttgaatgaatgaacaaaagcatgtcatgctctcgaacaatgggaagagcctgacaccagcttcctgaaatctcttcgcctcacctgcttccctgaagacagagcctatctccagatcactgaggatgtgtcttttagtatccacatcaggttctgtttatatctttatatttcaaaggaaagttcagggaaggcatctctgtttaaaggcagtgccagccatcttcctctgtactttgtcctgcatgtgacttcgtcatggctcctatggcaaggccttttcagaaccaacttggcattgctcatgggcaagccaacaagatgttacaaaccaatggagttggcagcggaaaaaggagaagtatgcactagaaaaacttcgtatcgatgaatagttaagaaaatggtatttaagacattcttacacattcaagagtatgaaaagtagacttttcaggaggaaaaaaagaccactcagagagagtgtgccattgaaaatccattaggaaggaggtcaggagtgtcccagtatttaacgtgacctgctgggacgtgattcggataagtcgcctcctgctgaaggcagcttggcagtttctcagatgtttcctattctttggtgttcacagcagtcctccatattgtctgtgaattgatcaataatggttgtggttcctatctatgacactgtctcccaaatcccttagccagagctgttgagacaccaactgctcttcaaggtgatggtgatgttaataacaactgatgttgctggaagctgtttttgtctcaaagacacttatccttcccatgacaaaaacttgctactgtgtctgcaagaagttgtcaaatttttcctgagttttttttcttacagaactgaaaagtctcaagggatgggtgttatttcacttggaccaagccattatgttaactcacctggaggctagaaatctacctttaattctagagacacatgggacatggagagcttgagcagagcagctaactaacaaggatccctaaagaccaattagttctgtgctggaactttagcccagtaaaataagtactttctggaaagcacataaatacggtgtttaagcagcagtgataaacagtgcttagcctcatccagaagctctagattgcaactggctgaaatgtctgcaaaagtttaccttcccagccttagcaacagcctcctatcaggaagagcattggagatgcttggacttgcacctgtcactgagatgcatgaactaagcaccttccttgtggtatttttctgctttccctgattttcccatgtctcatggaaatcccaatggctggaatttaggatattgcgatgtattttcacaatgtcctaacgagggattgattgatgatgaactgaaggaaagtcttgaggaaaaacaagaaaacctatcccacacaggaaaggtcaggaagagctgcagaccttaccctggggcagatggtctgtggatattcccaagaacctgaaattgttttcatgtcttttctttaaatgaagaatatatttcaaatttgcattccaagccataatatagtcaagttaatattgaaaatattttcgattcctttcagatttaccatctcagctttccccactctgcctgtttcctgcaccctatgccatttcagaaagtgaggagcacagcatgcttttctgtgcctgatacctactatcagggcagcagggagggaagcaatcccagctgcctaactttaacaacaaagcaagtcatcctagggctatgcagggtctaacaagcttcttttccttctataaagagcaaccgttagtgaactacttctctatctgacctaaaacagaaaatgtcctgtggtttggactcatctgcaggaagaaactcgatatttaggctcttttgttttgttctgtttgattttagaataggggaagggtttcacagggtctgtggcatagactccatagaatgtgcagtgtttctaatcatcagttcttccatgtgatgctaaagccatgccccgcccaaccacatcagatcgctctgaggtagcagtggcttccgacttaaaatcactcttcttcacaaaaggaaaccacaactgcattaatcaggtcacatgattgtctccacagcaaagggccagcactcccagtccaaccccccccccaacacacacttttgtcatcttttctgacctgccactgcctccggagctcttttctaagcaggagcctattccttaatttgtggttctgctgcagcactggcatgtctggcttggcatttatgaacacaactctgaaaaagcgggagcctttgagccatctgtccctggaagatgttgggccatctttgctgcaagttcacatggcattctgatgcatctgtgtccaagccagagaggagagaatgcccagaaaccccttagggaagatgagccatttccaagccaacacagtcatttgtccactcatttattcattttcacaacacacttctattgaatgcccttgatacggagcgtgggaaccctggctaagctgttgatcccatactttaccagccagccacgggccaggaggaagktactgcctcagtggctcaagtttgggagaagagtccaaagaggaaatccacaggatctgcaamaaacacagcaggagaggacaccatgaaagtagaccgagtgtgtcttagcaattccctgctgcttctcaagtcrgagttagatgaagattttctgacaaggcatgggactgacttattttgccttatgcatcttaacctcagattagttttctggggtgttttatcttgttttacgcaggacaatgttgtcttctggctctgtgattgaggtcccaatcccttgctgagtgaggctcagtgagcagactcgtccttgtggcattatcaattcggacaagacatttgctttctgcatcgtttgatactgacgattcctgaggatttgggggtcacttgtggacaaagccaggcattttctaatgtaatggtgtaaccagaggcaggaaagaaagataaaagagagattagctgaagaccatgaggatattgtgtgggtaaaggggaaggaagtcattgtctccttgttagcctggtctttataagctgtggccctcagtgatcagtgaaccgatttttttatttatcccaattagtgacctgagaagatatgattttacctcagctaaccactgttaacagcacaagagaaattagactcctttgggtacttttctttttaaaaatattcacccacagaaatgtaaagtttttgaaggtgggataatgtttgtgtctatgtgcctggactgctttccctcctgagaatcatgaaaatgtccttttttactccatctgaagtgtttgccttcaggttagaggctggttcactaagcaattcctccatctccctcaccagtacgttggggtgyggtgttcttttggactcctgaaacttgatgagcaaaatgattactccattaacaacctcaggcggagggccaacggcagacgcctgtgcggcacgggagcatctgagtccccagtgtctgatttttagataagaaaggaagtgtgttccatcacattttggctaccattgtcgttgtgttggaaatcatgtagttagaaactttctgttatattagctgtgtcttctctacttcataactcaatgacggtgccaccctaacacatgagatctgaagtagatttcatccttaaaacataaaggagagagagagaaagagagagggaaagagagagggaggagagagagctcatacccaactagctgtgcagctcatatttctctaaacagctgacctgattggtgggctgaattgtgtcccccaaaataagatataaagctttggtccccagtgtctcagaatgtgaccttatttggaaatagaatctttgcaagtggaagtagttaagatgaggtcatgctgaaggagggtggcccctaatccagtataagtgatgccctcctaaggagatggccaggtgaagagacagacacacaggaatgccacgtgatgatgaaggcagggattggagtcatgtggtggcaagctaagaaaagccaatgatggccagcaaactacctgaagtgagaccaaggcaaggaagcattccctaakggtttcagaaggacatggccctgagaacatcctactgtcagacttctagcccccacaacactgagatgatacatttgtgttattttaagtcacctagtttatgctacctcgttatagcaactctaggaaactaattcagagatcaacacaactgactactctgccagaaagatgtcctgggattttaatgtacctctccctgactcccaccatgctccatgcccctccttctcaccacctttctcatggacacacaaagagtgaggtgatctaggaactgatctacggtggagaaatgtcactgaaaccataggggccctaacagcatctatccacaagtggcccacacaagagagaagtccttcagtaggagttggcagttctcttttgctaacagaatgaaagaagtcttcagaaatccaagtgaaatccagaaaagccagatggagtccctagtagttgtcagagaacttcagaagagaaaaaggcagccgtgttttggtatgccagttggctctgtgggctgctcgtgcctygtgattcctgagatccatttaggtctgcactttcaaatccactccccagtcctgcagggagagcctctgctggtctagcttcctccaagctccccctccacccaccactattcctcaggaagactcaagatctgggagatgggtgagcagggtatttctacccccataaaccaagattcaaatgcattaatgtgaggactccccagacaggatttctcccaataggttgcttgtgtgaattttctgtctgattaactgaaaacccagcgaggtcttgaattgtctaagaggatcctacctatgtctctgtcrgtgagagggacctaagctggctctgtatgtttggggcatctggtcctttagttagaaatgcaaaggggacttgcgttctgatttgttgcactaatgaagctcctataaatcctggcctgagatttactcttagtttaggaattatgagggtggtgggtagaagaaggggatgtcatagatgctttttctggccccttggaattgtaaagtaatgtgatattcacaaagcagcatgcaaattaaaaactcagcctacattagcttcgtaggatgttagctgtgtggtaccactttcactattcaatatagcatgagcatggtcaatatagggtaaaaagagtttaaaattcatgaaagtcagagtcagaattggttttaracatctgcacccatcggtcacttcagctgtgctgttggacaccgcagtcataggctcagagaggagcaacttcatcttataaaatcaaagccagtgaaacaggaaggcagcactgctccccagcttcattctcagagagaaatggtgacctccttaagtttcacgagctcagattcctccagctgcggcaggtttggtggggaggaaagaactcctaatgcaagcacaaccttactggagagttctctgtggctctaagcccataagccactgggaccaggcaattctgtttcctcattcctgcaggaatccaccttttctttgcacttgagtctttctttctgttaataatattctccagtctgtgtttccttatctttttctctagtttcttagcctcaccccactccccttccttatcattctgtaattaatgttaaaaatcacaagtatcatttggaaagagtttcctatgtgtcaggctctgtgccagggatataagtatttaatgtagtggctaaaacagcctgcagggtaggggttggtacccacctttgactgatggggaaagtgacgtttgaagcggtttatgcaaggtcctatagctcaggattcaaacccaggctctcttgctttaaagcccacctgggcttttaatactacaccaaagcctcttgttatctcgtttgtccttgaaccccccacagagaagctggaaaaataaaaaaaacaaggacgacacacaagcagaaagtgatgacctgctgtttgtagttgatcaaatgccatcgatgctgcttatgtgacgtggtgtccatgcaccatccatttttatttttcaggtcttagttacagtcctatgtaatgttcgcatgtcagcatttgaaggatgtgtgggtgctcactgcctggaatgtgatagtgaggaytgggggagcccacccagtgcagtgacatcttggcagggatgaatgactgatgtcatttattataaacttgaacctgaggtcactcaggcagtgtacccaaaattttcatctctgttatgcctttgtgatacaaaatcatatgaaagagtgaataagattggatgactgcttgaaagttatakgaaactgtgtaattcagcttgcagaaattaagttccctgcttcatgtttatacctcacgtgattactcatttcaagcatactgtctctttcygagagtaatgatgaaaacattgaagaaaccatcgatccaattacccatactgatcccagaagtataaagaaaatgttaatattcttgtatgtcttcttttcatatttggtatagcttgatataaagtaggaagtctgtatgattttactgtgctctcagaatagggatttttgttttgttttaatgcaagctgggtttggaaggagatttgaaacttgtgtttggctggtatatgatgtagacaggcactagagaatctgatatttgttgatattcaaattctaagtcctgtatgcgtgttgttttgttgcattgttgtctgtttgtctgtctgttttttaatagaccaggcatttggaaagacctgaagaccatgggctctgtgtctctctctatattcttcatcacactgcttgttctgggtagacaggtaagaagtctgtttatatatatgtatgtataccttctctaaagtgctgtattaatagtgctttgctgtgcattgtagttaatcttcttggaaacaaacgtctaagaattagaatcatcttatcactgaagatnaaactagttagtacagggtgtggatgcttcgatatagacaaaaggaaaaatatctttcgtattttccacaaaaggcaaatgttatgaatggccaaaattttaatcagttaatttcctgttaaatctcaaaacaaattttgtagtttttgtaagcctacaaaagtgttccttcaataactgacactatttgaaaaaaaaaaaaaaatctccccttgactagggctttcatttgcatttcagaatatgtagcacacttgtttgaactgggcctgaatacctttgctgtcatttgcaatcattcctagaaatatgatcccctgttaaaaagttttattttgcaatgcaaatgaaactgttcttccttctttggtccctccaacccttctggtctcccacagaggctgtgggtgcaagatttttaaagacaattattcttcctctgccttcaacaaagacagttgcccaaagactacaagactcatctgaagccaagcacctctgcctcgtccacagtctgttttaagttctatgaagcgtggtgtgaaacaaacaaaaagcagtgatttatgtatttggaaygaacccatgaagaagcaatgccaattccattaaatctgcccaatatctaagaggtacactatacttatgagtttgggtctggcttccagttggcttccagttctccccacccaaaagctgttggtaattgcatagacagttggaccaagtctggatctggctgtcaggccagcagtccgggacaactgtcctctagcttcccaagcagtgtgagctgcatcctccgtaggagctcatggtgcagccctcatccatctccctagcaccgagctgtcctgtcctgctgcaaagctgtttgaggtcccttcttcccaccccaccacccctcttgcattttctctgttctgcattctttggcttgcagttttgacaacctgcaccatatccggttctttttccctggtttctcctgcaacccatttttcttttctcacgactggccrtctttctgctctcactcatatggcaggcatgctctcccttgagtactttataatttagatgtgagagaattgcgcttccttgaataatatcacctagatgatcatttctcagaaaacaatgcagccatcccctctgtgggatcacctgtttctccatttcatactggggatgctttttcctgctagaatcatctctcagattccttcacagcagcaaattttaagaaactcgtatcaaattaaattctcccaactttgttattggtcrttgagatgatacacattcagtaccactacataattatggttaagtccaatggctgacagttgatccatcaccctctaattaagataaataatcaaaagtgttcaatattatgattgagcaccaattttacacaattgggttgataccagtctcatagggagtcattccatttttgtctttagtgtagcaaaaagtaatatttacatctagaggcctagaaaaattattactccctctaaaggatttaccattcttcataaccattctttaacaccagctataaatcaccgaatctatataagacaccgtgggaaataccaaggtgagccaggaggctgacctgccatccaaaatcattgagtgaatgacttactaaggccccaagtcttctgggtaagaactttgaagtctgtgatccagtgctttagtactcccttccccgaaaggaggggaggtatatcacaaaacactccatattggaaataagatttttcaagtgccataagtaaagcattcatggcctcagttactgtatttcctgattggtttattaaatgatagtatatgcattttgcaacttattttcattgttatttttcctgctccatgaccatcttttttgaaatgatggagatatgtttgctttctgagcaaatcagtatactaaatattgctttaggtatctaagtagccttgatgaaaacataacacatctcttgtgcaacaggtacagtactacttgctgtactaaagtctagtttatgacagatgtgttaaccaactcaggagtctcttttgaaaaagaaagaagcttagtgtctcaccagagcttaaacagcagcacattgaggtgggatacatttatactataaaaccaggggacagtctacatgacctcaaaatgaagctgttgttttgtaggagagcttagaacccaagaatctacagggtcaccaactgccctgtactccagcccagtaactggttcttctgtctacgtagaaagatgtgaagccctccagttcctcaggttgttttcagaatcagaaaatcccagaaccrcacttgaggctgtgctagatgagagccccagcagggagggtcatggggtcccaggcatgtcctggaggattctcctgggctcttccttctgtctcactcactgttgatagagccagtgaaaagcaaattcggtgtctcttcatgggatctgggcccctgaaaacctgtagagtagccccaggcagaatccgagaggtgggtgacaatccgagggatgggaggctctcgaagctgaggaagcctgcgtgtctctccctgttcctcccctgcacacagaatcctctgtctcctctgcagcactgccctccctgagtcacccaggcaggggcttcatcttggcctctgctagacgcctgcgcatggcctcccgccatgtctctgagtcaaatcccccctcctttctcttgtaagsacacccgtcttgaggtttagggccaaccctagatccaggatgatattatcctgagatctttaactgaatcacattcataaagacwttatttccaaatcaggtcacatttgcaaataacaagggttaggacttggaactatcttttggaggattattattcaatgcattccatttgattggggattttttaagtcttttttgagggggcctttcatacaagctgctaatgtgccagctrcttacatataagacagaggattctaaacagattgcattgcttgggaaggtgatagatgattgatagatggatatagataaatagaaaggtaggtaggtagatagataggtagatagataaatagatttggcaaaatgtcatttcrgttcagtacagctgaaccgaaatactctgagtattccaaaatactctgattttttttagtaggagacttacaaactgcttacctgttatgcaataacaatggctctgaaaacctgagcaacatcctagcatggcgcatggaaacctttcatgctcacttgggttggacttgctgccttaactgctcccttggaggtggtttcatctcatgcttcacttttgtctaatttgaagtgtgcacctttgtcttctcaatacccccaccacttgttgcatctatcgttttagtttgaagccagtcacaccactgatttattttttttttaaatccattcttcaagtgagaaggcttttctagtcaatgtagagcataatttctatcagtccatggtgtggaaaatctggcatgaacgtgaaactttaaatataaacaaacttttatttttggggttttgtttttggtttttgagacagagtctcgttctgtttcccagactggagtgcagtggctcaatctctgctccctgcaacctccacctcctgggttcaagtgattctcctgcttcagcctcttgagtaactgggattacaggcgcgcacaaccaggcccggctaatttttgtatttttagtagagacgggattttgccaggtgggccaggctggtctcaaactgctgacctcaagtgacccacccaccttggcctcccaaagtgctgggattacaggcatgagccaccatgtctggctaaatataaacaaacttttaaaatatcttttttgcagttttttgaaaatgccttgctrtatgagataaacataaatgccacaccagaggaggagttttcctaatgtatgacagataatttgaatcaaacataactaatgaatgatcatcgttctttcaaatttcaaaatgtggattttaaatttttttaattcccatttgtgcatgagaggccatctgtgtgcatgtgtgtrtgttttgtgttactttgtactgtcattggtagaattaatcaactcaacaaagcaaaccaaaaacttgcagttagctcttctttgcatttatttgtcaataagtgactatctgtgtgaaatacacactctccactaagcccttctattacaggaagatccattcaagactatttcatgattaaattaaagtatttacatcataggaggcacaaaatgatgccaagacccaaaagactctttgtcagtaattgggcctctccattcctacaatgttagtaataactacttttaaaatacattatattttaatacattataaagcatgaacacaggtttttactaacaggcactrtcttaattaatatcaaaatgaacttttctctaaatgtaacgaatggcattctgtcagaacagcacaatcccaagtggaagaaaaatccatattttgcaatgattacataattatacaatttgtgttagggaaaaactaatttacaaatgctaaaggcaaactgccataaacgaacaatacagtttttattcaaatcatcaaaaaatgcacyctctctacagaggtatttttcatgtattcatcatttatattctacaattgcctcttttcaaaaaataatttgagccctcttttagtagcataactttgcaggaagctttaatggcgctttgaatttaagcctccatatagctgatttccctgtttctgaggctggttcttgttttttgcaaatccatgtcagaggttgactgaaggacatttcagggacacagagggctttatggggagggtggaagttctgtttgggggttcttttttcggtttcattttgttctttttgttttctctttaaaacctccactctctggcaggacaagatgcctattgtttctttacctctgtgtcctcttgtaacagaatgaatattactgtaggttagacttcttatggaagaacaaattcaaaaaagagcgggaggagatagagaccatggagaacctgaaccgcgtgctgctggagaacgtgcttcccgcgcacgtggctgagcacttcctggccaggagcctgaagaatgaggtcagaccaggggggctgggggctgggggagggggctggatgccatgatgacctgggtgagggctgaaagcttcttcagtgacataaaggctgcagtacttcacacatctgagtgttcaaattggccaagattggcttgaattgttcagttttcaaggagatattgattggttgtagagatatccgttgagaatagtgggttagaatgacctctaaaagtctgagtctggaggtggattcattattagagattttttccccaatcatgtaaagttctgaatgtcttttatgaggcactaggatmccaaatatgcctccaaagaagccactgctctctccccattgtgggaggaggcctgccttaccagcaygcaatggaggctcaaaccaagaggcaacgttaaaccatgcctcccacacgccccctgtttccccacactcagcttccctgasagccttccaaggctcttagaatttcaaagatatcagatacacagtgagtgtgacaggatttaggagttatctacacaagagcagaccaaagacttgagtccatccattagagtggatagaaatgggaatttcatggagtgtttatccaaatggattagctagagttgcaaagactacaatgtcagttaaatattgaaatgggttttgaagagatgttgtgagatgtctttaatattgctgaagtgcaagagaaagcagatatgtctacatttggacttaacgtgagaaacatgtatctgagcatccacagtacgcaaagccctgcgctcatttctgtggtgtttcccagatgtctgagatgtgtaaacsaagaagtgtctgagacaggtctcaatcaagttagaagtttattttccaaggttgaggatggtgcccaggaaaaagaaacacaagttacactaggattcctggcctgtgcttttcccaaagagagttttgaagactccaatactgaaaggggaaagagtggacagtaggggaaggaggaaaaggaataaaaagagaaacggggtagacaagagatggttacattcttgtgaggcttgattagtgctcattgaaaccacattttccatatgaaaagagaggagtcaggaaaagcccattatgccttcctctgcttgagccgagggatgatttctggtcttgtctttgtccagtacctgtgaagatcagctattaatttgcattgccaggataagagtcaacagaactctgttttctggtcagttttttttgggggggtgtctattctgaaagatttcagggcccacaaggaattttttcctgagcagttgtgagggaggccacctggggtgctccgtggcccttctatgttgcagccatccgtgtgggaacaaaaagcaggtagtttcttgcatgaatcagttcccaagcttaacttttagtgagtttggggtcctgagattttttttttcagaggtgtaacccctgttcttaggacattttcactgaggcatgggagtgcatgcgcaaaagaggtgggggtcacctgtagatggatgaactccttaatggataagctcaacctggatgataccagaacacaaagcaacctgcagtgagaagccttggaacagtatttttctgtagcggatttgaagttggcattaagaagaaggtrccaggtggcagatgaggtgctagacatcaccactcccatcttcctggaaatattcagggcacagtgggccttccagggctacacaacaagtctcatggcccactggctttcctatctcttctcctggtgtttactacatttggtgggttcttcagcacctgattttcctattgatcacaggtaataaaatyacaatgtctattaaagggccctctgttctsgttaacaggagtctccagcccatttttaaattcagcaaggtccccatgtttcccctgccctgtagccaggctggtggtggcccaggatayagagatgaatgggattagaggtggcctcatcctccgtgggcgcctcctggggwtaggatcctgttatctccaaggacactgggatgtaaatatggtactccagaaaggctgccacygtgaggaagtggcttctgaatctggaaataaagtgctagaaactagctgggagacgggggccagggggagagaggaacggggagagaacatttcaggctccaaggggctacttttccacaggcaccaggaaagtgcctaattcaagacctgagaagagcccactggagcaggcaggaagagagcaaagggagataagggagctgaggccgggcgcggtggctcacgcctgtaatctcatactttgggaggccaaggcgtttggatcacctgaggtcaggagttcaagaccagcctggccaacatggagaaaccccgtctctactaaaaatacaaaaaaaaaaaaaattagctgggcatggtggcgggtgcctgtaatcccagctacttgggaggttgaggcaggagaattgcttgaacctggaggtggaggttgcagtgagccgagctcgtgccattgcactccagcctcagcaacaagagcgaaactccatctctaaataaataaataaacatttttaaaagaatttgggagctgataggagggtcccttcctagacatgggctcagaggaaagctctggagctcgagaagctctgtgaaggtctgtggggagcacagaaggtaccctggccccagggttcagcctcacagccctgcagagccctgtctcatgtcctgacagcctccctgggccagacctccaggagtagcaggttctctctgctctttcctgtttgcttggcttattctaagcaagcatcagaatacagttaccctccttggaaataataaggaaaggcaagatggggaaggagaataaaacctagagctacacagtgcggcctcaaatcttactcccaacattgtctgttcctgtgaacgtgagctggttacttccctgtccgagcctcgccgtcctcatccataaaagaagaagcatggtgccttgccttccagttgctggaggcaggctgagggacatctgcatggtgccttcgcactgcagtcctccaggtgaggcgggcatttcacagaggcgtgcacgggacccacatccacacaggtgggatacgcatgagagggaagacagcagcaaagtgcgggtcttggcagctcacagtgactcctccacttcccctgtggccctgctgtgtaccagggacmttcatgccactgcacaaccctctggtgctcctgagggtgacgtgacattttcctccaagtttcctaaggagtgctgctgttgggttaaagacacacagtgtcagctgggtgcggtggctcaggcctgtaatctcagcactttgggaggccaaggcaagcggatcatgaggtcaggagttcaagaccagtctggccaacatagtgaaaccctgtatctactaaaaatacaaaaacaagttagccggrcatggtggtatgtgcctgtaatcccagctagtaaggagactgaggcaggagaatcgcacsaacccaggaggcagaaattgcagcgagccgagatcgtgcctttgcactccagcatgggcaacagtacgagacaccatctcaacaacaacaacaaaaaagacacacagtgtctcctgtagcattcaccaccctgcgagctccatggtgtaaagcygagtagtggggcaggcagcayggcctaacaggagcccrgagtggggactcgggacctggggtgagccctggttttggcactgccaagggcagctyggaaactttccaggagcaaagcaggaatgggaacatttagatgaagccagctctgggctttgtttctgtatttgtcaaataaagaaggtgaaccccttgggggtgtcatcacagccactgtagccctgtgtgtacatagggacctgtctttaagcattgatataaatccccctgcagatgatcagtgcctgttcaccaagcttccagttgcaacacctgaagatggttccttccttcattcgggaaacacggggtcctcaaatctacacctgactgggggcagcctacagccctataggagaatgaaagagcttggtttcagagctcttcagacttggaccagcatggatggctccacgttccataacaggcatgccaagggtgtttggatgacgctcaaggccagtgattcctgcctggtaggcttgcagtctcgctgctgacctgacatgttctctggaagggagaagagtggacactgaaccttaaatcagagcatcatcattcccactgtgatgctgggaaatgaaatgatcgtgtcattctgctcagctggcgggctgcagggttctctgtacttaatcacrcaatgcagatcttcccttggctgtaacatttcaaatgttactaccaatttctgtctaatagggtgagcaatgggggtgatggctactctagcagccattgtaagacttggggactaaactattaaaaggagcccccaatccccaccacaatcagagcagacctatgccgtctcctcaaggaccctgtactcccccaggggaggtttgctagccagttgcgggaacagtgagtgtggggagattctggaggcttcagtccccatgggaacagcactgcatgcaaaacagagcccacacaaagggcctgagcaagaaagagaggcaccaaccccctgccaaaagttctcagagttcccacagtgagtctcagaaagggagagttttgtttgtttctgaaaacacataatgaggrtgttataagaagagccacctgcgtgcataaagcatagcaaagtcgtgcccctcccttctgtggaatgtctcctgtggccatcggaccctgctgccctaaagtagmctcctcactggacagaagaatctatttccttgacctaatgatgtaatattaaccttgcaatcccaggccaggtggggctaatattgtgtggccttgcacagctgaatgataacggtgcccatgctgtttaagagtgtagctatcatcaaggtttctgtcccctctacagtgtcaggaccaaatactgacatcctgcctgagctcttttcctccctaaggyttccccaagcagaagccctaccccttactgaaactgcatggcagagtgtggctgatgctgggaccaaagaagtccctgcagacaagagcagtgcttctgaaagtgaagcacctgctaaacargctattmctggtccccacacaagccttccttgacctcctgggccctgagaggtgactgagagcaaagcatctgtcccagccctggcacctcttggctatggggcctcagagtcctctcagagaccattaccaatttttgaagcaataatttagatgaagctcttagaactgtgcatggcatgtagtaaatactgttagctatcttttaagcaaatatcccagattcatgcaaaacttgagaatcactgcccctgggaattgatcaaaagctttcagaaagggctcctgcccaacatttttagagcctgaataaagtggaaaacaaaacccaatgtaatcacttcgctcctgttcctggcattggataaaaagcactgtgggcagtgcctgccttcccagccccctctcagcagggtgggccaagccctggtgctgagtgctcagtgcctctgaatgcagaggcccsgggggaggcttctggggcrtggggtggatgggagcaggccctcagcccctttgtgtgggttgccccggcatccaccacactaatccatttccactaaactcttggtgatactgctctgtgagtcttctggaaataatacaggaaaacaagactttggcaaaagcaagtatagctatactttaccaatattgccggtttggttccagacctctgcaatraagtgaatatcactatcaagcgagtcacaaatttttgctttcccagcacatgtgaagattgtttacactatactgtatgttttaagtattcaatagcatgatgtgtaaaaaaaaatgtacataccttaactttaaaatactgtattgcaaaaaatgctgacatggatacacaaaatgagcacatgctgttgggaaaatggtgccattagacttggtcaagggagggtggcagcaaacattcactttgtgaaagatgcaatatctgtgcactgcaataaagcaagacgcaatacaacaaggtctayctataagccaaaaaaaaaaggacttgaagtcatgttttatttccctgcctgggatcagcttatacctgcatcctttctgacttaactagtgaaatacttcatrcataaacaggatgggggctgcttccctgcagaatcactgccctgaggatgaacgacttcctgggaccaaaactgacaggtcaggactctgggagagaccagggaggcagttccattcctctctgtggcacaacctgtggttgctgatgactttttgagtccagggcagggcgtctttggatagcctccactccatggcttctggaacaatgcttggaaaatggcacagcttatgccaagacctgcattaacacagatcatgtcatttttgctctcctacccactgcatcaatgcacaaaaggaaattaatttcccttcagaaatagggagtcaagaatgatgtaatcrctgtaacaatcaattctgaaaaggttttatttcaatgaagaagtgctcataggcctatgctcgggctcatgggcatagggctggctgtttgtgtctacactggctttkcagtgcctcttccttctcctgggcacttgtgttacttaaaacttcctgaagcttctccatcagctgttaactgtcatggccagattcagcccacacaaccctcaggctcatcaggagagttctgtgcacccagatgggagccttctctgtttcggaagcctgttctccccacctstgtgtgtggcaggaacatttctgaaaagccccttcaatgggcatcaaagccagctctcatcacttggggagaagactgcattttgtcaccaaatcgaccccgtgccaagtcccygggtggtagaggattgtgagccagacatcctcattcggagagagccaatgcctgatcaaaacaagccacatgagccacggatgccaccacagaaatttgggaaatgcccctcgtgtgcaaacagcacctccctttctgctggtgagaaccctcccagtgacgaccaggcagatcactcaacagtgctaagctttaagctctatgcccatgcgtcctctgcaggagggtcaggctagcatgcccttggggtttcaatagacgcttctgtactttctagtcatttgactcccctgagtaaattaggcattaactgacagttggggacaccaggtgcttaatggttcccacatagatcaactcgggaaacgtggacgatccaaagcctctatgcagcccaagtcagtgagacaaagcaccagtctggtctgggaggtgggagacctgagcgccggtggcagctttgaatgttttctagaacactccaacccccatgcccacctggatggagagccccagacgyctccacacctgggcccacggcaccaactgcactttattatgttttctggattttctctgtctctccaactagacttcatgctccctaagggcagggcttgtgttcttttcctctgtgtccctaacatctggtatgaagtctggcacacagcaggccctttgatagggcacgtgtgtgtgtaacagggcgtcagagggaatttcagcctgcgacactaagagacrcttgctctcttattccaaaggaggcattaaacagtgtgcagagcttacaaacgccttccttgacctgcagggagcttatgaattggccagaagactagaggttgaaagagggtttgggtagaatgtagtggggatgagccccctcctagaggggaaggtggggatcccccctcacttccagccttgtgaacaggccagaactgctcagcctgggagcaccccatgacttgagtctctgagtggtcctgggaagcatctccaactgggggacaccaatagcaggcaggttctgatacttggaaacactgaatgcaggtgctgatggggcatctgggcacacagggtggggagctgtggtttgggacatggctggactgtcagttgtttggacagcaaagggtgctcagtgttgcccaaggatcaagcaagaaaaagagaattggtgtagggttattttagatccaatgttacaaagctgcctgggkgacggggggaaggcagtgggaggtgaaggcacctccacagagaaactcaaagaaatagcccaaaagcccggacctgagagggtagtgaggagcaggaggratgtgcatggcctccatcatagaagactcaggtttgaggggatgtccagggatgggcgaaatggcagggagtcttccaaaaacccatgaaaacatccacaggaggaaagccaggtttgagtattcagggagcaggatgcagctaataggaagctgtcctgcctcgcagcctcttcctccttcccctcttctccattctggatggtttggaaaacccagctagcaagttaggaagagtggaggagtggtggagagagagtagaaaccaactgatcccccttctccacttgcaaaaggcccacactggggaagggcacaagccacaggtacaacgagggcaagagttttgactatttctttttttttttttttttttttttgagacggagtctygctctgtcacccaggctggagtgcagtggcacgatctcggctcactgcaagctctacctcccgggttcacgccattctcctgcctcagcctcccgagaagctgggactacaggcccccaccaccgtgcctggctaattttttgtatttttagtagagacggggtttcaccatggtctcaatctcctgacctcctgatctgcctacctcggcctcccaaagtgctgggattacaggcgtgagccaacgcgccctgccaagttttgactatttcttggactggggcctctaattatggatgagaggaccttgcattacacacagtgacatgcagggccacagggtagtcccaagtgttcgtccaagatrgggaagatctagccacactccaaaaactgaaaggggtagtggccacagaaacgcagttgctttgtgattattttttcwtgccttgagcttgttcaacagaatggttacatgtgaatgaatgttgaggagacgtctaaactcactttcaattctaaagctcagtaatacttttgggtagccatatgctgacatgggtcacccattctagaccttgaattccaaattatcttcaaaggctgcccacctgccctactccagcccccaggtcctctggaagtctaagacaatctcaggtcatctaccagtcagcatgcaatcctctctggccccacacccaatgcaaccacatgagggaacctctcttgagttcagtgcatggttctcagccctccaagtttcacaggctccagagaatttcagaagcctagaagtttccctggtttcccagtagttatagtcttatggaagccctgaatctgaggaccaggtgagcagtgacctgagctcmccctgggcattccctcagagcctcagagyttccaagagaccactctgccaaagaaagtgggtgatcagtttgtagtccaagctccccagaagcattcacggcctgcagagaatgcagggattggtcctggcccttccccttagccagctgagagccttggtggcaaccgcagctcccctgagctccatttcctcacgtagtctgtcattcttaatcaaggctgaacagcagaataacccagggaactttccaaaacaatgcctgcrcttggagcccagcctaggggatgagggtcgtttggtcagtggggaggcccaggcacctgccctctgggaagtcccattggagattctcccgtgcagccccattttggtcctgtgtaatgaaatgacatgtcagatccaaactgcccatcagttcagtcttgcatttcatcatctccaactcccagacacccttaaagactccagaggaaaatacaaaggtaaagtgacaggacccgcaagtgtcagaggacctgtgctacccccaaactgagcagtgaagcccatgatcatcccggagacttgatcaagtataaagtatagtatttacacgggtggattctactgtcagacttgataactccagcctcgggcaagtaatgtaacccctctgtgcctcagtttctttatttgtagatggaaaactctagtaccagcctcacagggttgtagttgtggtgagttcatgcacktaaagtgttcagagaggtgcccatcctaccatgtggtgagcgctcagtaagtgctggctattattgtgcttattcttgtcatcattatcattccccaaagagcactctggacagtgtcagcagagagtggggaaatgcaggatatagaaaatatgtccttggctgggtgcggtggctcacacctgtaatcccagcactttgggaggccaaggcgggtggatcacgaggtcaggagttcgagaccagcctggccaacatggtgaaaccctgtctctactaaaataaaaaaaattagctgggcatggtggtgcacacctgtaataccagctactcagtaggctgagggaggagaatcgcttggatccgcgaggtggaggttgcagtgagccaagatcacgccattgcactccagcctgggcaatagagtgagactttgtctcaaaaagaaaaaaaagtatgtcctcccctggctagatgcacccttttcctcaagcacagggacatcagtggagtttataccatttttataaaactgacatttttaactcacacaagatcctagggggttctcatccctgttctctgacccctggctgcagtcagcattgccagcgctgtgccttggctgtcataggctgtctaccgaggatatgagtgttcacaaaggcaactttgcagagagagagaaaacacaattctgcacaagaaaccagcacaatcatattgagcacaaaatagaaaagaaaaccttgatttcgttgttcatgtactttgtacagatcttgaggcagtagtagggattacagagtggctggtcctgagaaccagaaaaggacacgagtccatctttttctcaaaactgttgtggccttcacctgggttgccctggctctgatgggtttgtgacgggacctccctggggaaagaacagttcctctgaggtgccaccaaaccttggagttataatactatttaagtgcttgctctctgcaaaggagttcatctgggtgccccaaagagcagggcttactgataatgttcatgtagaatggattccctcgccctgccagacacacaggaagcaccaaccatttttccctcccctcagaggtcagccatcttgtttaacagaactctcctcacctttcctggagaagaaagcatttcccatgctgcactgcgtccacagtggccccggctagtctgcctgtgttagggccatctcaggggtctgaggaccccttgccagtggaagggcagatcctccacacctaggactagcccccaagaccacctaacaactcttcctttctggaaccttcattgaattcgaaggtgtcactgtgttgggaaaattatggaaacaccttgaaattgtgtttacaagacactgcaatttaactcatgtctgtggataaagaactatgagsttcttcctatttaaaaacaaaagaatatcatgaataaatatagtcagtgtctaatataatataaataagtagactgaggagctctattggttctttctggtgtaataagaagtaacttgatgaattccatacgctgttttcaggagacactgaagaggaaaattcatcaagactcccatccaaatactatagccataatgagttatttcaggacaatctgagagtttgggaaattattttgtttcccttcagttgttkaaaggacactttttactaagccagaactccgtggtctgttgtcattgtctcaagtcaatatgacagagaggtttaactggcaaggcacctcttcttaactggtagtggcctgaatccagctcattagaagctttcccctgagagcagcggcagcatctggattgggccgcggctggggtggggcaagtggagtaggcatttgggcgatgtctgtgtgaatcctggcataaacaagccacttgcctrtggagtgtttctgtttaaaggtcagtctyctagtgatcagctcttgcttttctcccaagcaggagctataccaccagtcctatgactgcrtctgygtcatgtttgcctccattccggatttcaaagaattttatacagaatccgaygtgaacaaggagggcttggaatgccttcggctcctgaacgagatcatcgctgactttgatgatgtaggtactgagagttgccctcgaagggcagcagtacactcagtctcacacctgtgcacttgaagttacttcaggatagtggcctatcccaaaaaaacttgtcctttggcataatttctggcagatggcattaaagccttttgctttatttaggtctctgactaatttaaggtagacaaatacattgtatttttgaagctggtatgactgctaggaacagctaccaaaatctgttaaatcaaatgtgtatccagtgtgctagtggattctttacaaaggcttgaattcgcggtaaaatacttgcccatccctttctagataaaaagataatgaattataatagactattggtgtgtctgtgcctacttcaatgcctttgtcagatatcaacttgcactatgcatggatgacattttcttaaaattataatctgtatggggggataatacaacatactttaggagggacagagtgtctgttttagaatttgaaatagatgttatttttcaactttctacatagagaatagtgtgttctatttcccagtaagaacaaacgcccctctggtttaaggatattgcagccacactattcttatcactatcttgcaaaatagaagaaaattgacatctgtccaggagcatatgttaatgatgattcatggaattttgaaatacagtgatgagattacataacacggtggtttcaggcaaacctcctaaatgtcttgtgggccctgtgcactttctgtcaccaccatcatcactgtgaggttgatgctagatattcatggtgacgtaatgaccgtcagcgattaccactgtgatcctgggtgcatcatgacaaatagcggctgggggtctcagctgctcctcagtgaaataaacattccccagtactaacgaatgagtgacagtggatatgtggataggtgatacagggatttgctcatctgtcttaaattattagatatgtaatcctggaggaatctcctctgaaatcaagagatccaagggaggggcaagaaaacgctcttggtctccggtcagcgccatttgagccctgccctcctgagcgggtatagaccttccagggcatccttcatgttcaagcccattcctcttccttcctacagcttccgttcttatccctacctttcctccatcccagctgaaagcctaactcagcagattaaggaggagtcaagtgggacgctgataactaattccaagacaagaaatagtagggctcgggccagctgtggtggcttgtgcctgtcatcctagcactttaggtggccaaggtgggaggatcgcttgagcccaggagtttgagaccagcctgggctacatagggagaccctgtctctgcaaaataatttttaaattagctgcacatggtagtgtatgcctgtgatctcagcctcttgggagtctgaagcaggaggttcacttgagcctggaagatggaggctgcactgagctatgatcacaccactgcactccagctagggtgacagagcaagactctgtctcgaatatatatatatatatttttatatatatgtgtgtgtgtatatatatacacacacacacacatgtatatcgtatggctcctcttctgtcctgcaaacagcagacttctcacttctcttaggcctcccatggaggggggaaagagaagagagagagagagagagagagagagagagmgagagctggtttctcttcctaatacatatattaggctagggctgatgacaaccattctagatctttattccatccacctcaagcactcagagggcaaaagccagtcctcagcactaataattgatcataaatcattctgaccatgcaagaaagagctcactcattgaatcataattttatatttatgcctttcaaatacatagtcaggaaatttattcaagcccatcrtcatttgcatcataattcatcttggttccttcactagcaaagtttgaacgctaattcgtgttccttggaagtaaatcattatgctgtactttcctccaaggacatgcgctgtatgaaatacaagaagttttcattcctggaaaagcccagggcccaagggtgcatacgcagtggttgaaacaagtcacggcattactgtgaaccagcatttgagaatgtctctataaaatgctcagcttcaggtcagcatccagctgagtaactggacggttgtcattgcttcacagcttctttccaagccaaaattcagtggagttgaaaagattaagaccattggcagcacatacatggcagcaacaggtctgagcgctgtgcccagccaggagcactcccaggtaagacgygttggccacttaacggcayaggtgagcctcaaccccatccacaaaccaccctgggaccaaaacagccatgaaatgccccaagaactgtatattttgtacaacctaaagctcagggtcaaggtcctatgagagaagatgaaaattccagacttcttagagccagaggatctgttcacagaactccttctgctggccaacaggagaagaaaaaccaatcagtagctgcttgttaccagataaatacacaatgaagtagaagatgaaagctagttatttgaaggagactcagtaagaatggatccaggtcttttgatttaaaagaatatagtcaaggccgtgtgcggtggctcacgtctgtaatcccagcactttgggaggccgaggtgggtggatctcttgagctcaggagtttgagaccaacctgggcaacatagtgaaaccccgtctttaccaaaaatacaaaaaaaaaaaatagccaggtgtggtagcatgcacttgtggtccctgttactcaagaggctgagatgggaggatggttgagcctgggaggtggaggttgcagtgaactgagatcgcaccactgcactccagcccgtgtgacagagtgacaccgcatctaaaaaatgaattaaaataaaataatgtggtcaaaaaacaagttggccacatggaaatttcattgaaaaggtcatttgggcaaaattgaatatcttcaatcaactaaggttttcgagattttctcgtgtgtgtgtgtgtgagagagagagagagagagacagcatgtatgtagacatgcttgtgtaacttgttggaatattagtaaaaaagacctcctttcccctcaggacagtggcctttgctgtggagcctgccctctgctgggcagaccacagagaaactgcacttaccagaacacactttctgtggacaggcaggttctcaaagagaagaagggttgagtaccatgtatgagcccctctcccataaccacctcccatgggaagagtgagagtggggagagaggcagcaggcaccataacagagctccctcttccaggaatatcatgagagggtcctagtttcccgcttaacattcatgcattcatgggcaaagagtagaacatggatagacgtctgactcaagatggaaccctagcattcttccagttaattggagtgatatgtattccattggttctcctcttcaggtggttgccttcagattattattttttaatgagtatgcattacttcagtaataaagaaaataaaagaaacaagccataaaagaaaccccagaagaaccttgcctttgaattctgagcaacaccctctcaagccatcatggagtctgtggccaaaggaaaactgctgtatcctctgcatggtgttgtagatttttaatggttagggttttttccagaacattaaagtgttaaaaaaattgaaaaaatgtaaaatcgagatattaaaatgtacaacattcttttaattttaaatattctatttataacccaaaccagaactaattacaattttagtttcctggctttcatggaaacaaatatatgctcctccaatgcctttaatgttctggaaaacattgaccattaaaaaaaaaataacattaagacatgtatagagacaggcatttttcttactgcctcaggctctaagatgctcagcacaacactgtcaggacctatgtgtcttagtctgcttggcctgccaggcagaataccacaggctgggtggcttaaatgacagaaatttatttctcacagttctgaaggctgggaaattcaggactgaggtgctggctgattaggtgtctgctgagggctcctcttctgtcttgcacacagcagccttctcacttctcttaggcctcccatggaggggagagagagagagagacagagacagagagagagctggtttctcttccactttaaagagggcaccagttccgttggatcggagctccacccttatcatcttagttgaccataattacctcctaacaaagctctgtcttcagtacagtcacctgggaggttagcacttcaacatataaattttagggaggacacaatcctgtccacagcagtatctttatttaaaatttcattattttagttcatcttgaatttttctgcattgattttgatttttaaaaatattgcactagcatattatttctcatgattgctgagcttctttctccttctgaagtttctctcctgaggtgagtgcctcacttacctcaccctcatccagttatgacttggaggcttctccagctcatctaatgagggccatcaggagcacttcacctgatcacatccactccagccctttgctcttggacagccaactaacaatactttggcagggcctcggagtgggagatcttccgaggcaccaccacatgaagacctgttccacaatcagtgtcactctacagcccagggtgcgtgtctgcctgttcttcctgaccctaactctgcctccatcagacccagtcttctggatgttcaagaaaagtctccaggtcttttctcttcctttccgcagccacgctttatagactgagagtccatagccactgcctttatctttcaccttctactttctctctacacctccacaatcctgcctcaccaatgccatcaggaactctactcttaatgaccaaaaaaacacttccagattccaaaattccagtccaatcacattctctgagcattcgtcctaggtgacgccctgtctgtggatggccgttgcctttgcctggtaatcctcccttggcttttgagcccttccattgtctggccccagcctgtgctccctctgtgtgggacattgtaatattctttccccaacccctcttctctatcagggacctctcctaagactttatctatcccctctgcacattcgatctccaccaaaacctctatccgctatcttgaccattgggccagacttggatcacttccagcttcctatagacaccctgctttctaacactactgccattttcttcttgtcctccccactttggaaacagggccccaaccctctgcctcagcctactgccctgacccatcccctacctctccctacagtctctacaccagccctcaaacatgcatgtgcttttgtgcagaccaacctgggtcctatccacatcctctccaggtatggtgcacccatgacctgtagcagcaccacctgtggtggttgttacagtggtttccagggacagcctcaagcctgctgtgtctctggggtgggctggggacccccatttccactagtttaccgaggtgattctgatgctcacagaagatgccctgcctggtcaaggagcctttcagaatctcactcatcagaatgccaaggctccaactttcacagaaggctttcccgtgccccaacctggggagctttgccttacctagctgtctgagtccagatcttatttcctttcttcactgtttgctacctgtcattttcaactttcctggaagtgtgtgtatgtttcttagccaccatccagactataacaggtgctatgtgttatgcagtggccttcaaagtccccagcagggcctttaaatgatcacccgtgtttgttcagggagtgattgcatctgtgcccagtccacctcccagacagtgtttagcttccttcactctgttttacaaacctgccacttccaatgcaaaccctctaaattctttccctgaccttgttgaacctttactgaatggctcctgagcccttacaacaagcctaggaggtaagtagtaaaactctttgcccattttaaagatggagaaactgaggcacggagcagtcaagtaactttctccatgttctagggaaaacaagtagccatagagtagggctcagacctgggtgtatctgtctgtccagagctccacatggcagcctctctggtgctgcttcctgttgtccttggctcacctgcccctccaccagcccccacccttycctgagcatccctgcacccctacatttgtatctatcctattcattcatcgctgctcccagccctttagcaaatcccttgccaggagccccattcctccaccctcagctgccccagcaatgaaacttgtcttcttagttatcattgaatggcttactgacttcaaacccagccactgttgttaacacatgactgttttcagggtagagttgaaagagcatgactatcaaatgaaactgcttattacttactattatagctaagtgttctgcacttctgttaccttacgcatgaaatggtgatcacgccctttgcatgaggctgttgagaagactatatttaatatgcaaaatacttaatcgactccatggccatagtaagtaataaaaatgctaacagtaataataatatagttgtggtttgtaccgtgttttgcatattggtaccattgctgactcaaatagaacagagataagagttttaggacattgaaatatgatatgtagtcatatccatggagggaaattctctcagtactgtatgtgctatttgtgattagagcatttaattagattctttataagggcatcctagaaatattttgaagtgcaatgaatgtattctgaaaggaaagttcattacaattgatttggggaaaataacatacctgataaatattcatgctaatattagttacttttataagaaatgaatgtcacttttaccttttgtaacctgcccaaaatgggcttaagcctttgcttctctagttatgaacaaaatactttctatttattgtttagccaaatctttagtctggcaacaaaagatattcagttacaaaatatatagggtaacccaagkaataatgtctttttcttaaatccaaaaagaggcaaattatctgggtaatggccttttgcagtttagcctttatttgtaattaccttggcattttctgtttgcagtaacaacatacttacccatggagaaacaagtgcacagaagtatatcagcacctagtgaggcagggcttttgtgcctggctctgttttgcctcatttgtactttttaaatgaaatgatccattctaattttaagcttaagtcaacaatgtggctaaatggttgcattacatgtaagaactgattgttgtttgtaaaagaaacaggcatttgtcaagaaaggaaatattaaactggaaatgggctttcattcattccctgagcacactccctgaggtgtagacaccctggcttggatttagtggtcggtagaaaatgagagtttgcccatctcaatggcccttcgttttgccctcaagacctcactctcttctaagcctcatacctgcagcccctgcttgtttctttccatggactttagagaaaactggtggctgtggtgtgttctccttgacttgtagagttttgcttttttttaaaaaggatattttgctggaaaatgatccaggtactcctgaaaattgatgggttatctacctgattggtgggttatcttcctgattgatgggttatctacctgattggtgggttatctgcttgaatggtgggttatctacctgattggtgggttatctgcttgaatggtgggttatccacctgatgggtgggttatctgcttgattggtgagttttctacctgatgggtgggttatctgcctgatgggtggattatctgcctgatgggtgggttatctacctagttggtgggttttctgcttgattagtgggttatctacctgtttggtgggttattttcctgattgatgggttatctacctggttggtggattatctgcttgattgctgggttatctacctgattggtgagttacctacctggttgtgggctacctgattgattggtgggttatctacctgatgagtgggttatctacctgagttatctacctggtaggtgggttatctgtttgattggtgggttatctacctgatcttcatcctgatgacaacagccagctggagcatagaagcaactgttcattagactgggagtgttctctccactactatagtccacaccactccctattgcctcattccttctgctgcactccagagcctcacctgttccacatctgaggggcttttcagatgtggaaatctgccctaatcaaagattagagataactctggtcttaacaagtatgtaaatagttttgatctttttcaaacaaatttttctaggaactgaagtcaaaagcaaagtttagggaaggaaactttcattcagacccatgctttgattgtagtattgctgtaatatgcagtacctctagccattactcacagtttctaacaggttgacacccatttcccccaacaacctggaaggaaagaacttgtactcccggaacagacagggaggggagggcaggggagcaagaggaaaggggggctgttctccagcaaggtgtcagcactggtgttgcttctattcttaaaaacatctgggccgggcgcagtggctcacgcctgtaatcccagcattttgaggggccaaggcgggtggatcatgaggtcaggagatcgagaccatcctaggtaacaaggtgaaaccccatctctactaaaaatacaaaaatgagccgggcgtggtggcaggcgcctgtagtcccagctactcgggaggctgaggcaggagaatagtgtgaacccgggaggcggagcttgcagtaagtcgagattccgccactgcactccagcctgggcaacagagcgagactctgtctcaaaaaaaaaaaraaaaaaaatctgtgtttttgctttcttttcaattatgttattttttaaaacaattattttatccaaatattatctaaaataaatatataattttagttacttattatatctaaacaaatccaatggcaggcctgggtttgtgggctgaaggtcatcactagttcataagcgtgacctcctgctccactggctcttgctgaatttgctccattattctgctccctccttcccccaaatcagaccctagtctccatctgagccacctctgagattcctaccctcaccctcctagtctattggcaaaactgagctgacaaaacaatgaacaggaaacacttgctgtccacatccactgactcccgaggaccactccgagttaggacctttatgtggctgctgtgtcatccaacagacattttctctactgactgagccaagttccaggtacatgctggtgactgctcacagagttttacagtctgggagtgaaccgggagtacaaacagcaattcctgtgtgaggtgggcacagagaatctgcgaagattagagggatcctgccaaatgggccagagaggaagctaggagtcatacagagaccgtccctgccagtgtcatagtagttaaggggtccattaaaactaatagccccagttcccttcactggtaagaatcgagaatagcttaggtctctgtggaaatgaaaagcaaaaaatcctaagtctgtgtatttttgtgcaaacaccaaagctgtcatgatgtgtcagaagaagagagaaatttccttctgctctcatgctgttaacaggaaactcaaaackgaaagaaaatgaactgtccctgttcactatacatacagagaatctcaaagacacttaaaaggtcagacaccttggtcgttgttaaagctgtaagtaagagggaaaagtaccacacttagccataaaacaatactagtatcttcctcctaggtggctgtcatgtcaagcagagtgacatgcatctctacactatcatgaaggagactaagacccaagacccagggatgcaggctgaatgcattgcttgtatccatttattcaatcttaactgaaacccaatgaggtagggagttggctgggtgcagtggctcgtgcctgtaatcccagcactttgagaggccaaggcgggcggatcacctgagctcaggagtgcgagaccaacctggccaacacggtgaaaccctctctgtactaaaaatacaaaaaattaaccaggcttggtgggcacacaactgtagtcccagttactcgggaggctgaggcaggagagtggctttagcctgggaggcagaggttgcagtgagccaagatggtgccagtgcactccagcctgggctacagagcaagactccatctcaaaaaaaaataaaagaaaggtagggcgttattgtcccatttaacaggtgaggaaaactgaggcccagagaagttaaatgactctaccaaggccacacagctaatgattgaagaaactggagctgaacctatttttgcctgatgcaggcaatattccattggcaaccctctcccaggtaagctgattatcacagtatgcagtttttatgctcagctgggagaagtctgatgagatctcctagaagcccgtcaggagaacagaatgctccttagataacaatccccatttatcttccaaatcagatacaggggaacttgaacaccagaagtttttcagcatagaacacagggccagacacatgacaaatgctcagtgaatatttatggaaggaagagggagaagagagtacagaagaggaaggttatgtttattttagcctaaaaaattacctcggttattaccaaacagacacttgggttataaaatcatcttggtaaacatgcatctactttaagcaatgttccttgctggtgaaacttccaaaacaaccagtttataaaatatgtttcagagaactgagcgagtagtctctgtgtagctggaagccygttaaatagctggggatatgtaacatgaattattcagataataggagaaataactgcttcatactgccatcaggtatttatcgagaccaaacttatgaagacttgttgaaatgaattgagttcttctagagactgaacataattttttctaggatttgctaagcccaaatgacttactgatgttgaattaaacttcattcccagaactcaatctcttcttttattactgacgtcacttaaaacctccagtttaaaccaactgtgtgaaaacagattgggcaataatttctcaaggagcggagcttgtttgctgcaccttggtttggtaaaaagcaaaatcatttctccatggcaaatatgtcctccttacttgggcagttgtaatttttactacacaagattttgcttgttgatttaacagcttgtgcctcctattaaggagcaagatgttttccaactgactgcacaagcctccaaatcaggttttccccataagtcgtgagacaaaaaaaaaaaatactagtgagctatgatagaaaagactaactgttgttaagaaatgacattctgaaattccaccaaagttagctgacggtcaactttgtagctccaattttgtagttacatggtttttctctcataactgtaagttgagaatttactgcaatagttctgtttcctttgactttttctggaatgatataattcacctgaggataggaagatgtctttccctcttgaacagagatttaattcttcttctccattcatatttatactgtttagtgcagtgattctcaactgggagcaattttactcctccccccgccccccggagcattgttattgtcaatggagacatttctggttgtcacaatgagaggtgaaggatgcccctgccgtccagtaggcagaggccagggatggtgttaaacacgctgtgatgtgcaggacagcccgcaragcagagaataacccagttcaacccagttcaagtgtccatggtgccaaggytgagaaaccctgcgttactgcaatccccatgcacactccttattaaacactgtgtggagcagatgaataaccccttcttcattttcctctcccctttagctaccaccttagtagcagcttttctctaccttgctgtcaccttgaataggtgcttatgtctacagtctccatctatcttctcacccgtcccttctgagtcactgagagttgggctttctcttcactttccgtaaaggaaagtgacccaaggtcagcaggtggctcctctttgtccccggacctttcttcatctctgatttagctccctttgggctccaacgctcatctcagaagtcactgcctaaggcccgcagcagccccakgttccatttctcctggtctctcagctgttttccagcgtgccttgctggttcccctccccccgacccatgtcctagcccagggcatattgccagctcaaccctctggtatcccactctcctttcttcccttggagccctcacctgctgtagtgggcacattcacgatccttcctgggtgcgtgcttctcgaatgcacagcggtcagctttgaccttccgccaaagcctaaysagtccgtgtctgcattcctcccagccatttcctcttggtgatcccactgccaacctaagtatagttattcaataggcatttattgagttcttcttctttgtcagggactttattctgctgtggagacacagattaatagagcaaagtctctaccctggtggagctcacaaaccagtgagggatgccgacttgaaaagacacaaggcactggcttccgtgctaacacggacatccattcggccaagcagccatgcccggcaggcctgggaccgcatgtcattgaaaccccgaaggcccagcagcccagcaggcaggctggaacagaaaccgtgctccaccccactttggtgcacagaatcgttaagtattgggggagcagaaaccttcaggacatttaaaggaattaaatgaattctacgcatatactaataatgtaacaaaaaatagaaacttttaaaaaggtgaaattccaaatataaatatagtaagtgctacaaattcatgttaaatataaacaggtaacaggaatgataaacagaaattaataggaaatctgcatagaaatgttcacytcttcccactgggaaatcttcaggacttctctccttcagctctgtaattccctcctcctcgtgggatgacacagccctcaaggacgagtaaatgaggaaattgttaccctccatattagtttgctaaggctgccataacaaagtactgcaaacgggggacttaaaccacagaagttaattgcctcgctgttctggagactggaaaccaaagatcaagtcgtcagcaaggttggtctctcctgaggcctctcttctccccctgtcgggcctctttccttcctctccttgtgtcttcacacggccttccctttgtgggtgactgggtcctaactgcctcttcttaaaaggacaccagtcatattggattagggcccacccttataagctcattktatcttaatcacccctttaaagaccctatctccaaatatggtcatatcctgagagactggggttaggactttaacatatgaacttggagggacacaatttagcctaaaatcctccatttcaaggcctaagagggcaaaaggagggggatgttcccagaactagagagagctgcagtgcagagacagtagctgccacccggggcagtagcccttgtcctccgtgaagaagactgacccctgtggaaagcctgcggtgagcagggaagaggaggaacgaggccccaagcctcctccctgctctctttttccactgcacctcccactgggcaatcgccactggcagcccaaggacaaggagcgggcaccccctagcggtcaggccaccagagccagagccccgcagagaaaggcaaaggccggctgtggaggggaaaggagggaagraggcgccagcccctcctcaaagccagcttcccttggtgatttctggactaatacgatacaggttccccgtggtcagccttagcccgcatgatgcgtttggcctgagggggcctgagacacggaagtcagtgtcttctagcacctaacgtctccccttggccacacagtgcttccttgagatgggatttgattcttatagaatgtttgcagtgccttgtagcattagaatttgccwgcattcctttctgcctaaagctcaggtttgggacaaaggggaacagtttccagctgtgatgctctaacttccatctgcctgtgtgtgtttgttctcaggagcccgagcggcagtacatgcacattggcaccatggtggagtttgcttttgccctggtagggaagctggatgccatcaacaagcactccttcaacgacttcaaattgcgagtgggtacgttctgcaaaagaggtctcggtttcagttgtggcaaagatgtggaataaggagtaagtcaggagatattgatgatcctttcagtgttggagtagaacaattacaaatgcatcccgttgcaagactggatgacagaaggaaggacacttttgaacaaattagaaaaaaaaaaaccctttgrttggacctaggctacctgcactcagtcaaggtcgcgtctacaaacacggcacgcacagccttgagccatcctgcgttgctgattcactgtgagacatccactaagagctgctacattattktatgggctgttgccaattaaactgggacctgccactaactataagatacacccatatttcagagatgtaaaaatattttctttaaaaaagtggatcttagaattgttgcaatacagttccatcttcctggggccacaagctgtaagaacaccaaatgtgtcataggttctgaaacagcgacagcttttccgattgtgttcaaatcctagagaaaaaaaaatccagctttctttataatattgttaaaaaataacctttaggcctggtgcagtggctcatgcctgtaaycccagcactttcggaggctgaggtgggaagatcacttgattccaggagtttgagaccagcctgggcaacatgatgagaccccatctctacaaaaaataaattagctgagcttggcggygcacgcctgtagtcctagctactttggaggctgaggcggaaggattgattgaacccaagaggttgaggctgcagcaagccataatagtgccactgcaatccagcctgggtgacagaaagagacgctgtcaccaaaaaaaaaaaaaaaaaaaaaaaaaaaaaagtaacgtttacttggttgaaaacaaaggcttcctgatttctaaatttttaacagactttaagttgattttttttagcatgtttcatgacttgccttttacaaattgttgtttttttaaatgtgtgttttaagccatcaagtcaacacacagcttggttgcgatgtgtgcagttacttgcaaccattcagagttctaagagcttctttgaccattttatggttttcttggcaacacattttgcttcttctgagagtcagtttatataagagcagttcaggcagcaaattctatctgaatggtttttaacgctctcttacatacaaatttcaactttaaaaagaaatctgaatatttaaagccattttcttcctttgctrtgggtatgtcctgaatgtcatttaaatccaaaatatgttacatctctttcacaaatgagatgtgtttctccacttgtactattagttgtcagtgtttaatcatatttttctttttctttttcttttttttttttttcttttgtgagacagagtcttgctctgtcacccaggctggagtgcagtggcacgatctcagttcactgcaacctccacctcctgggttcacgtgattctcctgcctcggcctcccaactagctgggattataggcatgtgccaccacacctggctaatgtttgtatttttagtagagacaggatttctctactatttatatttagtagatttagtatatttagtagagacatgttggccaggctggtctctcactcctgacctcaagtgatctgctcacctcagtctcccaaaatgccatatttttctttctactttctcagttctgtgcatagtaaacccctatcgggggctctaccttacacaaagatgagatgaccacaccaaacatgggcgtgtccctttgaccccagagactctacactgttttgacagcttggaaaatgggctcctcaaattttgctactatacctctttaaaataaaaaaaaatgtattacatgggtgtattagggttatctggagggacagaaataataggatagatgtatatataaaggaaagtttattaagaagtattaactcacacaatcacaaggcgaggtcccacattaggccgtctgcaagccgaggagcaaggaagccagtccgagtcccaaagctaaagaacttggagtctgatgctggagggcaggaagcatccagcacaggaggaagatgtaggctgggaggtgaagccagtctaatctctccacgttcttctgcctgcttttattctggccacgctggcagctgatcagatggtgcccactcacattgagggtgggtctgcctttcccaatccactcactcaaatgttaatctcctttggcaacaccctcacagacacacctaggaacagtaccttgcatctgtcaatccaattaatttgacatttagtattaactatcgcaatgggagaatgacctcttctattatcaaacttatatagaccaaaatcatattgccctgcactgcagcatgggaccagaacggctatttgccagtcatatgtgctacctccaacgtgccattttcctggtctagacttcagtgatattgttcagattcacgcgaactgttgaatggacctccttccagtggtgtttattgacattaaatgtctactttaccctgattgtccaataactgataaagtctataccctcaaccccatatatcagccttgttagatttctaaggaagcctgaactcaacgtttcacttggcctttgattctccctttcccccgaccctctgtctctcccaggaggggacttccctgcttgacctccatgcactgtgacatccagaggtagttcagggatagcaamgtggaagaataatattgccaacaaaagcgatgggacaaataatgaggtgaattcactcctagcatccttttcagcatatctagctgtagaatcagttggaaccacaaatcaagcacactcctacactaactagagatggccatgttgccagcaataatcagtccaggctcttccccacccccagagctgctgaccaagcagggatgagcagtggccagaagaaaagctgagctgacagatgcaaggctggaaccgcaggccagtgtccagcggctgacccctgggtgctctgacctgtgccagagctggaataaattatttgagatgcctaaaccagaagtgtgttttcctgagtatgccacaaaatcaaaggagaatttatttcttacctcttctgtacctgcaaaggtactgcttggaacagtattggggctgtttcctgacctaactttccattgcaaaggggaagctttggcctggcgcggtggctcactcctgtaatcccagcactttgggaggccaagacaggtgaatctcctgagctcaggagtttgagaccagtctgggcaacatggcaaaactctgtctctaccaaaaatacaaaaaattagccaggtgtggtggtgtgttcctgtagccccagctacttgggaggctgaggtggcaggatcgcttgagcctgggaggtgaaggttgcagkcagccaagattgcgccactgcactccagcctgggtracagaataagaccccatctcaaaaaataaaaaaaataaaaagacaatggttataagatgaatcttgctaactcaactctgatgtggcacaggtattaaccatggacctgtgatagctggtgtgattggagctcagaagccacaatatgatatctggggcaacactgtcaatgtggccagtaggatggacagcaccggagtcctggacaaaatacaggtaatgcagagtgtggtctgcgctgcctgcatcaaccatgtctgttctcttgggaaccataaataagtataataaggatactaatatattaaaacaaaggaaaaaagtaaaccttgaaatttacttatcttttggagaacaatttttggggaaatgtcagtttctgtattgactgttaacaacaacaacaaaattctaacaatataaaggctattatatttgtgaaaacaaatgatccarcagcaaccagcatgatggcacaacagccctgagcattcagtacaggagaacctttattacttctcctggtgctaataccttaaaaaggactttgcaaacgagagggatcacatgcaaccaaaaccagacacaacccctcaccttcttctctcaagctgaattgggaggaggggaagtggtaggcttcggagaggtgggagatgaaacagaaggttgatatgaatggcagctctggaatccacccaagagggagaaaggaaggtgtaacaaatgaaaagcagtggttggagaaaactaaaattattttatgtgactattcccattgctcattaaatcaattataatcgtggttaaagtaactatattacaatagcactaataatattgtatttttaaaagtattttaaaatcactgaaaagataatagaaaaaaaatctgttattagaactatgctgaaactatccccccagttacaaaagagcagtggttctgcccaggttgacagtgacagaatcaaggaagagcgggaagagaaacaagggaggctacgaagatggcagcttggtcaagcctgttcttcaataattccgcacccacgtcctgtgctcctcccacgtgctgactagatgctgtggctacagcatgagcaagtcaaactcaactttgcccttgtacagcgaatgttctcttggagatgaccgttagccaccagaagtcacagtggtgccactgcaagtgtgactgtgctggaggacttcagctggcctgtgtggctggggaaggctctggagaactcgattttcagacgacaggctgtgtgagtaagaaaggtgtggaactggagacagtgtgtgaagaccaccttttcagatgtgaagtgagctgatggagcagaaggggaagggagttcaaggctgcgttcaagaattatcctgaacaggggcaatgctcacaggaagaacggagtgaggggaccagtgaaaataaaggtggtttgaggttcccccggtgaaggaaggagattggaacagtgtgtggttggagagtgggctcacagctcagtagcaacatctgcagcattaacggagaaaagtgaagaaggaagggtgcaagagtggaaacaggaagctacagttcattccagtattcggaagaaagaaggggatctcagctaagaaaagaataagaagaagataaagaggtgcatgtcattacattttaaatctaccattatactcttggataatatatgtagaatggtaaacatgttcacaaggtttagatgtaactttaaatatatttatagcaaaagccattttgtatcatggtttggaaattttgcttaaactgtggttagagattatctttttaattttcatcattgaacccacacccaaatccacktaatatattttggttaatactagaatttcattcaattttaccattattacaccaagaagctatcctgaagcttgctatcataatgacaaaatgacacgccagtgtaatatctgtccccctcagaggcacaaacatctagcaacacagaatgtgtttcagtgaagagcttggagataccaaggttttatggtccttccttgccttcttcaaaattctgcttctattaatagctagaaattagtgaaattcaatctgccttccagtgagctcatcagtgagctgatcatcagcagctggaacacatacacctgattgtacacagttccagacacccagagagaagggctgggatctgcaagtgagaagcgtgtgtgcaygtgtgtgtacatgcatgtgtgtgtgtgtgtgtgtctgtgctgaacactctatttgtctcactctcagaaagcagtggattcacgtttcaccccygttatgttacattctggaaaatgaatttctgctaaatggaaaatttatatgaaagtcaccggacttgcactatagatttatcatggtggtcctctgggcttttgataaatccytatagtgtgtgtctcagcttagccaagacatgcgaatagccttgcctcctaaaattgactgcacagactggcacagtcctttcctctttaaaagactgtcccctccattgttgtcagaatgggctttttattaaacctcgacttacctgcctttcatatttaccccatctcgttcattcctttggtctttctaaaggatatctttaatttttgtatggaatggaggaaacattacttctaagtatctgccttcttttattcagattgagtcaacacttgctacaaagtaagtaaaagtccaaccaagagaaggaagagataaaagaaaactaatgggaggtggggaggaartattccaaccaaattggccattgccaaggatctgctcacgagatcagacttggagtgagtttccaacactggctccagctgcctcccctctcatgctagggtgcaagacgaggctcttctccctgkggctggagctgtggtcatcatctgtggagactgctcagttgcccagccagaacaagaatcgtggggcrttttggcagcctagtctaatcattttctgatggtaccaaggcttccgggactttctgcataaacatcgctagccacttcyaatgcccagggatactcctgcaatcctggacaaccccaggtcttatcttggcagggaagagaggcctgcccctaccaaggactcactttcccacctgcaggccagcccatgtccccagcacaacacccggaatattccgacgatttatggcagtttttaatatgctttctagatcccctagcagcttttaagcacttgggagaagtatcaaaagcaatttgagtgaggcaggtcatggagagtgctccctcctggagatcgtaaatctcctagaggtcgatgtttgaaatgagtttgagctcatatgtgtctcaaagaggatattgggcttcataaagctccatgygactcagggcaggtcggccacctacaccggctccatgacctctgatccctggagggaaacaagacaggtttctgcctgtcagtagggagccatgtttgtagacctgtgtttgcttccttagcacggaagctgaagggctgcatttgggtaagtttttaatcccgaaggtgtggcttgcttcctcactccaataagctctcttttccatttatgtgcaaaaaatagtagtgagatgccaggaaaataaaaaacgatgcccagaccattaataagcttctcctaggcctgaggaacgggttctttttattaaagagcatttaactcccagcatgctttctagcctggaaaccccaagaacagcatagcaagcccactcagcaaccctgcggcttctcctaggcctggaggcatagtaaccggtgtgcatcgagatggacagcttcttcctcccggtttcccattaatcatgcggtgctgrttggcgggtggttcggcattatgaacaccagtggatagttttaaaatgccagtgacattagcaccagtaaatacctcaacagttaacccccaaagcaccaaaaggccacttttggtggaaggccgctcgtccaatgactgcagaatttgcaaacctgagtttcattggttttcttcatcttctttcagctcttatccagtacacaaagcactcccggggctcctgccctcctcccaggacttgggccagaccagagcagcaggacatggacatctggcacctgtgcctccttttcctttctgctctgctcatcagggtcccgaggacccacacgtggaccttgtgctaggggctgtccttccatgacattgcagaaaggtggakgattcttccatagcccgcccttgagatctgcgcatggaggattcaccctggttctgggcgtccctggatgctgtcctgggctctcatgagcacagcccctcatggtttccttgcacttctacctctgccccaacagtgatgtctgccctcaaggcctttcttagtctccaagtccaaggaggctggagctttgctgttgacacggcccccacctttgcaccttccccgggacacaccacaaccaaaattgtgccataacacccctgtgtgccataacactgctgtgtgccataacactgctatgtgccagaacaatgctgctgtgtgccataacagcgctgcagtgtgccacaacactgctatgtgccagaacaacactgctgtgtcccataataacgctgctgtgtgccacgacaacgctgctgtgygccacgacaacgctgctgtgcgccacgacaacgctgctgtgcgccacgacaacgctgctgtgtgacatgacaacgctgctgtgtgccatgacaaygctgctgtgtgacatgacaacgctgctgtgcgccataaaactgctgtgtgccataacactgctgtgtgctgtaacaacacttgttgtgtgccrtaacaacgctgctgggtgccatagcaacactgctgtgtgccataacactgctatgtggcttgtaagctgcccagccctgtcacacccacctggcacaggtttgtcactccagtgctggaggtggccagggtctcacaggtgcccttgttgcagccatgccagctgccttctcagatgaagtgggaggagattgctcctttgtgcctttttctcatggttccaaagcagcattaccagggctttctgtctgcccaaactcagatacctgctaggggacactgggtggaggagcaggtagccaacagaggggtcttccctggcctcagaagctgaggcctcaccctcagaccacgcctgtgtgtctcactggttctctgcttttgcagctcctccacactcaggcagcccaagcccaggcaggcgcgggcccacagtcccagacagggtgtcctaaggaaggcgcagcacacgcagaagctcagggagccagtactggacagtgcatctccgctgaggaggaagctgtcagagccagcaagttcacggccatccgacctgcagggcctggacatggttcrgctgccgggtccctcgcctgtcggtgcaatggcaggaaataagtggtcctgtcaagccagcagcctgcaagaggggctgccctccttagcccccgtttcaatgcagtgaagcgaggagacctttgagacttgactgggagcatcatgctcatgcggacaccagtgcaaattcctacagctctttcagttttaggttacttcactcaaaggcatcaaacctgacagacgcgaccattggcaggagtckacagtgctcagtgctscttctcggggtgttcctcccatcgacactgacatctatgattaatgtttatttcatgaaaggacattcatgacaatgtataaacatcatccagaatcccaccactccaatctattttggtttactctctttcatccaggtctcttcagtgtgaatacataacatcatgtggttgaaatcatagcctggatccaggctcaattccttttctgggtgaaatggtttgacattgtgtcatccatgatagcatcatggtagcaccgtagtttactggagttacttgaattttaggttgtttccagtttttcactatcccagcgctgaattaaacaacattgtcctttacaacctttttttctygtggattactctcacttttctactaacttctcaggagtggaattcctgggtcaaagagcatggtgctttttttagctctgcatccttgagtcagatgggttgtatcaatgtatgtactaagcccgttttccngtgttcctgtgccttctaggttaccgaggagacgagcctcgtcctgcagaccctcggatacacgtgcacctgtcgaggaataatcaacgtgaaaggaaagggggacctgaagacgtactttgtaaacacagaaatgtcaaggtccctttcccagagcaacgtggcatcctgaagagtcaccttcattttggcaagaagactgtattttcaggaaggtatcacacactttctgactgcaacttctgtcccttgtttttgatgtgcgtgctgtctgtcctatggagcctctgcagactcgttctcgtgacccagtggcataccgtttggtgtctgatgtgtgcccagatcgttctgccacttgcactgtgcttgctcctaagcaaaagggaaaaggagcgcgcgtgatagaagaaaagcactgggagaactaacagaggagaaaggtgaaacacacacacattcttaaggcaataaaactagggggtgtatattatcttctggtgcatgttcttttctggaaaatatggtagctcgccaaccgcatctgctcatctgatattcaaacacacagtattcgtgaataagttgattctgtcccccacgtggactctgtgctcacccattgtctcattgccagtggtgtccaagggcccccgttgggacccacggctctcgtccctctgctccgtgtgtctcatgccagcagcacgtcgccatccgtcaccagaattagtcctcacagcctaggaccagttttgtatcaaactcgtctgatgttttgatgccatttgtcttttgtaaagttaattcattaaaagttttatgtactttgatttacagtgcctgtatcttttattttcctgtcttctttctcctgtggtttgctccagaattaaggtttgttttccatccattctcccttttgacacagttgtttcagaaagagctctccagaagccaatattgagatgtaattcagattaggacacagtgtgtgacgcagataactggttactcagctccctggaaagcaggcaagcatgttgaatgtatctagtggtctgattttaatttgggcatctctagagaacgctttcagggaaaaatactttaatagtaaaaagattctctgcgagcaacagtgccccctccgtccactacgctcctgtctccaagaatgttttgctagagctaacagacatagactgcaaaagaataatttggaatcagctatgcaaatcagtctcacaatagcgtgagctaactgagagaagtactaagacccacaaactgcctgttaagtctgagaaggctaaagaagacacacagccaacgttcatgcatttttaaagacagaaggccttgaagaatttgttcttgtaaatccaacacaagttgtttggtacttttaacataaagaaatcatactttgccaaatagtgaaaagtagagcaatcgtgtataagctaatgtttaaaagcaaaactgcaaattgtagcccagttggtcaaacttgttttctttttataactcatggcaggcatctgtaagaagtagagaacccagatgatctcttaggaagccttttattcgtgggaactcgaacttgaagcacaagttcctggtttgaatcctggctctgattttttactggctgtgtgactttgaacacatctcttagtccctcttaggagtactttccttattggcaacttatggaatcgctagtgattaaacgaggcaatgactgtgagagagcctggcagktgccccgtggtacattcacagcacgggcacagctgctgtgccaggactgtgactcattcccagtaaaaggcacttatcgaagctgataaccgtccttcatcaccgaagtgtgagtagagcatgacttatttagtattctgcctcaatggggaattttttgatcctgtaatcacaactcagcattggccttaatatacctaaatctccaaaaacagtgattaaagcaagagaattattacaagggcttttctctttcctctaactcattcttcacggatgccgtagcgtttccgtgagctcaaactggccttggtgtaaaatgtgtaaggatgagcagcaggcgtgcctcgtgggttcttcctctgttacatcctgctacactcatccgcaggtcaccttagttcacctaccctgagtgaacacccccagctgggtggtccaccaagttctcataaacagagtccctcccattcccccacggggtgcaccgaacttgggtttgcgctaaaaagaactcaaaaggagaactgtgctctcccaaagccatatcaccagtcttaccaaacaataggcttttaaaagcattgagtcattgtcagaatccactatgggaagctctgtgtgtacctggtcccttctaggtgtggtcccataggagcagccttagcatcccctgtgaacttatcaaaaatgcaaattctcaggccccaacctgaaggaggaccctgaatttgagatccccggggctggggcccagcacaactgctgtttagtgaacaggttctccaggtgattctgatccctgatcaagcttcagacctccctccctccccagtgtttttgcaggtgaggaaacaggggcagagtaattcaggcacatgtgttcagagttccacagttgattagcagttgaggccaggctagaatggaaaactgcctgttccttgaatctgaaagagcattattcctggtcaaagctccttaaagttctgggcagctaaaagcatccctgtgagcaaaaatgccaggcagaaaactggcagtgcacctctcatcagcccaggtcccagtgccattggcttcaagaaaaaaaaaaatctctccccaatgctctccttaacctttaagtcttacaggaagcctctcatagaaattgcctccagtccagtttcccaaaaaccccagtgttttacatatctgtttaggagtgtctaagttttgtcatcaatccaggatgttattcttccttcccaactcactgtgctcctaaaggcagcaaccattcatctttcctttgctctggatacaccgaatgaccaggtaacatcatcaggccgggtgcagtggctcctataatcccaatattttgggaggccgaggagagaggatcacttaagcccaggagtctgagaccagcctgggcaacatagcaagacccccatctctgcaaaaaaataagaaaattagcttggcatggtggcacgtgcctgtagtcccagctacatgggaggctgaggtgggaggatcacttgagcccaggaagtccagaacgtagtgagccttgattataccactgcactccagcctgggtgacagagcgagactctgtctcagaaaaaaaaagaaaaaaaagaaaaagcaacataattgcccagtgatgaaaatttgataaaccaaaacaatccattaatataagaagatatgatgtgtgatggctttaacaagcattcatgcattggctttaaatgataaacactgggataccgagagaaatatacttcattttctcttatggcctaacaaatgtgagatcttttgaaatcttggccaattacagccctgccttttgaaagtcagtatgtagtagaaggtgaagggagtaaggtctgactgaaagtaaatgaaaataatttagtttgactttgatttattacagtcacttacagatgccttgtctttgttgaaatcaagtctgaataatgaataatttataaatatttctataacccaaactttatatattttctattatgttactataaatatggtataatgcacccaaaggcattcgaaataaactactgccatttgtttgaaataaataaaagacacctacactgaaaaactgttttcaaaaaaataaagaaatacttaggagtcactcagccttgaaattgccggaattcagtgtcatttatttttagagaatcctttttccatattcaaaacaataaaaccagtgatrgagcgatcagtattgaaattaattaggccacctgcccattcactgctaaactgtgggaaatttaatcatggtagatgagagatgatttcttccaagggatccattcattaaaaatgtagctgatgatactttaatacttgggtaagtttcaaattatctccaaagtaagtatttccaacttaggttacaagcgactgcttccaaaaagaagactgtttaaagtcaagtcattgctgtgatgacggggcactgggtggggcacacactgggtacctgtgttatgcctgtgctccagcagctcattgcctcccgcatgaactcttctaggtttggaaattccactttaaatatgaggaaatgtctgctcatgtagatgatatgacttgccctagaacacaaatctagaaaatgcagcaaccagaattttacccaagtttgttgaacaccgaaatctagcctcttcccatgactggccccctctctctgagcagtaatagtgagcattgctggccaccagggccacccatccttactagggctcctggtccctactgcacaaaattctgttatttgggattcagacctctggaaaaacaaaaatggagtttctagagttcaattgtgccaaaagacaattgtcatcacatctcctcttggagaagggaacatgtcagggttgtttgtgttcaggcagcaggagttcccctaactcgtgggaaaagcaactgcacctcactcctgtgactgcctccccaaagaatcctggcaaatgtagagagccagtgaacagaaaccaacccaacagttaccaaggggaaacaaagttttcattttattcaggtgctcacaatgaatcggtctccagattcatttgatcaaaaataattccagctgaaaatcatcacatcagagactcttcacatgtactaaaggtgttgttggtcaggctcctaacccagcaacctgaggggggctgctaacgtgttcatgtgtcccactgtagagatgcaacacaggcatagccaagctcctaggcgtcatgagaaggggaaaggaggctccagatgccaccttctcgctgtgcaaacttgccaggccacagggtatcggacatgccctgtgggccacggggatgcttcaggatggagcaatgtgcccaaagccggrttccttgaggctggggatgtcgttcttcctgtagaagtcagcctgcacatggttggcacggccaaagtcccggtttaggggctcaatgggctgattgatgcgcttcccatagacagaagacgtcagyactccaaccggcctctcctgttcctggtgaaagttatcaaagcacatagtcagcaccactgcattcgccagcacagctcacccgtgcatccatcagcctgggtcctgggagctttttctgcctgggtcccaccatggtagaccaagagggaacctccacgctgaagccaggggcttcacagggaagtagcctatggcagggaaccgttgaatttgctagaaggctggctggtgtattcattggacatgttgggaaactgtgccggaccatttgctctacccgtttgtccctgtgctyttcctggtcatttcccagctcctgctgctgctggtcccttcccaccacccagatcctggctcagatgtccaggtcctccctgacccctcccctccccagctccctgctcatccctctcactttccccatcttacatcctcacatggcttcctcttccctcataccactcatcactacctagaatttgctcatcatttcttttttttcttttcttttgagaaggagtcttgctcttgtcgcccaggctggagtgcaatggttgcaacctctgcctcccaggttcaagcaattctcctgcctcagcctcccgagtagctgggattacaagcgtgcaccaccacgctcggctagtttttgtatttttagtagagacagggtttcaccatgttgaccaggctggtctcgaactcctgacctcaagtgatccacccacctcggcctcccaaagtgctgggattacaggcatgagccaccacacccagcccatgatttctttgcctttttctctcttccttcaggaatggcagctctgagagggcttttttctgaaaaactacctgccacagttttctcctgaggaagacaataactttgcatcaacttagaatgcaccacatgtgctggttatggtggcttggtaactaaacttggaagaaatgttctcgtgtgtgcaatttctgctccgcaagaccaacttttctagaaaaattatgaaagccaggactcagaggttaagcagagacttgttttatccgttgaagggaatgtcttagctttgctgtccttaaattgttaaattctaaagaaccaaacaacaatatcaagaaaaatacacaatgacatgactgaatagagggaactatatataatagtaccttagccttagcttcttggcacaaaaagatagaggagagctgcataaagaaaattacatagagcagctgagcacaatattaaatatgtatgtgtatatgcacacacacatgcatgtacacacatatgtacacacatgtacatgcatacaatatacacacatgtgcatgatatatacatgtattcacacatatatacacacataatatatacacatccacctacatatgcacatatgcatgcatctatacacatatttacacacattcacaagcaggcacacacacatgcacacacatatacacacatatataatagatacatacacacatgcatatacacaaacacatgcaca

SEQ ID NO: 93761 - DNA, 12889 bp, Homo sapiens
atacatagaccaatggaatagaatggcgaagcaagaaataaggcaaaatacttacaaccaactaatctttgacaaagcatataaaaacataaactgaggaaaggacaccctattcaataaatggtgttgggaaaactggatcccacatgtagaagaatgaaactggattcatttctctcaccatgtataaaaatcaattcaagatcgattaaagacttaaatgtaagacctgaagccataaaaattctagaagaaaacctaggaaagctcttctggacattggtctaggcaaagaattcatgactaagaccccaaaagcaattgcaacaaaacaaaaataaacaaataggatataattaaatttataagcttctgcacagcaaaagaaacaatcgccagagtaaacagacaactcacagaatgggagaaaatatttgcaaactatgcattcaacaaaggactaatatccagaatctacaaggaactcaaacaaatcagcaggaaaaaaacataatctcattaaaaagtgggcaaatgacatgaatagatatttctcaaaagaagatatacaaatgctcaacaaacatgaaaaaatgctcaacatcactaatcatcagggaaatgcaaatcaaaaccacaataaaatgccatcttaccccaggcaaaatggccattattaaaaagtaaaggccgggcacggtggctcatgcttgtaagcccagcactttgggaggccgagatgggcagatcacctgaggttgggagttggagaccagcctggccaacatggtgaaaccccatctctactagaaatacgaaaattagccaagcttactcgggaggctgaggcaggagaatggcgtgaacccgggaggcggagcttgcagtgagccgagatggcgccactgcactccagcctgggcgacagagtgagactcagtctcaaaaataaataaataaataaataaataaataaataaataattagccaggcttggtggtgcgcgcctgtaatcccagctacatgggaggctgaggcatgagaatcgcttgaaccaaggaggtggaggttgcagtgagctgagatgcaccactgcactccagcctgggcggcaagagcgaaactccgtctcaaaaataaataaatgaataaaataaaataaataaaattgaaaaagcaatagatgttggcgtggatgtggtaaaaaggtaacactgctaggggaatgtaaattagtacaatctttacagaaagcagtatggagattccttaaagaactaaaagtagatctaccatttgatccagtaatcccactactaggtatctacccaaaggaaaagaagtcattatatcaaaaagacacctacacgcatatatttattaccgcacaattcacaaatgcaaagatacgcaacaaaactaagtgctcatcaactgataagtggataaagaaaatgtgatatatatacaccatggaatactactcagctataaaaaagaacaaaataatgtcttttgcagcaacttggatggaactggagaacattattctaagtgaagtaactcaggaatggaaaaccaaatatcacatgttctcacttttttttttttttttttctgagacagagtctcactctcttgcccagggtggagtgcagtggcacgatcttggctcactgcaacctccgcctcctgggttcaagcgatcctcccatgttcaagcaatcctccacctcagtctcccaagtagctgggagtacaagcgtgcgccaccatgcccagctaagttttgtatttttagtagagacggggtttcgccatgttggccaagctggtctcgaactcctgacctcaggtgatccacctgccttggcctcccaaaatgctgggattacaggcgtgagccaccatgcctggtcgcatgttctcataagtcggagctaagctatgggtacacaaaggcatgtagactagtataatggacattggagactcataatgggcgaggatgagagtggggagagatttaaaaactacatattgggaagaatgtacactactcaggtgatgggtgcactaaaatttcagactttgccattatacaattcatccatgtaaccccaaaccgctagtactcctaaagctattgaaagagaaaagaaaaaaattctcatcaccattaatggaacagacaaataacatatgcccctggtacgatgtactgagaatcacacactctggtggtcttcttgcaaaaaaaatttcacctgaatctaatcccgagggaacagtcaaacaaatacatcttgaaagatgttctgcaaaactggcctgaactctttttttttttttttttttttttttggagacggagccttgctcagtcgcacaggctggagtgcagtggtgcaatctcggctcactgcaagctccgcctcctgggttcacaccattctcctgcctcagcctcccgagtagctgggactataagcgcccgccaccacgcccggctaatttttttgtatttttagtagagacggggtttcaccgtgttagccaggatggtctcaatctcctgaccttgtgttctgcccacttcggcctcccaaagtgctgggattacaggcgtgagccaccgcacccggccaaaactagcctgaactcttaaaaatgccaatgtccagcaagaccgaaacaaaataaaagactcagcaacagctccaaatttaaagatgctaaagaagcatgacggctaaatgcaatgtgtgatccttgattcaatcttggatcaaaagaaaaaaacagctataaataatattattaaaagacttggtgaaatttgaatatggattacgtgttagatgataatatggggccaatgttaaatttcctgagtatggtcattgtactgtggttatggaagagcatgtacttgttctttggagatatgtgctgaagggctaaattgttgctatatctacaagaaactctcaatgtttcagcaaaaagaaacaagcaaataaataaatatgtgtgtctgtatatcaaaatagataaagcaaatgtggtgaagtgttaacaatagaactataggtgaagggtaaacagatgctcattgttctgttcttgcagcttttatgtaggtttgatatttttcaaaacacaaacttggacactataaataataagtaataaaaacaaaaagacttttcccagtcacgttttctattaagccttccatgacatacacctactgcccctggcccccaaacactcacctaaaacaatgaatcataccctctcttctggactcttccaaggttatctatctctctgaccaaagtataagctcttggaaatcaggccctgtattgtgatggatctacactgctaggaccatacctgacacagattggatgctcagttgatcccgtttttaaattaatcaagctgagtcttgaagctcggatagaattcaggaagcagagaggagtcaggcttctcaagagagaggaatggcatgagcaaaggtaaggaaacaggaatgtacattttgtatttaccaaaagcgtttgctttgtttggtcagaactgagggtttatataggtgaaaatgcctaacacactatagattcttaataaaaatctgatgaataaatgaatgaatgagatttgaaaggcaggcttagattagaaagggctttgactactgaattgagaaatttgaacattaactagttcttaacatccagggtgttttcccagcggtggaaagagagtgtgttattgggcaagtccattgcacattttcttcactaaataacaaggaaaattgcctccatcagtgtgttaaaaaaaaaaaaaaaaaaaaggaaaagtagagacaagtgggatctgaaagtgacctgcttccaaactcaaggggagaaaacgttatctatccaggaaaagctccatagcggaattttaaaacatccaacatccctcagactaacaggtgtcacagaatatgaagaataaataaatgaatctatttaacacgggtcatgcttgtctttgaaaatagtgtctgaggccgggcgcggtggctcatgcctgttatccctgcactttgggaggccgaggtgggtgggtcacctgaggtcgagagtttgagaccagcctggccaacatggtgaaacctcgtctctactaaaaatacaaaaaattagctgggcatggtggcgcgagcctgtaatcccagctactcatgagactgaggcaggagaatggcttgaacctgggaggcggaggttgtggtgaaccaagatcgcgccactgcactccagcctgggcaacaagagcaaaactccgtctcaaaaaaaataaaaataaaaaaaagaaaagaaaatagtgtctgaaattattttgttaattgtacttagttttaaagtttaagaagtgtatacttatgaaataagtagactccaatactagtttagggcctccacattactacatagattacaaagcttctccgttagcccagctgagctgcccccaacaaacagttttcatatttatttagtattcgtgttctattttcttccagatagctttgtggggactgacaatttaagtaatgcaaaataatttgattatgacaactgagaaaagaaacgtgtgttgtgttttgaggttatcatttccttgaccatcataagcagcctggtatctatttcatctttgttcgtaatcacagcacacctttgaacacataccaaaatgatgatggaatgagagcaaagtatgtgagtcaattggctactctgtgaaacaatttgttagttttaggctatagttcttttcaattttcagccaaattctataaaaatcttagctggaaggaaatgcaaatgtcaggttacattttagaaattaatttttgggctgagtgctgtggctcgtgcatgtaatcccagcactttgggaggccgaggccggtggatcacctgaggtcaggagtttgagaccagcctggccaacatggtgaaatcctgtctctactaaaaatacaagaattcgccaggtgtggtggtgcgttcctgtaatcccagctactcggtaggctaaggcacaagaatcacttgaacccaggaagcagaggcctgggactctccagcctgggtgacagagcaaaactgtctcaatttttggcccaattaccatgtagcattaacttgtttcagaatgtttaatattactgggaagacagcatcggtagtggtcaaagtgatttgtagttcacaaagcatgtaggcatttttttttgaagaaagtaaacaaaataatttgaactgttgtttcaggtaataaaatagactcatgcggtaagtcatttgagctgtatgtacaaatggactatgacacagctaaattagtcacaactgtccaccacaggccaacttcaagataaagggctatatatcagttagcaatgctctcttacaaccagccctgatgtgtttgtaagcaggaaaataattttatggttacaatcaacaaagaagtatcaggccagtccaccaagcccagccaaatcccatatctcgctccagttttatagagattagcatatcacatgagccaaatgctgttccccaacttagaatgtgatattgctattttgcagggaaagtgtaagccctgttctgcaacactgatgaaatagaagtattcatagatcttgtttaacgtggtccaataattgaaacataaaatagatatcttgtaacagaacatttttaaaagtcaagaaagataagaattaggccttggaaaataaatgactatgaagaaagataaaaagaaaagagactggggtgtctctgaagaccctgcttagaggccctgtcctccttgcggcaagcggccattgccatggaaaccggagccgcagggctatctgtccgggattgtgacgcccagatgggagtggtgagaggagacagaaagagggtggtggccgatagctggtcctctttctccaacacctagcctgagacttggcggcgcggctgctatcctgaactagcttggtaagtgttgtgtcccgaaccagcgtagagagacctcggaccagccgccttgatgacagcatccgcgtcctccttttcatcatctcagggtgtccagcagccctccatctacagcttctcccaaataaccagaagcttgtttctcagcaatggtgtggccgccaacgacaaactccttctgtccagcaatcgcatcaccgccattgtcaatgcctcggtggaagtggtcaacgtattcttcgagggcattcagtacataaaggtgcctgttaccgatgctcgtgactcgcgtctctacgacttttttgaccccattgctgatcttatccacaccatcgatatgaggcagggccgtacgctgctgcactgcatggctggagtgagccgttccgcctcactgtgccttgcgtacctcatgaaataccactccatgtcgctgctggacgcccatacatggaccaagtcgcgccgccccatcatccggcccaacaacggcttttgggaacagctcatcaattacgaattcaagctgtttaataacaayaccgtgcgcatgatcaactcgccggtaggtaacatccctgacatctatgagaaggacctacgtaygatgatatcaatgtaagccatcccggccagcccctgacatctgccatcgatcttgcaccaagactgaacttgaacactgacattttgttagtaaagaaaaccggatggtgccttgttaaagggcaagaaaaaagggagggggttggagttttgaacgtagtaagccttaccttaatagaattaaattcatgaaacataagatagtgaaaatattttttatattgtgaggtcaagctattggggcctggctggaaccagggtggggcaagtaatgctcagctcacatagacctgccagcagcacccaatacatgtggcagacctggaatcctgagccctgccagaggctgactaacccaggagtgaatcccctagaatctcacccggttctttccaacccaaagtcaaagccttagacatcttggcatcccttgcacttctcccagtaagtgccaacctagtggataagtggctttcattcaagctgtgctccaggagctctggaggagtctcaggctacccttgcccaccttcaatcacagtggcccatctctggttttctagatcggatttatacattagttaaaaaaaaaaaaactagttttttaaaagaccattccactccataaagtttaaaaatattgtatttttttgactgctgtacttgatggcaagttctcaaggtgtctttggtgatctcccaccggcctttgtgaaaagggacatagtccttttcccagggcatatactgagagagaacaggcctgacaccaggcctcaggggttcctctcatgagccttggcttaagaggctggagctgctggccatgacccagccctgtcacctctaacatctcctttcattgtgaccttggtcctctcagagcttcactttcctcacctgtcaaagcaactgtctcccatagagttgttgtgaggactgggttccttagcatagtacctggcacatgaatggtttcatgcttggagtaaaaggcaatgatactctttgaccctggtttgaggtcagcacactcatcctcataatggcatttcccccatctgtgcacagtcctttgttatttacaaaatgttcttccaaaaaatctaaaaacaaatggcttaaggtccttttggaccttaccttagaatgggcctagattcgggcatggtggctggcacctgtagtcccagctactcgggaggctgaggcaagagaagcacttgaacccggaaggtggaggttgcagtgagccaagagcacgccattgcactccagccttgggtgacagagcgagactccgtctcaaaaaagaaaaaacaaagcggagggggcctagatttagagcctttatagaggtcccattgtgtttaatccatgtgcatccaaggggtcgtgtagaagcacaatttctgcttccctgaaacacttgtttagagtcactaaccgtgagagccagcaccctggttttgctcattaccaggatgcatgggggcattcaccgaagggatgaacaagtgacccccaacatataggccctggaatccaggatcattctaactccctggatacctgggctctggcttgtgttcagttattctaatccagaggtttttagaccaaaaaaaaaaaaaaaaagagagagagagagacaaaagtacaactgctccatttgaagaagacctgtgtgtccacagcccagtgacgtccaaatgttttctctctccaaacacatcgagacaccaccactgccacaaagggagtgcctagggtgcagtatgggggcaagggggataaaatcactgctccaggcagatccactacttttacagatggaaaaacaggcccacagaatgcaagagttggtgtggcagagccccaacaaagcagcctttctggcagcgacccagatggaaactttcttttaaagtattttttagaagaaaattatttgggtgtgtgtgtgtgtgtgtgcatgtgtgttcatttttaaaaatatctaaattaacataccatgaaattactctttgtggataaacagttccacgagttttaacacatgcatagatttaggtaaccatcaccataatcccaaaatttccctcatgcttcccctttctaattaaaccatcaaaccaccccaacctctggcaaacactgatgtgttttccttccctataggtttgcctttttttttttttttttttttgagacagagtctcgcactgtcgcctgggctggagtgcagtggcgcaatctcggctcactgcaacctccgcctcccgggttcaagcgattctcctgcctcagcctctggagtagctgggattacaggcacctgccaccacgcccagctaactttttctatttttagtagagacggggtttcaccatgttggccaggctggtctcgaactcccgacctggtgatttgcctgccttggcctcctaaagtgctgtgattaaagggttgagccaccgtgcctggccagatatgcctttaactgaatgtcacataaatggaatcatacaggatgtaacctctggagactggcttctttcacttagcgtaatgtctttaagattcacccatgttatacagttcattgtatgcatgtaccacagtttgttttccatccacctgttgaagaatactagggttcgtattagcttcctaggacatgctgtaagaaataccaaaaactgagtggtttaaaacaatagaaatgtattttctcatagttatggaggccagaagtcctaaatcaagatgtcagcagggttgtgctccctctgaaacctgcagaggagaatcctccttgagtctttttttttttttttttttttgatacagagttttgctctgtcacccaggctggagtgcagtggcgtgatctccgctcactgcaacctccacctcccgggttcaagtgattctcctgcctcagcctccccagtagctgggattataggcacgtgccaccatgcccggctaatttttgtatttttagtagagacggggtttcaccatgttggccaggttggtctcaaattcctgacctcaggtgattcacctgcctcagccttccaaagtgctgggattacaggcatgagccaccgcgcccggccctccttgactctttctagcatctagtgtttgctgacactccttggcattccttactttgtagatgcatcactctaatctctgcctctggagtcacagagctatctcccttagtgtgtcttcacatctgtcttccctctgtgagaatctacgtccaaatcttcctcttcttatgaggacaccaatcatgttagattagggacccactctactccagtatgagtaattattaatacatcgaatgaccctatgtccaaataaggttatatattctgaggttgtgggggttaggacttccacatattttgaggggatacaactcaacccataacaaggttatttccagttttgagcaattatgcataaagcacgatacagaagaaaagaatcatgtcacctgaaaaaacaacggtagcagtttaaaagtgcaaaatgagttagagtgaaaaataataataaccactatttattaagaagctattaaatgcctaacacagtactaggcactttacagtgtctctaccccttccaacagcccttcaaggtagatattgttcccactgtactaatgcgtttaaggaatttgcctaaggcaacacataggccagtgacatacagactagactccattttcctgcatttcttttgaaacaaaggtaagtagattgaaagaaggagatttttttttttctttgggacggagttccgctcttgttgcctaggctggagtgcgatggcgtgatctctgctcacggcaacctccgccttccgagttcaagggattctcctgcctcagcctcccgagtagctgggattgcaggcatgcgccaccacagccggctaatttttgtatgtttagtagagacagggtttctccatgttgttcaggctgctctcaaactcctgacctcaggtgattcacctgctttggcctctcaaagtgctgggattacaggcgtcagccaccgcgcccggccagaaggagagtttctagtcatacccttgctttccaaatagtgtgattacaagtcattaggggagtttcattttattttattttatttttgagacagagtctcgctctgtcgcccatgctggagtgcagtggcgcgatctcggctcactgcaagctccgcctcccgggttcacgccattctcctgcctcagcctcctgagtagctgggactacaggcgcccgccaccacgccsggctaatttttttttatttttagtagagacggggtttcaccgtgttagccaggatggtctccatctcctgacctcgtgatctgcccgcctcggcctcccaaagtgctgggattacaggcgtgagccaccacgccgggccaggggagttttatttctttatttctttttctttcttttcaatttttttttttattttcttttctttcttttttttttttttttttttttttttttttgagacggagtctctctctgtcgcacaggctggagtgcagtggcgcgatctcggctcactgcaacctccaccttctggattcaagcgattcttctgcctcagcttccgagtagctgggattacaggcgcccgccaccacgcccagctaatttttgttttgttttgttttgagacggagtctcgctctgtcgcccaggctggagtgcagtggcgcaatctcgacccactacaacctccgcctcctgggttcaagcgattctcctgcctcagcctcccgagtagctgggactacaggcgtgtgtcaccacgcctggctaattttttgtaaatttttgtatttttagtagagatggggtttcaccgtattagccagggtggtcctgatctcctgacctcgtgatctgccggcctcatcctcccgaagtgttggaattacaggcgtgagccactgtgcccagcctaatttttgtatttttaatagacacagggtttcaccatgttgcccaggctggtctcgaactcctgagctcaaacgatctgcctgcctcggcttcccaaaataattataggggaatgtttattatactgactcctgggcctcaatttaaatacggtaggtccaggaagccgcattgtaattttaatttttatttttattttattttattattttattttttagatggagattcgctcttgttgcccaggctggagtgcaatggcgtgatctctgctcaccgcaacctctgcctcccgggttcaagcgattctcctgcctcagcctccacagtagctgggattacaagcatgcgccaccactcctggctacttttgtatttttagtagagacagggtttctccatgttggtcaggctggtctcgaactcccgacctcaggtgttctgactgccttggcctcccaaagtgctaggattacaggcataagctaccgcacctggctgaagctgcattttccacaagcatctcagacgattctgatgaaggctgagaaacttcaaccaagcagttgttaatactaaaagtatttcataacttctcacctttgcccttcttttttgaattatttattcatatccttagacattttttttcactgagctcattcttctgcagaacctagacatttttcttttagagtataaatcttttatttcttttcaattgtaaaaactgaaaaatagaataaggatatttagtttttctgttcagatatatttcatttatttttcccagtttattgtgtgtcatttgtccatggtgcttgtttgtgattcaaaagtttaaatttgtatgtagttaaatctatgagtcttaaactgtatttactttaatctagaacagtgcctctactcttacttcccccgacattgtctttttgatgagtccagaataattttgaggtataacatccagtacgctggatttgtccaattatttcttcatgctattgtttatcttgttcctgtattccctgtattttctttaaactggaagctaggtctagaggtttgattagatttgggttaaaaaaaattttttttttttgagacagtctcactctgtcacccagctggagtgcaaggacatgatatcagctcactgcaacctct

SEQ ID NO: 93762 - DNA, 13592 bp, Homo sapiens
tgcttttggtgccacatgtatgaaacccattgccaaatccagagccatagtgactggcttctattctagggttgggagctgtggcttgcccaaggccatgtccccaaagtctctcacaacttagcacccaatggatgctcaccagatgtttgtagaagggatgactatgtagtgggatgtgagctgacccttggtggggagaggggtttgtgtagaagtatagcctgaccagggacatgactttgaatagacattaaggtaccttataagctgtaagatgtggtctgaccaaagaggagggtacacatgaacaaattgtggaattctgggggacaggtagctgagtgaggccttcaacggtggcaagggctttttccatgtgattatggaaacctagatccatggaggaaacttgtgagtagtggagaaagctcctcaggggaaggaaggctggctgtgacttcatctttataccatactctctagaatagggcctggccggtattaggctttagtaaatattccagtggcctgatgagggagacttttaagatatttacatgagaggcttttcatgatatagtcctccttatatattctactctagctcgccctccttccaaacttgaccttgactttctttttttaccagattcgcccctctcctaggtgctgtcagctcagctgcagtacatcactcctaaccctgcttggaacatccttgcctctcctctcctatctaattcatctcattcctccaggcccaagacagtatccagttatccacagaacctcaacactactactccagcacatcagtgtatggctctagtcagccatacacttagctatacacttaccagagcttagggtcacatgatcttaggttcagatgcaggctccactagttactgtgtaagcttgggtgggccagtctccctctctctgccttggtttcctcattggaaaaatggcagtaataacactgctaaaacagttctgtgacagtgaaatgagataataaatgagatataaaacccttagtaaagcatccagctcatagtaagcggtcaaaaatggtagctgtactgttttctagttgtttgctgtatttggctgttctcgtgttgctataaagaaatacgtgaggctgggtaatttattaaaaaaaaaaggcttaattggctcatggttctgcaggctgtacaagaagtgtggtgttggcatttgcttctgatgagggcctcagaaagcttccaatcatggtggaaggcaaagggagagccagtgtatcacatggtgagagtgggagaaagagagagaagggggaggtcccagactcttttaaacaagcagatctcatgtgaaataactgagcgacaactcatttatcactaaggggatggtgtgaaaccattcatgagagatctgcccccacgatccaatcacctcccaccaggcccccacctccaacactgagaatcacatttcaacatgagatttggagaggacaaacatccaaacggtatcattttatatatctaaatcttgcttcctccgcaagattgtgggtttttttcttcagggcaggggctgagtcttatgcttattttaactcgtatatttggcacaaagttaggactatagtaagtacttaagaaacatttgttggttcgaggtgactttgtgattactcggagttacttgctttaggagacagtatatcattattgaattctatattattctacgattcattttctgaaacccaacttttgctttgttttatggggatctgggactgacttgtggtaatctgattgtatgtgtgagcaagtgtgtgtgtgtgtatgtgtgagagagagagacagagagagagagtggagggaatggtggaggtagcgacaattgattccctaagggacagagccagctacagctcaccatcctaaccactgcatctagctttcctctcccagccctagagctgggctgttatctgcccagggcagctgttatggccctgactcccctggggagggctgctcaggccttcctcattcttccaggctgcctttaccacaaaaggaaatgaggtatttttgaccttatcagacttctctgccaaggcatcatgttttgcaagaggctattgccctggctatatacagtcctgggcagtgtgctaacattaaagaagcaaattcaggataatggttacctctggataagggaggcagggctatgagctctgagataaagcttcagttatctctgaggtatttattttttatgcagggctgtggggcatatgagtgttcatttattatcatgaacattgtataatcttgtatttgctgcttatcatttctatgcatgtattatccataaatattaccgtatttttcgagtattttccagctttacatatgtgtcgtgaaattttatgtgtacttcagctacctatattttttgcctggcagtttttgagatttgtctattttgtttgtttgtttttttgagatagagttttgctcttgttgcccaggctggagtgcagtggcatgatttcggctcactgcaacctccgcctcccaggttcaaacgattctcctgtttcagcctcccaagtagctgggattacaggtgcccaccaccatgcccggctaattttttatatttttagtagagatggggtttcaccatgttggccaggctggtctagaactcttgacctcaggtgatcctcccgcctcagcctcccaaagtgctgggattacaggtgtgagccactgtgcctggcctagatttgtctatattgatacgtgtaatattagactctgtattaatattccatgttataaagagatgtatcttttctgctattgggtagacatttcagtggtttcctatttttcacttttgcaaacaatgctataacaatagtctgatatgcagttccttgtgcctaagacaagatacttctgtaggagtggattggctaggccataggacatatatgcctctctctttgctcgtattgccacatcgctcctcagagtgattgtcctactttaccttcccaccagcagtgcacaaatgttgatgttggccatgtccttgccaacccttggtagttgtatctgtgctttctcctctctctccagatcaccagaaaaggtgggagttaaggtttttcaattaaaggagaatgtcagctctgaagaatttcctgttacatttactttaatgaggaaaagattttgttctctgttttggtgaaaataatgtttagacttctgtggaaaacagttacatacactttttattctgaagcagagcagttttttctttctttctttctttttttttttttttttgctgtttgcattcttggcaaacaagtaggaaagaccaattagcaagctaatgttctaaatatttacttgcagtaacagtcattttttaatgttttatatagcatggaacattaggtttatgtgtactgcttttcaatgttttgaattgattaaaatgaattaaatttaagaatgtgacacaactttatggataaagattgatcataattatttgccactttatttgcattttgtgagggaaaaatacatggtaagaaaatgtgttgacattttacaaacaggttagaaaagtcataaagagtaactttggctattttatgttgtctcttatgttcacaggtgggaaaggagaagtttcacaaatcccaacattggggcttttgcaacartgttatgatgttggtgagtgatgaaaagcctggaataggtggagaaccacttctggggcaaaagataaascctaaatrtagcatatatcctaaaggagatggaagtgatgtaccatcatgggtagcctttgataaacaggtaagtcacatgacactgggaggaatgcagtcttagcattttacagatgctaaataatttagttttgagaaagtaggagtcttcagtgtaaatgttaaggctagttctttttctttttgccttttctacttattattgcctttatttttagtgttttatttttagtgtttctccctttgtctttatttgtttaaattgacaaacataattgtatatatttatggtgtacaacatgatgttttgaaatatgtatacactatggaatggctaaattgagctaattaacatatgcgttacctcatgtgcttctctttttttgtgatgaaaacactattgtcttacaattttcaaatatacaatacattgttattagctatagtcattgtgttatacaatagatctcttaaacgtattcctcctaagtgaaattttgcttcttttgactaaggttagttcttctgaaaagataaattcaagaacaaaagtatcctaaacaaagaaaaatcattcttgctctgctcttttttatcaggcacattggttgcagaatgccaaatgtttatctttcttggctaatgcttattaacctttctctcatctccttcactggacaggataatctgtcctatagaaactaagagtctcgtcagattgtcacttttgcttttgagttgccattgactaaataattgtgtttgagtctgaatgtggctttaaataggaatagaaaaatgccttctcttcttttctccatactaattagtaataaaccgtagtaatgattccccatccctaagggctaaaatgtgatgtggcaagaagaatagtgaaaggaagtgatgccattattagacaagagttggaattttttaatgtatatgtctatacacatacacacacatatacatatggacatattggcagttagaaaaaggaatgtatttgaatattttttaaaaaggctaagatcagaggaaagaaaaggcgaccagctatatggatatgctgtgtttatcagatagccctgtatcacagcccaatgttctgttctccagaaagaactagttattagattattttagatcctgtaattgaaagatagttcaggactagataaagaattgaaaccatagcatgctaagtttaccaggtggtttttagcagcttttaacatggattggttggcagtactttgattctaattaaaatgtcctcaaattgacacatccccatgtcatctgtgatagggtagatcaattagagtgcacatttttttttgaagcctagttctgacacttatagtgatctaacagaccacagggaggcttccttcctgggaaaccatttctcctttcaacatgggccaatattcttttcttggattattttcagtacctggctcagtgctggacccaaagctcaaaaacaattctgggctgactgacttgggtggattatgcatagttttctgttactctcaatcttataggatgtttactttgcatgggccaaagaaaagattctatttttacctcatgtaaaatagagggtatcgacaatattttaaactaatccactactgaataagtatcgtaggccacaatgtattaatattaaactattctcttgcatttcaagtcgaaaagtcatttcatgtttttctcaatatttaatatgtgcctttcaagcctattttgcaggcctttaattacttatgtagaatatttcatgaatctggaataattttagcttcagactacttgagtaaacgaagagcttgctcatttcagggctaactaaatgcaacataattctttcagttattttgttggtcaacttctattaaatattcattgagctttaaatgagacactaagactgaaatatttacgtgctctgatgagactgtgaactacagactagatcctggttaataccccaagcaaattataaagcgctttctacattagcggttcaacaaaaacaagtcaacacttgttaatcatttgtcttaaaaatgagacattttcagtgcaccccatcccagccgcccggtcccggcccctcactctcctttgccgcgctaccaccatgctctccgtccgcgtcccgctgctgcacattacggacccgcagcagctgcagctctcgccgctgaaggggctcagcctggtcgacaaggtgaacaggccgccggccctgagcgggacccgggttctggccagcaagactgcatggaggatcttccaggagcccgcgagccgaaaactaaagcagctgcccccggcgtggaggatgagccgctgctgagaggaaacccttgccgctttgtcatcttccccatcgagtaccatgatatctggcagatgtatgagaaggcggaggcttccttctggaccaccgaggaggtggacctgtccaaggacattcggcactgggaatccctgaagcccgaggagagatattttatatcccatgttctggttttctttgcagcaagtgatggcataataaatgaaaatttggtggagcgatttagccaaatagttcagattacagaagcccgctgtttctatggcttccaaattgccatggaaaacatacattctgaaatgtatagtctccttattgacacttacatcaaagatcccaaagaaagggaatttctcttcaatgccattgaacgatgccttgtgtcaagaagaaggcagattgggccttgcgctggattggggacaaagaggctacctatggtgaacgtgttgtagcctttgctgcagtagaaggcatcttcttttctggttcttttgcatcgatattctggctcaagaaacgaggaccgatgcctggcctcacgttttccaatgaacttattagcagagaagagggtttacactgtgattttgcttgcttgatgttcaaacacctggtacacaaaccatcggaggagaaagtgagagaaataattatcaatgctgttcagatagaacaagaattcctcaccgaggccttgcctgtgaagctcattgggatgaattgcactctaatgaagcaatacattgagtttgtggcagacagacttatgctggaactgggttttagcaaggttttcggagtagagagcccatttgactttacggagaatatttcactgaaagactaacttctttgagaggagagtaggcgagtatcagaggatgggagtggtgtcaagtccaaaagagaattcttttaccttaaatgctgacttctaaatgaactgaagatgtgcccttattttgctgatttttttccatctcataaaaaaaatcagctgaagtattatcaactagccacaccatgaattgtccataatgttcattaacagcatctttaaaactgtgtagctacctcacaaccagtcctgtttatttataatgctggtagtatcaccttttgccagcaggcctggctggctgtgacttactatagcagtgacaatggcagtcttggctttaaagtgagggttgaccctctagtgagcttggcacagcaggattaaacagtcatttaaccagcacagggagttgaaagttgaaagatgcagcctcactgcttcagcgcagatttcaatgtttacttaaatataaaactggcactttacaaacaaataaacattgtttgtactcacaaggcgataatagcttgatttatttggtttctacaccaaatacaaagcattctcctgaccactaatgggagccaattcacaattcactaagtgactaaagtaagttaaacttgtgtagactaagcatgtaatttctaagttttattttagtgaattaaaatactcgttaaccaactttaaagtcagtcctgtgtttagatagatactagtctgttggtgccagatagaagacaggttgtgtttttatcctgcggcttgggtagtgtcctgggattctctgccccctctgagtagagtgttgtgggataaaggaatctctcagggcaaggagcttcttaagttaaatcactagaaatttaggcgtgatctgggccttcatatgtgtgagaagccgttccattttatttctcactatattttccccaatttctagttgataagaaaaaactattgaagagtttttttttcttttttttttcttttaatacaagaatatgtctctttttattgaggtcttttttatgtgctatgattaaattaaatgagataatgctttaaaagcacttatatgtgggagctaaggtagtattgtaaaacttcaagtcatccttaaacaaaatgaccaacctaagatcttgctcctgttaagtggtgaaatcaactagaggtggttcctacaagttgttgtttattctagttttgtttgtgtgtaagtacgttgtgtgagttaattcatttatatttactatgtcttttaaatcagaaattttttattatgtatgtccttttagattttacctgtagttcatactttaaaataatcacccagtgtcttattctagcattgtctaaatctgagtattatctaggggaatcttaaacttcagtaggaaaccatgagttattcatacagtttccattcaaatattaatttcagaacgaaacaaaatttttttttttttttgagacaaagtctcgctctgtagcccagtctggagtgcagtggtgcgattttggctcactgcaacctctgcctcttgggttcaagcaattctcctgtctcagcctcccgagtagctgggactgcaggtatgtgccaccacacctggctaatttttttatttttagtggagatggagtttcaccatgttggtcaggctggtctcgaactcctgacctcaggtgatccacccacctcagcctcctaaagtgctgggattacaggcatgataaacaaatattcttaatacggctactttgaattaatctgcctttatgtttgggagaagaaagctgagacattgcatgaaagatgatgagagataaatgttgatcttttggccccatttgttaattgtattcgctatttgaacattgtcctgttctattgttagtttccttcatcatttatggtatagtcaatttttaaatctctgtaatataatacattttcctatcttttaagttattgttacctaaagttaatccagattatatggtccttatacttgtacaacattaaaatgaagaaagccaaaaaaaataaaagacgttttcaacttgttgccagtttttccagtagcttttaatcctagcaatatatctagcattacactctcaaataatacaaagtaaaaataaagacagttctttggaaagtgtattaaaattaatatttgtagtagatgctctttgtgcccacccagatccatgctggggtggtgatcccccacccccagctgtgacaaatggtttgacaaacagctcacacctgtaaccctctctggagacttgctcttggctgatgggagttgcatctctcagagacacctgagaggttacactggcccctttcccctaagagggggcagctaataactgatttatcaagggtaaaaaaaggtcagcttccttgcctgaaggggggataattctttgctatgattcaggctccatagcccctcgtgcatcagaccaaggctacacttgacctgagaatgcatccttgcttgcgcggttcatttccctttcctttgctgcttccctcactcccttacaggtttctcccaagagtctgcccttaataaatcacatgcactaaaatccctgtttcaggctctgcctctatggaaccccaacctaagacaacattccaggttttaatccataattctgaaagcaaccaccaaaatgccttgctcaagtagactatcacattacaagcagagaaaatgccttttgcaatcatgaaaaggagccagtatttgttatcccgcatggcccctgcggcagacacttctagctgtttatcctttatgcattctacccttccttcttataggcagaacggttttatgcaggctggaattgtgcccacttaaatgtgttacctccccaggctccttgcagctagggctggccgcatgactcacttttggccaatgatatatgcattaagatttattgggtggggctcgtgggagagttactatttttctaatgaaaacaggctcagcaggtatgattttcctaccctttgccctccttttgtttttcctgtctggaactagtgttaccgaaccaaactgggtccatttacctgcatgcaagggaaagccaaacgccaaagcaccaggtttttgcagcaagaaaggtttattgagttgattggcaaggagacaggaggaaacactcaaatctgtctcctggagctgggggctgggtcgggttttataagcatagtgtaatgaggtgtgatctgattgcatcttgcaatgaggtgatgctgggaggcataatctgattggatcctgctatggggtgacaccagagcacgatctctttggttcctggatcctgccatatggggtccacttcttaattcagtccctgttccttggtccaagcacttaggtttcacctgtgcacacttggttcaactgggcatgctcgggttgtatgaccttcaaccctggggtccacggcaactgaaaaacaactcacgattttgttttataaaagttgaactagattagtctggtgcggttacactaggacataattcctagggcacagcagctatcttgtgagcatgacagagataaaggaaacctaggtccttgttggcatcatggagccactgtttaaggcccaggctgcctctctttggacttgtagttatgtgagaaaaatcaggctatatttcagagattctcaacctagcaaggtatttggaaatatgtggaggtgttttgagttgtcacaatgatcaggagcagggccagactagggtaaggcaaatgaggcacttgccttcggtgcaacatttggggtgccccaaaactcagcaattaagctagataatattttattatctaattattattattatctgttattaagctagtataatattttaaaaaatcaaattaatgccagaaattcatgatgaacaaaatgccaacattttaaataaagacaagatcagcaactgtgccatggaagttatattggagcctgaggcaaaaggaaaaatcagtaatactgatccaatcttcattaaaaatttggcattttgatattttgtttctcctggatattttgcattaattttgttttattttattatttttttttgaggcggaatctcgctctgttgcccaggctggagtgcagtggcacgatcttggctcactgcaacctccgcctcccaagttcaagcgattctcctgtctcagcctcccgagtagctgggactacaggcacccaccaccacacccggctaatttttgtatttttagtagagacgggatttcgccatgttgaccaggctggtctcgaactcctgacctcaggtaatccacccccctcagcctcccaaagtgctgggattacaggcatgagccaccacgcctggcttgcattaattttgatgttttaaatcgcctcaccctagggccagccctgaccaggaggtgctgctaccattgagtatccaggggccaagtgtatattttatatcctgcagtgtggggaaggcaaccctacattggggaaaaattgttctacctcaaatgccaatactgtttccaccgagaaacacagtgtgtgtactacttgcttaaaacccgtagcattgggagaatttctaaaaacaggcaaaagaattttgcttaatactgcacccacccttcaaagacttcgttatttcattgaattcatttaaataaaagcagactatgatggggccaagacaaaaacaagactattccataatcataactgtctgaacacagaacacgaacactgtccaagtcacaaaatgcatcactcacgccagttatttccagtcatcatcccagtacctccatgagtaggaagcaaatatagacggttgtcctcatcatataaatgaagaatcattctcaaggagaaatggagcaggaaccagagtctgagactgggtgttggaggcactgattctggttctggtcccgccattaactatatgtgtgattgtggcttagtcactttacctctctgagcctcagtttccttaactataatgcaggacttggctagctgatctgtaaggcccttttacctctggcaatttacgtctaaaacttgactaaagtcaaattcagcttgtttatcctagaactgagcccagaccctggatctaatggcctaggactctctaattacatcaggcacccactacttcattattaattgaaatttggcatttagcagtttatgctacgctatggtggctgtataagatctatagttagctgcttttataaaacgttggaatatttagaaatatacaaatgactgaatgtttttatatgactttcgtctggaagttaagccccatttacatagactctacaattttgctctcatttttcatttgtcaacagctcctagttagcctaatttgtttgctatttcacaaatgactcagttatagtaagtggcaagataaaagttgatcttatgggatatgcatacatttgaaaatattatttctttttttttccatctattgtaaacataatggttataatcaaaactactgaccgcacaattgaattttaatcacttacattaattgacatcgagcttgtaatgagctgattatttatgtagctgattatttatgtagctgtgtgactctatgatttgaacaatataaaaataaatttttaaaatataatttggtcccctgggtcatcttgatttttttttttttttttagattaaacaagttagtttattattcatttgcagcaagggaaaaaacataccctaagcaactgtgggatgtctaatgaagcaggtgttagaaaaggcttattataggatttgggcttgtgttaagtaattgtggggagtgattaaggaagcagggctttgctctggattgggtgctatcaggaagtaggggtacatctacaactgggtatcttaataaatctcagagggagagaacagactagagtgagtctatacctataattgggagagaagcagctgtcacttctgtgagccaggagagggggatgtttgacatttcatggctggacaaggttcattttctgtgtttagatgtgactgtggagtggtcttggttttgtcttgatccgtcacggtcacagagtggccttgtctgatgttggtggtctctgaaattattcttgtttagcaggagaacaccaaggcctagctgtggatgccaggccagcttgtaacagcaccaagaccagctgatagtataggccggctcctggatgtcaggggctacttttctctttcttacccagtactagctagaatttttaattttcctgcrgtaggattaacgaatgatcaggtacattataatttcacttgcttaacaaagaacaatacgtaaatacagattcttgaagttttgcctaaagccagttaggaatgttataaaatataatcagaatatataaaaataaaatacaattaagctttta

SEQ ID NO: 93763 - DNA, 14187 bp, Homo sapiens
ctggtctcgaactcctgacctcacgtgatctgcccgccttggccttccaaagtgctgggattacaggcgtgggccaccgcgcccagccttacattagtaaattttatggcatataatctgaataaagtgggagtggcctaggacttccttgggaagaaattcctcccatgtctctctgatgaactgggaggaagcagggccagtgagtccttggctagactgagttctcagaatctagtggccttgggctccttccagctaaagatgggctgaccaagactgagctgtggagtgtgcaggaagtcccagagccctgtggtagggggtggggaacaggatggctgcatccacttgttcctgggggtttttttctttgtttttgttttgttttgcttggttttgttttgtttgagacggagttttgctcttgttgcccaggctggagtccaacggtgcgaccttggctcactgcaacctctgccttccggggttcaagcgattctcttgcctcagcctcccaagttgctgggactacaggcgcctgccaccacgcctggctaatttcttgtatttttagtagagatgagatttcgccatgttggccaggctggtctgtaactcctgacctcaagtgatccacccaccttggcctcccaagtgctgggattacaggcgtgagccactgtgcctggccatttgcttctgttttttttttgttgttgtttgtctgttttttgttttttgtttttttgagacagagtctcgctctgacacccagtctggagtgcagtggcgcaatatcagctcactgcaagctccgcctcccgggttcacgccattctcctgcctcagcctcctgagtagctgggactacaggcgcccgccaccatgcctggctaattttttgtatttttagtagagacggggtttcaccgtgttagccaggatggtctcaatctcctgacctcgtgatccgcccgccttggcctcccaaagtgctgggattgcaggcatgagccaccgcgcccggctgctcctgtttttaagagatgtgcctttaccctgatccccctcttgtggaaccccaggaccccagacatctgtctgatgagtctgtgccccggtccaggaaatgcccctcatcttgaggtcctagaaccagtgtgggagagggtggccttggcatgcttggcctggggagtcccaagctttgtagagataggggacaagtctatcaccaccttcactggatgggactatacttctttctgccccaggaaccttgggtagagggggcattggacctcaaagccagctggcagcctcagcatttcagatcaaagtggcctgcctcttcaacgtctcagcctacccaaggcatgtcctaggtgtaggctgctctctggtggccagatagggaaggactcattcatcctttggcaaggtgggctgcgatctgagctgggctgtgtgataggcaggcaactggattagacgggcagagacaaagcaatcctggggtattctggagcacataagcagaggggtaggctagccaggagcaaaagatgagatgggctggagagcacgcagagagcccagccaacttgcttcacacacactactggaaaagtaatgagttgtgtcacaactcaggctgggcgcagtggctcatgcctgtaatactagcactttgggaggccaaggcgggtggatcacctgaggtcaggagttcaagaccagcctggcgaaaccccgtctctactaaaaatacaaaaattagccaggcaaaaccccgtctctactaaaaatacaaaaattagccagccaatgcatgacagtagtcccagctagtctggaggctgagacaggagatggcaccactgcactccagccatgggggacagagccagactccatctcaaaaaaaaaaaaaaaaaggcgatcaaacagtactaaaggccctattatcaaataaataaataaataaataaataaaggctttcactcacagtgtgactctccccctccctcccacaaccactgtttacagagccttaaaaaaaaagcaaacaaacagatgataatgtgttatcttgctctgtcactctgtggcctggcctgcagtgctgtggtgccatctggactcactgcagcctcgacctcccaggctcaagcgatcctcccctctcaacctccctagtagccgagaccacaggtgcatgccaccatgccgggctaatctttgtattttttgtagagaaggggttttgccatgttgcctaggctggtctcggactcctagattcaagtgatccgcctgcctcaacctcctaggatcaggggccaccgcaacgggctagacttttttttttttttaagtcagggtcttgctttgttgctgccgagaccagctgggtcagagagaccctaacccagcggcgctagaggaattaaagacacacatacagaaatatagaggtgtgaagtgggaaatcaggggtctcacagccttcagagctgagatccctgaacagagatttacccacatatttattaacagcaagccagtcattagcattgtttctatagatattaaattaactaaaagtatcctttgtgggaaacgaagagatgggcaattaaaggaataggttgggctagttaactgcagcaggagcatgtccttaaggcacagatcgttcatgctattgtttatggcttaagaatgcctttaagcagttttccaccctgggcaggccacgtgttccttgccctcattctggtaaactgacagccttccagcgtgggcgttatgttcatcatgaacatgtcacagtgctgcagagattttgtttatggccagttttggggccggtttatggccagattttgcggggcttgttcccaacagttgcctggcttggagtgcagtggtgtgatcatggctcactgcagcctcaaacccctgggctcaagccatcctcccacctcagcctactgaggagctagctgggaccacaaacacaggcctctgtgcccagatgatttttgtagagacagggtttttccatgttacccaggctggtctcaaactcctggactcaagtgttccacctgcctcagcctccctaagtgctgtgactacaggtgtgagccaccacatctagcacacctagtgcagtccttctagagactgggccactcccagccccggagcaaccttacttaagccctccccgatcagataggcagcctgacaagttgcatttcctggggaagagcagcaagaaccctgctctgggagtcaggagttcccgattctagcccagagctgctttccttactagttattgatcttgcccaactcacttcctgtctctggctctgtttcccaatctgtaaaattgttactggaaaggggtcccaatctagacccaaagaaaggtgaggagagcaaaaatcaccccccccaagacaaaaagttcttatctgagcaatttagataaggagcaatccgccaggcgcagtggctcacacctgtaatcccagcactttgggaggccgaggcgggtggatcacgaggttaggagatcgagaccatcctggctaacatggtgaaacctcgtctctactaaaaatacaaaaaattagctgggcgtggtggcggggcacctgtagtcccagctactcgggaggctgaggcaggagaatggcatgaacccgggaggcggagcttgcagtgagcagagatcgaaccactgcactccagcctgggtgatagagcaagactccgtctcaaaaaaaaaaaaaaaaaggagcaatccaaggagcaaagaccacctgttgaccatcaaacaggccatctggaggcgaaactccttgcctggggaatttagaagtaataaaggccaggcatggtgaatcacacacactttgtgagcactttgggagccaaggcaggtggatcacttgaggtcaacagttagagaccagcctggccaacatgatgaaacaccctccctgcaaaaattagccgggcatgatggtgcatgcctgtaatcccagctactcaggagactaagacaggagaattggttgaaccagcaggcagaggttgcagtgagctgagatcaggccactgcactccagcttgggcgacagagggagactctgtctcaaaagaaaaaacaaacaaaaaaaacttccctagtatttaaagtcggcatctgattccaagcctctttcaacttttataagtaactaaaatgtctatacattctttttaaaaaaaaaaaaaattcaacaaacacttatttctcacacttctggaggctaggaagtccaagatcaaggtgcttatagattcagtgtctggtgggggctcacttcctgctttatgagctatgccttctcactgtggtttcacatggtagaaaggggtagggctttctctctggcctcccttacaaaggcaccaaccccattcctgagggctctgccctcacaacgtaaaatttctgtacattctatgccatgctgaagctcattttacaaccctaagctctcaccttaaggtccatacatgctcctaaggaaaatccaccacagcgcactcagtcctcccgtggaggcacctgctgcactctgctgcagtgttcttcctttctaataaactttccttttccaaacctatactgttgtcagtaagttctttcttttttgagacccctccccccaccccaagacatgccagtagtcccagctagttgggatgctgagacaggagatggcaccactgcactccagcctgggcaacagagcgagactcatctcaaaaaaaaaaaaaaaaggatcaaacagtactaaagaccctattataaaagtctttcactcacagtgtccctgaatctccccctccctcccacaaccactgtttacagagccttaaataaacagatgataatgtgttaccttgctcagtccctggcctggagtgctgtggtgccatctggactcactgcagccttgacctcccagactcaagcgagcctaccctctcaacctcctcagtagctgggaccacaggcacatgccatcatgctgggctaatctttgtattttttgtagagaaggaggggttttgccttgttgcccaggctggtcttggactcctagattcaagtgatctgcctgcctcaacctcttaggatcaggggccactgcaatgggctagacatttttttttttgagtcagggtcttactctgttgcctggcctggagtgcagtggtgtggtcatggctcactgcagcctcaaacccctgggttcaagccgtcctcctgtctcagcctcctgaggagctagctgggaccacaaacacaggccactgtgcccagatgatttttgtagagacagggtttctccatgttacccaggctggtctcgaactcctggacttaagcgctccacctgcctcggcctccctaagtgctgtgactacgggtgtgagccaccacatctagcacacctagtgcagtccttctggagagtgggccactcccagccccggagcagccttactcaagccctccctgatcagataggcagcctgacaagttgcactgcctggggaagagcagcaagaaccctgctctggaagttaagagttcccggttctagcccagagctgctttccttactagttattgatcttgccgaagtcatttcctgtctctggctctgtttcccaatctgtaaaattgttactggaaaggggtcccaatctagaccctaagaaaggtgagagagcgaacgggccccggagacaaaaagttcttatctgagcaatttagataaggagcaatctaaggagcaaagaccacatgttgaccatcaaacaggccatctggaggcaaaacttgtctggagaatttagaagtaatcccagcactttggaaggctgaggtagatggatcacttaaggtcaagagttcgagggagcggcagcggcggccaggcacggcgcgaggcgacgccacaggacagcggcggcagcaggaaatgcagcggcggcmgcagcagcagcaaaacggatcggtggagaggcgccgccgccgccgggccgggcgtcgcgcrccgaggctcggggggagtcgtcgcagccgccgccaccgctaccgcagccgccgccgccgccgccgcccaggtgactgaggagagaggcacctcctcgctcccgccgccgccggacttcaatgcccagtccccagctcgccagcgtttttcgttggaatatacgttgcacatttatggcgattctgaatgtgagagcagatttctgccaggctgagcacagcgttttcgctgacaagtgagcttggaggttctatgtgccataattaacattgccttgaagacttctggacaccgagactggcctcagaaatagttggctatttatttatttatttatttatttattttgagacggcgtctcgctctgtcgcccaggctggagtgcagtggcgcgatctcagctcactgcaacctccgcttcctgggttcacgccattctcctgcctcagcctcctgagcagctgggaccacaggcgcccgccactacgcccggctaattttttgtatttttagtagagacggggtttcaccatgttagccaagatggtctcgatctcctgacctcgtgatccacccgccctggcctcccaaagtgctgggattacaggcgtgagccaccgcaccccggcagctttttttttttttttttttttttttttgagagagagtttccctctgtcgcccaggctagagtgcaatggcgcaatctcggctcactgcaagctctgcctcccgggttcaggccattctcctgcttcagcctcctgagcagctgggactacagacgcccgtcactgcgcccggctaattttttgtgtttttagtagagacggggtttcaccgtgttagccaggatggtctcgatttcctgacctcgtgatccgcccgcctcggcctcccaaagtgctgggattacaggcgtgagccaccgcgtccggccagctttttttttttaattgcaagcatatttctttgaatgactccagtaaaattaagcatcaagtaaacaagtggaaagtgacctacacttttaacttgtctcactagtgcctaaatgtagtaaaggctgcttcagttttgtatgtagttgggttttttggagtccgaaggtatccatctgcagaaattgaggcccaaattgaatttggattcaagtggattctaaatactttgcttatcttgaagagagaagcttcataaggaataaacaagttgaatagagaaaacactgattgataataggcattttcatggtctttttaatgttttctgttgttaaacatttcaagatttattgattttttttttcactttccccatcacactcacaggcacgctcacactttttatttgccgtaatgaaccgtctagcccctgtggagatctcctatgagaacatgtgttttctgataactcacaacccwaccaatgctactctcaacaagttcacagaggaacttaagaagtatggagtgacgacttcggtttgagtttgtgatgctacatatgataaagctccagttgaaaaagaaggaatccacgttctagattggccatttgatgatggagctccatcccctaatcagatagtagatgattggttaaacctgttaaacaccaaatttcgtgaagagccaggttgctgtgttgcagtgcattgcgttgtggaattgggaagggcacctgtgctggttgcacttgctttgattgaatgtggaatgaagtacgtagatgcagttcagtttataagacaaaaaagaaggggagtgttaaattccaaacagctgctttacttaagatgcgattacgcttcagagataccaatgggcattgctgtgttcagyagaaagaaatgtaaatgaaggctgacttgattgtggcatttagagggaactcctggtacctggaaatgtgaatctggactcttacctgtgtcatcaaagtagtgatggattcaatactcctcaaccactctcctaatgatcagaacaaaagcaaacaagaaatctctctataaaatgaataaaatgtttaagaaaaaaaaagagttcgagaccagcctggacaacatggtgaaatcccatccctacaaaggttaactgggcttggtggcacgtgcctgtaatcccagctactcaggagactgagacaggagaatggcttgaacctgggtggctgaggttcccgtgagctgagattaaaaaaaaaaatcatacttccctagtatctaaagttgatatctgattccaggcctctttcaactttttttgtttgtttgtttgtttttttgatatggagtctcgctctgtcatccaggctggaatgcaaatggcacgatcttggctcactgcaacttccacctccagcgttcaagcgattctcctgcctcagcttcccaagtagctgggactacaggcgtgtgccaccaagcctggctaactttttttcttttttttttttttgagagggagtcttgctctgtcccccaggctggagtgcagtggtgtgatcttggctcactgcaacctccgcctctccggttcacgccattctcctgccttagcctcccgagtagctgggagtacaggcgctcgccaacacgcccggctaattttttgtatttttagtagagatggagtttcaccgtgttagccaggagggtcttgatctcctgacctcgtatccgcccgtcttggcctcccaaagtgctgggattacaggcgtgagccaccgcgcccagcacctggctaacttttgtatttttagtacagacggggtttcactgtatgttggccaggctggtctcaaacccctgacttgaggtgatctgcaagcctcagcctcccagagtgctgggattacaggcgtaagccaccgctcctggcctaaggttggctatttttatggttatttcttgattatatgataaacaaggggtgggttagtaatgaatttttcagaaaaggggtggggatcccccccaactgaaggttcctccactgtttagaccatatagggtaacttctggacgttgccatggcatttgtaaactgcctggcgctgctaggagtgtctttagcatactaatgcattataattagcgtataatgagcagtgaggacgatcagaggtcaccttcctgtcttggttttggcaggttttgaccagtttctttgctgcattctgttttatcagcggggtcttgtgaccttttatcttgtgctgacctcctgtctcatcctgtgacgaaggcctaacctcctgggaattcagcccagcaggtctctgcctcattttacccagcccctgttcaagatggagtcgctctggttggaaacttctgacaaaatgacagctcctgttatgttgctgctgctgccgccaatggacagcctttaacgtgcccgccagccctgctccaccgccggcctgggctcacatggccccatccctcctcgaacctcctagcctgttagttactcaaatctgcaagctctctgccttctcagggccttcaataaatgcatttcttctgtctggaaggctcttcctttccctcttctagccaattcctattcatccctgagtttcagattaaaagtcacttcctttggaaaccttacttcgctacttcgctacttactgcactacttcgcagcatcacaactatgatggaaatccttacttacgttaaatatctggtttctaggtcacctccctgacggggacggtagggaccgtcttctcgttcatcagtagggaagtagctatggcagtgcctgatacaaaataaactccaaatgtgtatttattagatggttggatggaagttatttgcgtgtgaaagcgcgttttacccgaaggcgctctgtgagggccagcgggtccccttcggccctggagccggggtcacacgctccccaccgcgtgcggtcacgagacgcccccaagggagtatcctggtacccggaagccgcgactcctggccctgagcccgggcttagccttcgggtccacgtggccggaggccggcagctgattggacgcgggccgccccaccccctggccgtcgcgggacccgcaggactgagaccatggaggcggtggcggtggccgcggcggtgggggtccttctcctggccggggccgggggcgcggcaggcgacgaggcccgggaggcggcggccgtgcgggcgctcgtggcccggctgctggggccaggccccgcggccgacttctccgtgtcggtggagcgcgctctggctgccaagccgggcttggacacctacagcctgggcggcggcggcgcggcgcgcgtgcgggtgcgcggctccacgggcgtggcggccgccgcggggctgcaccgctacctgcgcgacttctgtggctgccacgtggcctggtccggctctcagctgcgcctgccgcggccactgccagccgtgccgggggagctgaccgaggccacgcccaacaggtaccgccccgaagcttccccgcgtccgcccgaggcgcttaccccctcccggagccgctgccacccaaatcgggaggctgagcggggagcgctggccggaaggcccagctgcgccgcctccagcagctgtgtggccttgagccagccactctgcctttcagagcctcggctggcccacctgaaaaacggaaagaagacgcctaccgtgcagtgttattgtgaggatttgcacgatgatgggcatagaatttgtggtgcacaattggtgatgagtgaattttcttgccttcctcccccaccttctctttgaacctgcggactgaggaaggacgcctccatcccccaccctacaggcctgtgttccagcgcctgccacactatggagtgatgtgttcacacagctgtcctcccctgcccatctgttagactgtgggggcagggattccccgttccaggaaaacaccgtgcagaggaggggctctggcagtgtggcatgaaagtggaatatgccacccaaatacccgccaggctagagggccctgggagagtgcaggggacgagtgcctcagaagcccagccccggtacctggtctcagctccacctggggtgggtcccagtgtgcagcagaagggccgagtttggagcccctcccctctcctctaggtgggggatgggggatttgttccagggccgtggaccctccagggtgggatgcgcccctgctcatgacactgcccgcaggtaccgctattaccagaatgtgtgcacgcaaagctactccttcgtgtggtgggactgggcccgctgggagcgagagatagactggatggcgctgaatggcatcaacctggcactggcctggagcggccaggaggccatctggcagcgggtgcgtgcccactgtcccttccccaccctcctctatggcgggagccaccgtaggtgttttcacccgccccccagcatgggcgcagtgtctctctctagaagtgctttcagcgtgcacagtggcttgggcctcctaaaaactgaggcttccggccgggcgcggtggctcacgcctgtcatcccagcacttcgggaggcctaggcgggcggatcaggagttcaggagatcgagaccatcctggccaacattgtgaaaccccgtctctactaaaatacaaagaaatagcaacctgggcaacagagcgagactctgtctaaaaaaaaaaaaaaaaaaaactgaggcttccagtttgaggagtggggctccttcccccatctcccctatgcagccaatcacctggtcccttggatccaactcatgggcagctctagatctgcctccctggaagcttctgtgctgcaatggctgctccaggctctgcttaagctcttcacacagttgccctgcccttccatctggcactcttgctccatgaagccttctaaggccttcctgttgggggaaagcccctttgtgccccatctcctcacccatgcgacaaaggcaacacagtgaactcacctactcacaggtctctttcctctgggctgtgggctccttgatggcagcgttcggattttgtctcagtagccctagcacccagcacaaagaagcaatgagtgaatggttgttgaatgaatgaatgaatgaatgaagatgaatatatttctatgtgtgggcccttcttcctcaggtgtacctggccttgggcctgacccaggcagagatcaatgagttctttactggtcctgccttcctggcctgggggcgaatgggcaacctgcacacctgggatggccccctgcccccctcctggcacatcaagcagctttacctgcaggtaaaaggatggaaaagggaaggggcagaatcggtgatagatggtcatgggcccaggaagggtggtattaggccggccccagggctcttaactgaggcggggggctgcgtgtatcctgggagatgagggccttctcataggacagcagtggccatgctcaccacccttccttctgttcctccagcaccgggtcctggaccagatgcgctccttcggcatgaccccagtgctgcctgcattcgcggggcatgttcccgaggctgtcaccaggtgaggttccgctcaccccctccacttagctcagagagggaattttattcccttctagaacatgacttaaaaacttaagctctgggccgggcgcagtggctcacgcctgtaatcccagcactttgggaggccgagttgggcggatcacctgaggtcaggagttcgagaccagcctggccaacatggtgaaaccctgtctctactaaaaatataaaaattagctgggcatggtggcacgcgcctgtaatcccatctacttaggaggctgagacaggagaattgcttaaacctgggaggcagacgttgcagtgagtcaagatcacgccattgcactccagcctgggtgacgagcgaaactctgtctcaaacaaacaaacaagctctggacgtaggcctgggtttgatttctgactctgctactaattagctgtgtgacttcgggcagatgacatgactgctctgtgcctcagtttccttacttgtaaaatgggatctctacccacttcgctgtagggtttgtaattatctctcgatctatctgtgactttgcacagagtgctagcaaatggcagcccttgggagtggcagcaggggtgctccagtgtcccttgtccctcctgttcctctgtgcttcccagccatcctctcacatgtggttgggaaaagtcttcaaggctcacctgagacctcccctccttcaggaagccttgctagtgccccgcatgacctcctttgcacctgctaatgtctggctcccatactctcgtaggacttaatgcatgccagtggcctccctgcccgcctctttgcccccatcaccaggtggcaggaaactcactcattcattcaataaacttggtccagctgtctgaggctgccagaactggctgtgctgggtcctgggaggcggcaagaaaggtgcccaagggcttacccctgataggagagatatgttggctgaaggatacaatgtggggacaaggacaggaatatatgtgggttccgctctcctctgccgggagagaggggcaggaagggctcagggcagagcccagccttgaaaaatgagtgttgcttggacggacgcttggctaatgcttgtaatcctagcgttttgggaggctgaggcgtatggatcacctgcggtcaggagttaaagaccagcctggccaacatggcgaaaccccatctctactaaaagtacaaaaattagccaggcgtggtggcgggctcctgtaatcccagctactcggtaggctgaggcatgagaatctcttgaagccaggggccagagactgcagtgagccgagatcacaccacttcactccagcctgggtgacagagtgagactccgtctcaaaaaaaaaaaaaaaaaaaggaaagaaaattaaacacctcatgttctcactcatagtgggagttgaacaatgagaacaacatggacacaggaaggggaacatcacacaccgggg

SEQ ID NO: 93764 - DNA, 13975 bp, Homo sapiens
acttgcacttaaatttaagaccctcagactcctgccatcttgggtgttctatcacacctctggggaaccccaggctttctagaaatgtcaaaacacatagtgtttacctgcatgccaggtgcaatcttacacatattcatctaatcctaacgacgatgtatacaataggttctatcttcctcaccttaaaggtgtgagaaatgatggcacagagaagctggttaacttgcccaagggcacacagcgtgtaagtggcagagatagaactcaggcagtctggcttcagaggccatgttcttaacctttacactatactacttcgtgactctaccccaaaatgtggagtgaagttgaaattttgtgccccagaacatgagtttcagccactagggtcccgctcagggtcgggtctgatcacagggaagggtacggggagccaaacaggtaatatcacgggtagcagccaagttcccacccttgtgcctaaacccagctcaggtctttctgaagctaggagcaccggaactacggaggagaaacagctccgcgctctcaccagcgggccctcttcctcctccatatctgaggtcccagcccgcaacaccagttcccgggcsgcagccgccatggtcgcagcggcggccattccccgcagcctcacttccggcaactrtcagtcccggcgagtccgttccccggagtggagctacaagtcccaaagggtcttcctcagcgcgaaatcgttcccagatatttgagttaagttgtttgactccagctgtcccctttcagctctaaccacttcacccaactgcaaatggaaatatggaagtctgaaacacaaactagccccggaaccttcgctgttctcttacctatgaaccttacgaactgtaaagaaaggcgcaccggaagttgtggtacccaagccatactctcataaatccagccaggtcgcgctgaaacagtttccggaagcacttctcctagatcgcaccgcctcttcctcctggaagctatataatgatatcgcgtcacttccgctctctcttccacaggaggyctacacgccgccgcttgtgctgcagccatggtaagrctggaatccgtgccgtgatccagcggcatcgcagctcgggcaaggaaagccggctgtcagggttctggaaacgtcctgccctgagggcctgcgactttctgtatggagccttggatcgcgtccctggaaagggacaccaaagatttccaattccggagagcgggcccgaggaagggtcactgctcgggcgcacgaaagctgtctaaggcttgggcgtatatggggaactctggcttttgccacgcacttttgggaatgggcaggagacctgcttcctctctccagaggttgcattttcccaagcttgaacgcttcatgtgcctactctgcaggactgaggagtttgctctgtggtgtgaaaacctaaggaatggggggcgggtgtcttgccacttgtgtgacaggcttaacctttttgtatgaagttcgtttgccttatcggccttactgtttgatagtttactgtgtctgatttcttcccccgtactttttcaactagtctctagtgatccctgaaaagttccagcatattttgcgagtactcaacaccaacatcgatgggcggcggaaaatagcctttgccatcactgccattaaggtragtgaagtagggtaaggaatagggaatgtaaatgagaattgggttgtgaagacataagcaaaaatgaagcaaggctggggagacttgagtctcatccagatcaccttgactgctggattaagaaaagaaagtggtttagggagagactgacccctttagcatttaccacagaaaataagtgattaaagccaakatagtggtctaaggtcaagccaaaacatttcacctggggaagtggggaggaggtatggttgctcacccgaattcgctaagattttcctgaaccacgagcttgtgagatttcttctagattcggtttctttacccatcccaccatcataacagcaacccttcctgcgaaatttatattccctgagaattggaggattattgggcatcttgagggataagtagaaataccaacagataaaaagtgtgaagaagcctgtagatggagggtggaagaagtctgagtgggacatttactcagatgagccataattgacactcctttcctgtcgaagtgtgaaggagtacatccatctttctttggcttttaagaatcgaatcaatgaatgcaagaatattatttcacttgagtatttctctccacaaacctaatgaattcttggctttctagatacataacgttctttttttttcccttaagtcagaatgtgtagttagttgtggaaatagcctaccagtatgtgtccatgcgtgcagggctaggcctgtcttcttggcttctgttgcatggtaggtacttaggcgacgttagggaatggatagtagtagggatactgttggctctgttgaggaatttgtagagggaaattccttctgttgggtgctctgtgaaactaataaggcagtgtgaaatactgtacttatttcagagaccggctgtgaggcttaagtagaggtgcagcattcataagtgtaatagagaataaccttcatggatgtatctaactaaaaattagaaatcttatttcatctatatctcttcccacacccattttgaagtaaatcttttcacttgtaaacatataattaaatttgaggcttagtgcagtggctcactcggaggctgaagtgggcggatcccctgaggtcaggagttcgagaccagcctggtcaacatggtgaaacctcgtcatttaattaataaaaaatttgaaagaccctgctctcttctgaatcaacctaataatttgacccttggtcatgtttatttatttatcccgagacagagtctcaccccgtcacccaggccggagtgcaatggtgcaatcttatctcactgcaacctcagcctcccaagtagctgagattacaggcacacgcccagctaatttttgtatttttagaagagatggggtttcaccatgttggtcaaactggtcttaaacttctgacctcaggtgatccacccacctcagcctcccaaagtgctgggattataggcgtgagccactgcacccagccacatttattttttgagactgtcgcccaggctggagtggcggaatcactcttcactgcagcctcgacctccagggctcaagtcaatcctcctacctcaactttccaagtagttggggctacaggtgtgcaccaccacatctggctaatctggatcttgctgtgttgtccaggctggtcttgaactcctgggctcagtgatcctccagcctcagcctcctaaagtgctgggattacaggcatataggcatgagccacggtgaagccaacccttgatctctttcttgcagataggaactgccatttgttttagtttcctggagcctactgtaacaagttcatataaactaagcagaaaattactcttggcgctggaggcacttaagaatcctaccttgcctcttcctgtcttctggtggttgtcagtaatccttagtgttccttggcttgtagctgcattactccaatctgttgctgtcatctcatggtcctcttcgtgtctctctcatgatttgtcattggatctagagcccaccctaatcaaatataacgtcattttacctaattatttccgtaacgaccttatttccaaatagggccacattctgatgttctagttggacaaaatgaggggcagggctcagtattcagttcctccttcactctccaaatcactttggttcatgagttcagatggcatgggtgctagtgctggtgttgatgtgatgctaccaatgtaagcattagtttctttttataataacttgggcagtcagttctgggcactgacaaaattgagtttgtgatcttggaatactttgattatggggatamagtgatttgcctaaataattgtgacccttagagattctgaggaactgacagcccaataccttaatcaaagcctgtaactcataagaccctggtttactgcatcagcttggagtggcaggccccttgttctcctaaatgcaagaatcagaaggcacttagtgacaactacatatgctgagcaatgggggaaaaaaaagatactgcctgctttcaaagggttgtctgtaatactaaattctgtgttcatgattcagtcatacccctgaacaaagttacttttttctttttttgagacggggtctcactgtcgcccaggttagagtgtggttgcgtgatcttggcttgctgcaacctccacctcctaggttcaagctattctgctgcagcctcccaagtagctgggattacaggcacctgccaccatgctcagcaacttttcttgtatttttagtagagacagggtttcaccatgttggccaggctggttttgaactcctgccctcaatgtcatctgcccacttgggcctcccaaagtgctgggattacaggcgtgagccactgcgaccggcccaaagttaaccttctgtcgaacggtttatatctggaaaggtgggtgaggaaagggtgacctaggggattgcaaaatagattattgcagatcctacctttgtgagctttttgaatgaggctataaaggaatttaaaaatcagattcaacactaattccgaaacccctcacttcattcagggtgtgggccgaagatatgctcatgtggtgttgaggaaagcagacattgacctcaccaagagggcgggagaactcactgaggatgaggtgaggacaaggaagggggctgggggtggggtcagcctcagaaaggggtccatctagatctgaccttggtctgcctgccaggtggaacgtgtgatcaccattatgcagaatccacgccagtacaagatcccagactggttcttgaacagacagaaggatgtaaaggatggaaaatacagccaggtgtgtactgaaatgagggcaggattagaggaagggtggagggtcctaacagaattgggcataggaggtcaggggataaaacatcccttgccccctcctctgaatccaggtcctagccaatggtctggacaacaagctccgtgaagacctggagcgactgaagaagattcgggcccatagagggctgcgtcacttctgggggtgagtggggggtctcatctccctgcctacctcgactcagcattcctcctactcgctcttctttttccccaaccttttgtttctgctgtgcatgacctgtgactcttctctttttacctgcagccttcgtgtccgaggccagcacaccaagaccactggccgccgtggccgcaccgtgggtgtgtccaagaagaaataagtctgtaggccttgtctgttaataaatagtttatatacctatggcttcctgtcctttctgtccattctaatagggaatgttaaagtgctgggtcctttttccatttagagctgccctactcagttgcccacacagtgctattagttttagcagtggtgatgctgcagaccccccagtctccctatatgtagctagtgatgtccctctctgtaaagagaaatgtgagggtaaaacagttcagccttgaggggctgacccagaccagtttagagaccaacaccctggggttggtgtgcagcatcattgtggagtgggttagctgagcctagccagttgcagttaaggtgagtttgcaggtcttggtcactctgggtttttttgtttttgtttttgttttcttttaaggggtcatctagtcataagggaaaatccttcgggctgtgaccgaagcaacaaaggcaaaaacgcggacgttggttatgaagggtgtggtctccctggtggagtacgtcggtgggttgggatggggagcggctggacagaccggtctcactccgtttggtgccactccacccgcccgggtttccgcgccctgccgcgctgctccgacgccgcttccggcggggatgggagcgcgcaacgcggaagcgggcggcagaccggccgccggggcgaggcgggggaggggccgtgagtgccgcagtcggccagccatggagcggagcttgctggcggcgaggccgcggcgacaaggtagccacccccgcagcatgcctcgaccgcggtccgcagctgcaccgcctctccccgccccccagggtgcgctggtcccggtcgcgcgctcagacctccgcatcccgggcgtggtcggttaagtccccggccgtgacccaggcccggggagctagtctccgcccttcgctcttacggatcccctcggagtacgccgcaccatgcagctcaggctcttccggcgcctccttctcgccgctttgctgctggtgatcgtctggaccctcttcgggccttcggggttgggggaggagctgctgagcctctcactagcctccctgctcccagcccccgcctcaccggggccgcccctggccstkccccgcctcttgatccccaaccaggaagcttgcagtggtcccggggcccctcccttcctgctcatcctggtgtgcacggctccggagaacctgaaccagagaaacgccattcgggcttcgtggggcgggctgcgcgaggcccgggggctcagggtacagacgctattcttgctgggagagccgaacgcacagcaccccgtgtggggttcccaggggagtgacctggcctcggagtcagcagcccagggggatatcttgcaggccgccttccaggactcctaccgcaacctcaccctaaagaccctcagcgggctgaactgggctgagaaacactgccccatggcccgatacgtcctcaagacggacgatgatgtgtatgtcaacgtccctgaactggtatcagagctggtcttgcgagggggccgttgggggcaatgggagagaagcacggaaccccagagagaggctgagcaggaaggaggccaggttttgcacagcgaggaagtgcctctwctgtacttgggccgggtgcactggcgcgtgaacccctctcggacaccgsggggcaggcaccgcgtatcagaggagcagtggcctcacacctggggcccctttccaccctatgcctcaggcacggggtatgtgctgtcagcgtctgctgtgcagctcattctcaaggtggccagccgggcaccccttctcccattagaggatgtctttgtgggggtaagtgcccgacgaggaggcctcgccccaacacagtgtgtcaagctggctggtgccacccactacccgctagaccggtgctgctatgggaaattcctgctgacgtcccayaggctggacccctggaagatgcaggaagcctggaagctggtgggtggctctgayggggaaaggactgcgcccttttgctcctggttccagggagtcctgggcatcctgcggtgtcgagcaatagcctggcttcagagctgagagtgcctggggccacaggaaaggcaggaacaggaccttctctctcccaggcccaacgcaggggccctcactggctgcagctgatctgtttccttataccagatcctcagtctcactaaagacagcratatgggagacacccargggcctggcccgccagcccaaaagatggtcatcgggaagaraaaaagaaaaaaatgctgcagttgttctctcaagctagggcagaagaggggtgtcaagctcctcaataaacttgtctccacttcttcgagtgcagtgtggtcttcaccaggacccccagaacaccacaaacctggagagcccagaggctgccagaccctgctgcatgggaaggacatctccagggacatgggagagaggacagcctctctgaggaggaaggcccctaaaaggcaaagctaaggccacagcagccacaaggtatggggtgggggtagaggcaggacactgacccctccgatcctagaatggcctcatgcttggcaagggggaggggaacaggtccacaagatgatccagacacattatccaaaaaatcgctttcctctttaataccaacccaccccaggagacagctgtccacccccagttggggaaggggccacactgcccccacctccttgttccagggaacactcatttccctacaggtgatcttggggagagactgttcccaggcaaccctggagtctggctcagcgcacaaatctgtccagggcagatggccgggcccccgtgggcttggccttygcctccttatgatgctgctgctgaaggctctgccggaccttgtcctggggaccggagacggggaggacacaggcacagagtgagaagtggcaggctgacaagggcagaggcacaagcaggagggtgcagcctgtggaaggcccggcccatgccaatgctcatttaccctgtgttcctcatccatgaccttcctcttcctcttcaccaggcttgccgtggagctgcggcccttctgctttggctttggctggaagggagccttagcctgcgggtcatagccctgagggaggggacaggagtgatatctgttacagcctcggagtcagggaactggcagcacccacctgctggccgcacttctggggacaagccatggtggggagaggatgtgggggagaagacgggcctgggcattcaggggcctgctccataccagcctctctatctgctccttctttccctgctccagggagatgacatccacctcggccagggctcgtgggtccagacaaataagctctgcaggtacctgggggtgtcacagagggacaggactcagcaaggagccacaggagggtagcaccaaaaagagaagccagggaggctgctgaacccctctacccaagacccccagcatgagacatcaggagagctttctctacctccaaccccaaaccacaccttccccagcagcaggggcctcactctctgcagcaggggaacctcacctccaacaggggcaatctcaccctctccagcaggggggawcctgaccctctccaggagagggaatttcaccctctccagcagagggaaacctgaccctctccagcagggggaatctcaccctctccagcagagggaaacctgaccccgtccaggagaggggaatctcaccctctccaggaagaggaaaccttaccttctccagcaggggggaacctgaccttctccagcagtggggaacctgaccttctccagcaggggggaacctgaccttctccaggaaggaggaacctcaccctctccaggacgggggaacctgaccctctccagcaatgggggggatctcaccctctccagcaggggagcctcaccttctctagcagggccttcacctcccactcctggcgctgcttccggcttctgtatggattactctccaggccatcgaagttgggctcaccggcccctgaagggagggagggagaagcatggagccataaggaagaacctcagtccaacagctccagcccaactaagcccccagttcctggatgtctctggcccaaacttccacccagagttcattcacttcaagccccatcccctggcccactcaccagggaccagcatgctggtgatgcccccagtgtgccccacccccagcacatcttcaaaggggcagaactgaaggccatgcacagggcctgagagccggtgggtgaggtagggctgttcaagggagggtgggctggccttgccctgccctgcccagatgttgacaacgtcacccattcccgccaccagcagtcccctctgggagaaggccaggtgccctgctccatggggcagggtccgagtgctcagaggctggtacgtccctcgcaagtcaaagatcttcagctggtggtctaggccagaggtggccatgtacctggtgagagaagagggatcaattaatatgtcagtaaatgggtttaccaagcaagctgtggccaagtccaggcatcaagtctggctggggagaaaaagattaatagtaataaccactgccatcaccctgaacactccacaggcatcctctcagttaagctgcacacaactcatactatttttatttccctttaagaggtgaggaaactgaagctcagggaaaggaaagctaggtcagtgaatggtcaggcctgtctctttagcatctgcctctaacctgctaacaccacacagccctctcaagacacgggcgtcaaaaggaacgcccacacgacaggctgcacccaaatgtgatgtccccctgtacacacatgcagcacacagcccagcaaggggaaggagcatgtgcagtggtcagaaaggcttcatgggaaaggtgggatttgagccattctagataattctcaaaaaattacaggaagtagatacacagcaggttcaaatgcattaacaccagagtgttgagactgagagggaagcagaggtttgttaggattggtgggaaacatggtcaggaaaatcaggagcagacaatttgtgaggtttctttaaagtcagactgaggacccacagctcatgatcccaacattgctctctggcagtgacaaatcacaaagtgaaggctccaaggacttgagaagacctactcagggaagtggtgaagtaatgcactggaggcccttgccctgcccctctgtgtgctttccctggaaggaaggagggaaggttggtgaccaaatcctctccaggaatcatgtactgcataagttgtttactttcagaagttggagttccttttctttttttgagacagggtctctctgttgcccaagctggagtgcagtggcatgaccctggctcactgcagcctctgcctccctggttcaagtgattctcgtgcctcagcctcccaagtagctgggattacaggcatgcgccaccaccgctaatttttagtagagccagggtttcgccatgttgaccacgctggtcttgaactcctggcctcaaatgacctgcccaccttggcctcccagagtgctgggattacaggtgaggttggagtttctatgttcaagttgttccttagagagggaagctgaagggggaccagccaggtaggggatgtatgtttgccaagaggccaaggagtctcttttttgccttggctgtgaacccaggagaagggaactgaagagttcttatgagcagagacttgcacagtgatggagcccaagagaggaccagctggatacttccgacaagataatcagcgccctgactttaccaaagagaaaggccatcagtgcaaaccaggaattaccgagcgctcgtggaacacagggtcacatcctttggtgaactaacaactcaaggatgcatgctggctcttctcccctccacacacccatctatgggacccctgggtaaagaccagcccagtgccaaatgggagtctactgtactactagtaagcagcagttcggctttgagaagtcaacgcaatccaatcataatacaagctaccagaacacctcttaagaaagatggtcagcctcatcactggagcccccgtggcctgacaagctcctgaggaggaccagagaaaagcagggatgggctgaagatcacaaggaccagagctgtttagcctcaaggtgttgattaaacttcaggcctcagcgaactagtgattaagccctaagcacaggagtggctgacccaggtagcccacggagggcaagctacagctttggcccagtggcccagagagggcagaaacccttgggcaggccttctgactctcctagagccaggctggtataaatatggagtaaaaagggcagaaccaaatcactcattcacaaagatacaattacaaaggccagacacggtggctcacgcctataatcccagcactttgggaggacaggcgggtggatcacaaggtcaggagttcaagaccagcctggccaacatggtgaaattccatctgtactacaaatacaaaaattagccgggtgtggtggcacacacctgtagtcccagcttctcaggaggctgaggcaggagaatcgcttgaacccaggaggtggaggttgcagtgagccgagaccacaccattgcactccagcctgggtgacagagtgagactccgtctcaaaaaaaaaagatacaattatgcaaaaacagggagcgggtggtggggggggtggtcccagcatcctggagactttgaataagctggtggccaagctggatgtggtggctcacagtaattactctgtaatcccagtactttgggaggttgaggtaggaggaccgcttgagcccaggagttcaagacagagaccagcctgggctacatggtgaaaccccatctctacaaaaaatagaaaaattatccaggtgtggtggtgtgtacctgagtcaaattctgggtgacaggaaaattctgggagatgagagcaggtcaagagaaactttaggaggcggtgacctatccagtgatggacacattgagtctgggatgacagaggataactgtgtagaaactaatggcatcacctgagctaggcgtggtggctcatgcctgtaatcccagcactttgggaggccgaggtgggcggatcacctgaggtcaggagtttgagaccagccaagccaacatggcaaaaccccatctctactaaaaatacaaaaattagcgcatgcagtggcatgcacttgtactcccagctacttggaggctgaggcagaacaatcacttgagcctaggaggcggaggttgtaatgaaccgagatcgcgccactgcactccagcctgggtgatagatcaagactccgtctcgaaaaatagtaataaaataaataaatgcatcacctggccaatcattctcaaaaaccatagccatggccgggtgcagtggctcacgcctgtaatcccaacacttgcactttgggaggccgaagcaggtggatcacgatgtcaggagttcaagaccagcctggccaagatggtgaaaccccatctctactaaacattaaaaaattaactgggcgtggttcgtgggcgcctgtaatcccagctactcaggaggctgaggcaggagaatcgcttgaaccccggggggcagaggttgtggtgagctgagattgtgccactgcactccagcctgggtgacagatcaagactctgtctcaaaaaaaaaaaaaaaatagccacaagtttttatacctaaaggataacgggagcaccacaccagggcaggctcaacgattcatccttttgtctccagaacctcagcgcagagccctgcccacagcaggtgcccagtgaatacctgatgacaaaaggaatcagaggaaaatacaaatcagacagaaaagctgtggaaaatgcagatactccctcaggaacagcagaaatccaaagcagacaccacctccacccctcacatcagccagacctggagagaacgatcatcttgaatgacaatgatgaacacagcrctccctattttgctaagcgctgtgctaaactatatgccttaactcatcttaatgtctacaacagcttatatgagggctttaaaccaaggcttggtaaactactgcccatgggccaaacctggcccatcatctagttctgtatagcccacaagccaagaatggtttttacatttttaagtggttgaaaaaaaatcaaaagaatattttgagactgtgaaaaccgtatgaaattcaaattccaatatccaacaaataaagttttattggaacggggccacactatttacttaatactgtggctgcttttgctctacaacacacagccgagtggtcacgacagcgactacagcatcctgatttgcactgctgctttgtacactacaagtcacagtgacacagtcgtaagtgcttcacagcatttcaagcacctcacatatcacct

SEQ ID NO: 93765 - DNA, 60235 bp, Homo sapiens
  misc_feature (1)...(60235): n = A,T,C or G
aacctaggaattctattcaaggatattcagtgcagtgttaatttttttgtttgtttgatttttgtttttcagggttttttttttttttttttgagacggagtcttgctctgttgcccaggctagagtgcaatggtgcaatctcggctcactgcaacctccgcctcccgggttcaagctattctaatgtctcaacctcccgagtagctgagattacaggtgccaccactgcgcccggctaatttttgtatttttagtagagacgggttttcgccgtgttggtcaggttgatctcgaactcccaaactcaggtgatccgcctgcctcagcctcccaaagggctgggattacaggcgtgagccactgcacctggccaagtgcaatgttaattataagaccaaaaaaaaaaaaaaaccataaaaactagaaaaacagcttggcacaatggctcacacctgcaatcccagcactttgggagnnnnnnnnnnnnnnnnnnnnnnnnnnnnnnnnnnnnnnnnnnnnnnnnnnnnnnnnnnnnnnnnnnnnnnnnnnnnnnnnnnnnnnnnnnnnnnnnnnnnnnnnnnnnnnnnnnnnnnnnnnnnnnnnnnnnnnnnnnnnnnnnnnnnnnnnnnnnnnnnnnnnnnnnnnnnnnnnnnnnnnnnnnnnnnnnnnnnnnnnnnnnnnnnnnnnnnnnnnnnnnnnnnnnnnnnnnnnnnnnnnnnnnnnnnnnnnnnnnnnnnnnnnnnnnnnnnnnnnnnnnnnnnnnnnnnnnnnnnnnnnnnnnnnnnnnnnnnnnnnnnnnnnnnnnnnnnnnnnnnnnnnnnnnnnnnnnnnnnnnnnnnnnnnnnnnnnnnnnnnnnnnnnnnnnnnnnnnnnnnnnnnnnnnnnnnnnnnnnnnnnnnnnnnnnnnnnnnnnnnnnnnnnnnnnnnnnnnnnnnnnnnnnnnnnnnnnnnnnnnnnnnnnnnnnnnnnnnnnnnnnnnnnnnnnnnnnnnnnnnnnnnnnnnnnnnnnnnnnnnnnnnnnnnnnnnnnnnnnnnnnnnnnnnnnnnnnnnnnnncctcccaaagtgctgggattacaagcgtgagccaccacacccagctggtacttattttagtggaacattctgtagttatttctttaaaagaagagctatgtacaccatctataagagaagtaatttaataaattatggtaatatgtcagtggaatattttgtagttatttctttaaaagaagggaagagctatatacactgatataaaaattattccggataaattagtaggtggcatatatatgtgtttctataagtacatatcctctatacataattatttcctgtatttaaaaagagaatacatatgtaagagatttctgatatggaaattcccaaaaagaaccataagaaactgctaaccggccgggcacggtggctcacgcctgtaatcccagcactttgggaggccgaggcgggcggatcacgaggtcaggagatcgagaccatcatggccgacatggtgaaaccccgtctctactaaaaatacaaaaaattagccaagcatggtggtgggcgcctgtaatcccagctactcgggaggctgaggcaggagaatggcatgaacccaagaggcggagcttgcagtgagccgggatagcgccactgcagtccagcttgggcgaaagagtgagactccgtctcaaaaaaaaaaaaaaaaaaaaaaaaaaaaagatatttattatttaggtgcaccggcccagtcggattaacatccaaaggactgagccctgaacaaagagcttaagttaccttttaagcatttcgtggggtggagggagatctgtgtagggggaagcacgttgcagaagcgagaaacaaagacagttattcaattaattgagacatgcgttacatcatttcttacttttcaaggaaaaacatgcgttgcgacttgagtttatctgtttatgaccttgcagctgcacggctagagaaacagggtcttcgcaatgcctgggaaagggagagagaaggctcactagccacagaaaaacaggcagttaattttaaaggacttcagcactttctctttctcagggggaattgggttttcttacatacaactgagtttctgcttacatattctttaatttgttttaattcctgttccacctggatgtgggtggcaccatccaatctgctgggacccagagagaacaaaaacagagaaaaggtgaatgtgtctgtccatctgccggactggggcgtgcgcttcctctccttcccttggacaacgcccagctccccggccatgggactccaggacttacaccaatgccaccctctgccccagggttctcaggcctttggccttggactgagagttacaccctcagcttccctggttctgaggccttcggacttggactgagccatgctaccagcaccccagggtctccagcttgcagtggcctgtcctggaacttctcagcctccatagtcatatgggccaattcccctaattaatgtcctctcattcatctatctatctatctatctatctatctatctatctatctatcgatctacctatcatttatctctttatttctatctatcacctacctgaggcgggagaatagggaatgagggtaacccaggtttaaggcagaagcaaaagagcagcaggagcagccggttccaggcaagattgggcggcacacgggccacagtctcactactgcggtaacagaacagaagcctccacttctgcctctgattggtcaggggccaatccttcataggatgtaaccaattggagccctctaaagggcacctgggggtgttaccaaattcttttagcttaataaaaaccctgaagaacatggtaatcagggttcttgagccacttgcttgttcttttcttgctttgtttgtgtgttttgctcaattctttaacacaccaagaacctggacaactcgaagttaagactttccatctggtaacatgtctacctgtcatctatcatctagctctcatctacctaccatctatctacctaccaatcatctttcttcatctatccattatctaccatctatctacctatctatctacctatctattgtctgtcatctgtctacctatctagctatcatctctctctaatctatcatctatctatctatctatcatctctttctctctctctttctctaatctatctatctgtttgtctatcccattggttctgtctctctggagaaccctgattaatacactggggctggtgatattttgtaagtaaagcagagtcctgccatggggcagcagggagatgaggaagacagggagacccccagcccacgggtactgctgcaacgcagtcaacctaaactgggcaggctgaagagggcaggacggctgaggatggcagaggacatgccccaggagcctgtggggcatcatcggctgcccaggtgagtgtactcaggagatgcccctgctcacatggggctggcaatgcctggggtgggagcttggcctgcagcaatgaaagtgccgctctaaggacatcacttgtgtcaacaacagctcgacagagtgttatcgtgtatgatggaatcctagaatcttccctactttacagatgaggaaatggaggcaaaagccaatgaattaatgagtgaatgaatgaatgagtgaatgagtgaatgaatgagtgaatgagtgagtgaatgaataagtgagtgaatgagtgagtgaatgaatgaatgaatgagtgaatgaatgattgactgagtgagagaatgaatgagtgagtgaatgaatgagtgagtgagtgaatgagtgagtgagtcaatgagtgagtgagtgagtcaatgaatgagtgagtgggtcaatgaatgaatgacaatgaatcagacttcccaagagtgggtgcatttccaccatgactgtgtgggaaggagagaacatatcatccagacttggtttttgttgctcaaaacaaatgcaagcaaactcttgggcccaccagagcagtggccgaaagccgcagaccctatccattgtgtgggggatttcagtgggattcttgggctttcaggagcctacaagtggactcgcatttcaacacctgtgttctgtagggttttctagatctaagattccaggattctatgaaaagttatgatagccctgccccctaaaagattgtaagtttaaacaacaacaagaagtcacaaactggtgcatcccaatcccatgggttccatttcacaggtaaaaggtgtctgggtgaataaactgctgtgccgctcaaaggacccaaaggaaggttctttgtgggttggcgtctgcaaatatcaccagctgcctggctagagtgaccagctaacatacccatgtggaccctgggcatgaagggaggtaccaggccaggggcagtggctcatgcctgtaatccgagcactttgggaggccactctgggaggattgcttgagcccaggagttcaagaccagcctgggcaacatggcgagaacctgcctctacaaataatttttaaaattagctggacataatggcatgcacctatagtcccagctacttgggaggctgaggagggaggatcacttgagcctgggtgattgagactgcagtgagccatgatggcaccaccgcactccaccttgggtgacagagcaagacctcacctcaaaaaaaaaaaaaaaaagaaagaaagaaagaaagaaagaaagaaagaaaagaaaagaggctggacgcagtggctcatgcctgtaatcctagcactttaggaggccgaggtgggtggattgcctgagctcaggagttcgagaccagcttggggaacacagtgaaaccccgtctctactaaaaatacaaaaaattggccgttgtggtggtgtgtgcctataatcccagctactcaggaggctgagacaggagaattgcttaaacctgggaggcaaaggttgcagtgaggcaggatcacgccattgcactccagcctgggcaacagagcgagactccatctcaaaaaaagaaagaaagaaaagaaaagaaacgaagaaaagaggctgggcgtagtggctcacacttgtaatcccagcactttgggaggccgaggcaggcagatcacctgaggtcaggagttcaacaccagcctggccaacgtggtgaaaccccatctctactaaaaatacaaaaaattagctgggcatggtggtgggcgcctgtaatcccagctactcaggaggctgaggcaggagaattgcttgaacctgggaggcagaggtagcagtgagccgagatcacgccattgcactctagcctgggcaacagaagtgaaactctgtctaaaaaaaaaaagaaaaggaaagaaagaaaggtggccctgttaatgtttatgccaagacagcaggcatgacctggaagtgtccgaagccacagggcatcttgcttccggggaggatgaatgaatcaaatcgcacctattttaaggcaagcaaggactccatgacttcaggagccctggtgggtggacagaagctccctgctcccctggcctgtctacccagcagcgctttggccagtcccattcctgtacttctgagcctgcctgccagtccctcctcacatgcacaccatggctttgtgcctggtattgagtgtcccggagccccaaaccacacggtcaaccccatgaaagaaacagggactctgctctcatccactcgcccccgcctcccgcgtaatcccctggtgctcacgcagccccaccgtacagtttttctagctccctggcagacttgtgctcctgtttgccagatcaaagcccagtgacctgagtggcctgtccccagcagaggccactaatccctgtggacccaccctgttgggaaaggcatgggttgaactttaaccattaggctcaggggttgggatgagtttctacaaaaagaggtgggtacacgccagtccacagtggtcctgatcaaagtgagaacagacagcagggaacatcaccctcttcagactggagtcagtgggaacagacccaagatgttggggaggaacacttggaagacctcagctttctccttcttggttgagcagatgtgggcccctctctggagtcgttcgatgaggccagggcgatggtgttctcagcgttcctgtgcatggcaaaccagcaataacacttgtaagtagagcctcaaatttcctaagatgcgactggatccttgtcttagctgatggggtctttcgagaggagagaggagagaccgtcccgagccagatgggttcagatttccactccgtttttttttttttttttttaagatggcgtctcgctctgtggcccaggctggagtacagtggcgtgatctcagctcaccacaacctccacttcccgggttcaagcgattctcytgcctcagcttcctgagtagctgggactataggtgcatgccaccactcctggctaatttttcgtatttttagtagagacagggtttcacygtgttagccaggttggtctcgaactcctracctcgcgatccgcctgtctcagcctcccaaagtgctgggattgcaggcatcagccacggcgcccggccctcttttttctttttttgatgaagttttgctcttttgcccaggctagagtgcaatggcatgatctcggctcactgcaacctctgccctccaggttcaagtgattctcctgcctcagcctccaaagtaactgggactacaggcacccgccactgcacccagctaattttttgtattttggtagagatggggtttcaccatgttggccaggctggtctcgaactcctgacctcaggtgatccacccaccttggcctcccaaagtgctaggattacaggcgtgagccaccgcgcctggccacactccgtttctcttgtatttggtgaccttgggtgaatcatttagcctccgtttcaggggtcctggggagggcaagatgctgggagcaggcgggtagtccgtgttcgcacgggacacactggcacgactcaccatccagacccggcggaatgggctgcactaaccagtcacgatcgctcctaaactcttcggcagagaacgctttcaagcaaacctgtaacaaataaaccactcagccagctctgccaagaaactgccccgtgccagcccctcctggcttcatggtcagtgccttgtgaccttgaacgaggcccttcctctttctgggtctcaggtgcttcctccgtagaatgagagcctgctttggcagctgccaagttctcttctaactgaaatcttccatgcattccatgtttgggccattgaaagagcatgggcttaggagccagaccccaggcatgcagtccgactgacgcttgctgaggtggagcctcggcaggtcttcacccccaagcctctgtgtccttatctcgagatgggggtggccagactttctctccagggccatggaaggatgacacgatgcgtgtagaaagcctggcccaccccagactctgagtgagctacactcattcctcctgttggggtccacacctgtggactggagtgcagtggtgcgatctcggctcactgcagcctctgcctcctgggttcaagcgatcctcttgactcagcctcccaagtagctgggactacaggcgtgtgccaccacgcccaactaatttctgtatttttagtagagataggatttcgccatgttggccaggctggtctcaaactcccgacctcaggtggtctacctgcctcggcctcctaaagtgctgggattacaggcgtgagccactgcacccaccccccttttttattcttagtacgaccgtcaagagcgctagcctgcctagattggaatcttggccccactgctctatggctgttgcccctctgtgactttcctttattttttgagactaatttctgtcttgttgcccaggctggagcgcagtggtgcgatctccagctcaccgcaacccccacctcccaggttcaagcaattctcctgcctcagcctcccgagtagctggaattacaggcatgcgccaccacatccggctaattttgtatttttagtagatacagggattctccatgttgctcagggtggtcttgaactcccagcctcaggtgatctgcccgcctcagcctcccaaagtgctgggattgcaggcgtgagccaccacgcccagctgtcccctctgtgactttcttaacttcccccagccttggttttgtcgtctgtaacagggggttgataatggtgcttacggcacagtgtcgttgggagaagggtccgaggtggggcctgcaaaggctggggacagcacatggctccaggaagcccttgctagacgccagctgctgctgttgctaacacaggcagcggtgggtgccctgtgtctatttaagcatttccctgtcagtgggcagcaggtagcattccatttcttactgtggcaacatgtcctcttacatcgtgtgctagagagagtcatattctgtatcggcacctaaatccatttacaccatggtcctcaacctgttcccagtgaacagagggctctgccaaatcatttcagagttccacaaagagcagaatattctgccaagcagagaagattggaacatcataaggaattcatccttctatgtcggtgttttatttatgggcattctgaagattatttcacttggaaaaagaatattgttactaaaaattattgaaaaatcactggtggtttggccttgagagaaaagtcaaagagttacaaaacgctcagtgataattttagaaccaggcatgggggctcacacctgtaatcccagcactrttttgggaggctgatgtgggaggacagctcaagcacaggagttcaagatcagcctgggcaacatagcaagaacccatctctaaaaaaaaaaaaaaattaaaaaattaactggacatggtggcacacacctatcatcccagctacttgggaggctgaggcaggaggatcactgaccccaggaatttcaggctgcagtgagccctgatcaggccactgcactccagcctgggctacacagcaggaccctgtctaagaaaaaataattttagggatcatttaatgttttctagtcatgtttcagggtgtgcactggcagtgcccatctgttcctaagtgtgtgatcagcaacgttacgttggtaacttaaaattggccatggtgaaagtatttacaccacagtcattggcaaaccctagaaatcaaagattctaaattcctgggagaacggcttattaaacctcaaccagcacactgctgcacatttttggacattttactggctatttcctgctcaggtgtgtgtgagtcttcttgcatttggctccccccgggctgaccgtggttgggctgggctccccactctgggtgggtscaggcctgctcactgcatctctcatcctcccttcgcagccacctgaggcctgttcttctcacggcggagggcaggcactcacagggcgaggccagcggtgcccatgtattccaagctactgctcacgtcatgtctgctaatgtcccagtggtcaaagcaggtcaccaggtggccaagcctagtgacaatgggggaggggatagctcctcccatggaggtcaagggggaaggaatttgagatttgctgaaccaccatcaaacctggagactgagaatgcatcggggagatggggtctccttccagactgcgcccgtgtgaattaggggcaaatactggcctcctggggcaggggacttggcgtctttgattccatgtcccctgcacctgggccagggcttgacccataggagcagctctgtaaatatttgttgactgattgaaaaagaggataacatttgtattgcctcccattggagccctactggaattagcacagmacctacgttgctgggcaccagggtcggctgtgtggagattggaagcctattcagcatccaggtggcgtcgcctccgtgcaggtggcaatgagcccttttgttgggtgacacacgctgagttcaatgcgggtgtttcattgttggtgggcccgttggtgcagctcagcaaacagaacctaaaattacccgctcttcccacaacctgtgtctctgtgagccagggaagcctgcgtctctggtctagatgagcacctcctctgtggcatcagtggctttagggttctgtctacattcaggtctgtgtagccatgttaaatgccccttgcccggcaggkaggactggaggcagcggccgtgggagggggggtagagtgcactcaatcctgcttcccgttggatgcaagggagatttgtgaggcctcaaaggggcttttttttttcttagacggagtctgcctcttgttgctcaggctggcgtgcaatagcgcaatctcagctcactgcaacctccacctcctgagttcaagtgattctcctgcctcagcctcccaagtagttgagtagctgggattacaggcaggcacgaccacgcccagcctcagagaggctctttggagagaacagtcaatggaagttcagggctgctggtgtcgttctgaattaaagcagatgctgggacaaaggacacacagacagaggcccctgttgtggccgccggctcccgcgtccatagttgtctatcgcgtgagagagaacagaacgcatctgcaggatgccgcagggcccaccgtttcccagcgccggcttagtcactgctttccggcacttagcgagttctgtgtgtgaccgcagggttgtgctgggctgtaaggcaggggcagggaaatgcatcctccccgtctatcatgcgtgggaaggcactccaggccttccccagcgccagcgagcttatcttctcagcaaagctgctgtgattctactcccttattctccttcctgcagatatagaaactgagactgggagaaggtggtaaataatatgccaggtaactcggagagtgagtggggagagccgccagggttttggcccacagatgtgtcttccccactgcacaatgtgtaaaacttaaaaaattacttggcaaggtcaggcacagtggtttatgcctgtaatcccagcactttgggaggccgaggcaggtggatcacccgaagtcaggagttcgagaacagcctggccaacatggtgaaaccccgtctctactaaaaatacaaaaagtagccgggcgtggtggtaggcacctgtaatcccagctactcgggagactgaggcaggagaatcacttgaacccgggaggcggaggttgcagtgaactgagattacgccactgcactccagccctggcaacagagtgagactcaatctcaaaaaaaaaaaaaaaaaattacttgacaacacctgaacgttgggacaccctacctgaacatctgtatttctatcttctctttaaaaatccaggctgggcgcagtggctcacgcctataatcccagcactttgggaggccgaggcaggcggatcacaaggtcaggagatcgagaccatcctagccaacacggtgaaaccccgtctctactaaaaatacaaaaattccccaggcgtggtggcacatgcctgtaaccccagctacttgggaggctgaggcaggagaatcgcctgaaccagggagttggagcttgcagtgagctgagatcgcgtcactgcactccagcctgggccacagaaggagactctgtctcaaaaaagaaaaaaaaaaaaaaatagatccaaagatctggcagcagagggctccctctcctgcccagtggggtagcagcagcccctctcagaaccaccctgtgctgtccccacgccgcagtccccaccgctctctcctccccacccagcctgacagggagggcccgttgcccacagcagctttactcgtcagcatcctctgccctcacaacacgtccactttaatagggaagccaggcgcctgggtctgatgttgatgggattcaggcctcaggttccactggggaagggtccggaggggggaggtccttgccactggtctacaaagaacagaggaacactctggagacctggacaccagcctggagcagccagaagctctagcagagactcccagaggccaggatctcagttcagactgcagcgagcttgctggatgtcttggaaaagtgactccagcccccggccctctgctttcccacctgtaaggggcaggggcagttaatccacactagggattattcattcaacaaacattcatagtgccagatgctgtcggagcacgggaatgcacgggccagaaaaatgaccaaccccctgctgagattctggttatgagacagacagcagacccctagcagatgttaccaygcacgttgatgggggagagaaaaaccaagagagaaaattaaaataaacaggcacacaaccatcctactatctatcatcacctttatctcccatagggctttttaacactgacgagtagaaaagatgcgattttagaacaaacattctgcgattttgcaatctttaacttaaaaatgtattgtacattctactgacttctgatggtttacttattttttttttttttttttttttttttttgagacggagtctcgctgtattgcccaggctggagtgcggtggcgcgatctcggctcactgcaagctccgcctcccgggctcacgccattctgctgcctcagcctcccgagtagctgggactacaggcgcccgccaccacgcccggctaattttttgtatttttagtagagaccgggtttcacggtgttagccaggatggtcttgatctcctgaccttgtgatccgcccacctcggcctcccaaagtgctgggattataggcgtgagcaactgcacctggcctgatggtttacttattaaataacagctaaaaattttttcaagttgattaaagaacaaaacacagcaatgcgctaaccatttgacctaggtggagacgcatttctgacaggactatatatctttttttttttttttttttgagaccgaatttgctcttgtcatctaggctggatggcagtggnnnnnnnnnnnnnnnnnnnnnnnnnnnnnnnnnnnnnnnnnnnnnnnnnnnnnnnnnnnnnnnnnnnnnnnnnnnnnnnnnnnnnnnnnnnnnnnnnnnnnnnnnnnnnnnnnnnnnnnnnnnnnnnnnnnnnnnnnnnnnnnnnnnnnnnnnnnnnnnnnnnnnnnnnnnnnnnnnnnnnnnnnnnnnnnnnnnnnnnnnnnnnnnnnnnnnnnnnnnnnnnnnnnnnnnnnnnnnnnnnnnnnnnnnnnnnnnnnnnnnnnnnnnnnnnnnnnnnnnnnnnnnnnnnnnnnngcgcggtggctcacgcctgtaatcccagcactttgggaaggccgaggcgggtggatcacaaggtcaggagatggagaccatcctggctaacacggtgaaaccccgtctctatgaaaaaaatacaaaaaagtagccaagtgtggcggcgcgtgcctgtaatagagctactcaggaggctgaggcagtagaaccacttgaacctgggaggcacagggtgcagtgagccgagatggcaccactgcactgcagcctgggcgaccgagtgagactccgtctcaaaaaaaaaaaaaaaaaaaaaaaacaaagaaaagaaaataatccagatgagaatacagagaaagaacagcaacttcatcacagctttgtttaattgcaagaagttggaaataacctaaatatcatcaccaaataatggattttaaaaattgtgtcgtaactgtacaatggaaacgtgccaccattaaaaagaattgtatatatatatttttttcacaaaatgagttcacaatgttaaatgaaaaaaggcaacttacaagataatatacacagtaaaatccttgttcattaaaataaaaaatcctggccgggtgtggtggtacacacttctaatctcagcactttgggagatgcctgcctcactttgggacaggcaggagaatcacttgaggccaggagtttgagaccagcctgggcaacatagtgaaacctcgtctctacaaaaaatgaaaaagttagccaggcatggtggtgtttacctgcagtcccagctgctcaggaggctgaggtgggaggatcgattcagcctaggggttcaaggctgcagtgattgacaccactacactccagcctgggtggcacagtgagacctgatctcaaaaacgcactattccatttaawcccttttaagaactggtttagctcaggcctgtgaaggtgaggacaggagccacaggacacgccaggcctctggggtgacatccccaagcaaggggactckgtatttggaagtgctctaaggtttcaagagcaggatatcccgaggatcctgtctcttaaggaaaaataaaaataaaagatccagctttctcttcgcatgaggttattgcacagagaacaggtggggcagacacacaccasggggtgcaatcatgggacagctgcttcttcactcataagcttttctgcatttttttttttttttttttgaggcagagtctctgtcccccaggctggagtgcagtggcgcgatctcggctcactaccacctctgcctcctgggttcacgccattctcctgcctcagcctcctgagtacctgggattacaggcgcccgccaccacacccagctgatttttatattttcaataatgatggggttttgccatgttggtcaggctggtctcaaactcctgacctcaagtgatccacccaccttgcttccgaaaatgctgggattacaggcgtgagccactgttcctgacctctgaactgttttcgattaatggctcttactttaaaaatgacaatcaaagcagtttgaaatgagcctcgaggaagtaggtagaggggctgccactctgcttaattttctccacactggggtctcatttcctccttgccagagggcttggagagttgggcttccaaagcagctccagtttccacaggaccactaggtggggtacctgggagtgggaagggaagtttcaagcccttcccgagagacaagagccccactgcactcagcctgccttccccacagcgccctcctccacccacctgccctccccaaggtctatccagacttcctgtggctactctgtgacgagggcaacacaaaagtcaaaaacccatcaacacaggtggcatgggcccagagggagttgcttccgggtgggaaagaaagtccccgagtggtgcagaaaggagaggagcaggcgagtaccctgtgggcgtgcgtcgctgcgcaggggcccccacgcgcccgtttcccgtgggtcagtttcccatgagccaggacgtgaggggtctcgtgcggccgggtttctgccctgtccgtccaagacacaggatgaagctcatgcctcactcagggtctccgtctctcaccctgcagtgcacccactctggacggtcccggtctccgtgccagggggcacccggcagtctcctattaacatccagtggagggacagcgtctatgacccccagctgaagccactcagggtctcctatgaagcggcatcctgcctgtacatctggaacactggctacctcttccaggtggaatttgacgatgccaccgaggcatcaggtgagtgccagctggggctcgagggctttgtcctctcccgttgttctggcagcagggtcaagagcttcgcggagaagggggaggagagcaggaaggtgctgctttccttgtgctgctggggcagggacagagactcgcttgagggaggacacacctgggggatggtgtgaaggttctcgaggggacaggagcctggtgctcactttacagatgagaatacygccggcacctgcatgcacacaggtgcacctagcaaagaaaatccccttcccgtggggctcgccttgcagcgggtgggaggaagagacaagctcattgaaatgcgaacactttgcgcgtcggaagaggaactcagaaggcagcggtggctggacgcccacgctggccttgatcatctaggcagaggcctgcaaggaagttgggtccacagcagggcaggggcattgggagcctggaaatgagaccactgcaggcttcagcaggcagtgacctggccgacattttattttattttattttattttatattgagacagagtcttgctctgtcattcaggatggagtgccatggcgcaatctcagctcactgcaacctctgtctcctggttcaagtgattctcctgcctcagcctgagtaactgggattacaggtgtctgccaccatgcccagctaatttttgtatttttagcagaaatgggatgtcgccatgttggccaggctgctctcgaacccctgacatcaggtgatctgcccaccttggcctcccaaagtgctggggttacaggcgtgagccaccgcgcccggccctcgctgaccttttaaatggatcccacagctgctgtgacgacagactgagcaggcggctggaggggagcaggggttaaataggaggcagtccggggagatgcaggtgggagacggtggtggagggacggggtgggctgggaggtgacttgagaggtcctgaaagccaccaagcccttactgggttccagcgcttggccaagggcttctgcggatcatctcttcaaaccttcaccatgattctcggaagttccaggcagatgctctgaggtatgggaaggttctctctatgcctattatgtttgcatttttatcaggactggctgccaggtcctacctggtgttttcccagcaccagctggtgtcactgtaagctgctttcatgcggaacgcctgctctccctcctgctgcgagtctggaattgggccacgtgctgggtatcaggtgcctatgtgaacagctcccaataaacccttgggcactgagttgctagtgagctcctctggtacagaacacgtcacactggttcagtgttgcggctggtttaggggagaattaagtccgtcctgtccgtcttccctggtgaggactccagaagctcctgcctggggccctccggacagcccagacacctcttcgcgtggctgatctcgctctgcgtccttttgctgaatgtagcttagctctgagggtggctctgtgctggacccagtgactcttcctggggaatcatcaaacctgggggccccaaagcagccgcagccacagctccacatcctctccggcaggcatcccrtctgcctcctcccgggtgcgtcccacgtgcctggggatcttgctcactcactsttgctcccatgaggatgtaactccgctggggcaggtctttgtcttatttgatattttatgcgccaggcctcctaggcactcagcaaattgacggatgaacagagttgaaggcataaatgagcctccttttcttcctgtgtgattggggagagaagggatggccactgcaaaggctgcagggagagaatcgaggccaccccaggccggcactcagcaccacatctgcccagaaactcccacatggctgccagcatgcccggacctgcttccacgcttctgcgttatccaagcgggaccaacaagcgggacgctgcccccacgctcaccttcatgccctctcgctgtgcatgcggaggcagcattcaccttccttacactaaacatgctcaccggggcttccccagctcctgctgtcacggggaggtctgcccagctgcgtcccagcttcgtcatgacatggtgcttgcatttcagccacttaaatctgcatatgcctagaaattctcaacacaggggacctcagtgagcaggcacggtgcccacggatgagtgcgctgagccgtatgtgcaggccttcctggagcccggggagaggcaccccatggagagtagaggcccagcctgagcctgctcctgcctctaatgcacctgctgttgggggcagggcgtgagagcttcttctctgtgccaggccctacacagtgcatcgcaaacaccacggcttggtccttccagtgtstctctctcctttygaaggtgagaaggagccacgctgcctgtatgctcagtgccattcacrgttgcttcatcaggctccactgcaacccccgcggatgcttcccgtgtggggcttgctgagtgccagcagcagtaaccccaactccagccaacgtaagcaaagtgcaacttcttggaaggacaagaccagctcggagaagaagagggaaagttggacaaccagatcttgggaggcacaaaccaggccagcttcggggaccagggagcagggatttttgcattcatttattcagttgccaatggtttttctccccttgttggtctgttccaagttcaaatgcccaagaagcaactcagattggcttttcagttttaatgtggttatattatttaaaaattcttcatgcagccacttcaaaatattgaaaaaccaaaaatagttcctgaacttttaattgtttgggttaatatttgtgtgaatgtattagtaattttgagaacartagttgtcatggatacagatgagttgctatgggattcatattcctcctggataatttttagatgtggctgtgggtctcactgatattttaataactgatttgtttcctctaagtcgtaaagtayaaactttgaaggttattttggacttttgtttgttattttacaaaataaattcccaaggcaaagggtctggtggctgaccctgagctgacacccagccctcagctggtggagcatcaggcacccggctaatgtcctcaccaagacctcatgcagtggggaacagggggccccaggggaatcctgatactactcctagaaggaggaaggtatgtggacagaccccctttaaaagcactgccaggctgggcgagctggctcatgcttataatcccagcactttgggaagccgaggtgggtggatcacctgaggtcagaagttcaagttcagcctggccaacatggtgaaaccccatctgtactaaaaatacaaaaattagccaggttggtggcgcacacctgtggttccagttcctcgggggactgaggcaggagaatcgcttgaatttgggaggtggagtttgcagtgagcagagatcgagccactgcactccagcttgggtgacagagcgagactccatcgcgggaaaaaaagcgctgccatctatgaatagcagcatggcacaaaacagaagccactagagagagtattgcgggaccctcattttacgtaagaacaaatgaaggctcagagaaggggcgactgccaagggtgagtgacctagtacaaggagccggcttccgttccgactgcagattgtagcccttcaccaactcacttctcctcaccaagggcttcacttgcaccactgcagtcttcctttcaacagtcgtgggagatacaaaccagtccccattttacagatgtgaaaaagaaggcttggggaactcctcggccagaggccacagaggcctcccaatgggactccgtgctctgcaaagaagggaatctggggagcaggcaccgtttagagaaagaatctgcatccaacattcacaaaatccagcaggaggccatcaggagctgacctccatgcagagaaggaagcaccagcaccctgggtgagtgaggccaaggtcacagtcggtccccaggagagccggcagctggcccagggcccagacgggcctctggctcaagcccagcggaggctgtgtccagtgggccttgaggtcggcacgggaggcccgtccctcacccctcagggcaagaacaaacccacgccccaaccctgttggcggtggagcagggacatccctgcagtgctttaagggcacacttgtyattttctgttcagctcatggcagcatgtgtgccttggaatctagatgtttctgtatccccaagggaacccaggctcaggctttaggctggaaaacaagacaattgcagatggtaaktatcccccaggatcacaagtcaaagcctgcttttggtcaagaatctcaacctgcgtgcctgtctgtgtggcacaccctcctcaggaacagcctcgcaactttccctggaacctccccttccccaccgcacctggtcctagcgaggatattattcacatcagtgaataaaatgctaattttatggggggctgacaaacagttctcacacaccagtgtgcaccaacatcccctggagagtgtgttagagcacagactcctgtcggcccggcggctcacacctgtaaccccagcaccgtgataggccaaggcgggagggtaacgagaatgcatctctacaaaaataaaaataaaagaattagctggacgtggtggtgcatgcctgtggtcccagctactcgggaggctgaggcaggaggcttgcttaagcccaagagattgaggctgcagttacctgggattgtgccacttaactccagcctgggcaacacagcgagatcctgtctctcaaaaaaaaaataataataataataacaataacacacaaaggaacacaacctgtgcttcctctagacattctgacttggcaggtgcaaggcagatccaagaatctcatgccagcaggctcccaggtgccgctgatcccaccagtccgtggctttgtaagggcatctgctgtgttgctggctgggcttccatcctcctgcctcctgggtccaacattcctgttttccttgggagcgagcccatccccgactcccattcacggggtccagaaacaggagtgggtggggacctgggcgtggccactcagaacagccctgtcactggctgcagcaattggtacaggcatgggcacgtgactcaagaccggccaatgagagccraggagtttttttctaggacgtatttaaagagattatttccatggctgtgcaaaggccagctgtgccccgcagcaggtgagggccctcctgaaaaagtgcccacacgggagggcaaagccaagagggggagaaatcaaggcccaagccaatttcggggcctctgaatgtagctgtacctgaagccaagtcaacccctgtactaataagcctctttttaaaatcagtttaagttcctatcacttgcttccaagagtcctgatacaagcagacaaataaaagtggccaggcgcggtggtcatgcctgtaatcccaacactttgggaggctgaggcaggtggattgcttgaggtcaggagttcgagaccagactggccaatatggtgaaagcccatctctactaaaaaatacaaaaattggccgggtgcagtggctcacgcctgtaatcccagcactttgggaggccaaggcaggcggatcacctgaggtcaggagttcgagaccagcctgaccaacatggagaaaccccatctctacaaaaaatacaaaagtagccaggcgtgatggtgcatgcctgtaatcccaactacttggaaggctgaggcaggaaaatcgcttgaacctggtaggtggaggttgcggtcagccgagatcgtgccattgcactccagcctgggtgacaagagtgaaacctggtctcaaaaaaaaaagtaaaaatacaaaaattagctgggcatggtggcaagcacctgtaatcccagctactggggaggctgaggcagaagaattgcttgaacctgggaggcggaagttgtaagtgagtcgagatcacgccactgcactccagcctgggcaacaaagtgagatttagtttcaaaaaaataaaataagtgactaaattggccaggcgcagtagctcacgcctgtaatcccagtgctttgggaggcagaggcaggtggatcatctgaggtcaggagttccagaccagcctggccaacatggtgaaaccccgtctctactaaaaatacaaaaattagccgagcgtggtggtgcatgcctgtaatcccagctactcaggaggctgaggcagaattgcttgaacccaggaggcggaggttgcagtgagctgagattgcaccactgccctccagcctgggcgacagagcgagacattgtctcaaaaacaaacaaacaatcaaacaaacaaacaaaaaacagtgactaaactgagagcaaagaaatggaagggagggagcaggaggatcatcagtttccatccttttactgcgtgctcaaatgtaatttggctgcaggtgaggtctgtgcagacctcgggtgaggggtgagttggctatggcctgtttaactccacctgtgcagactgcagctcagcctcgtccatgcttcgtgactcagccttgtcctcagggaagctggggctggtgcacctttcagaagtggtcccaggtaagcccggccctcctgagtccatggatggggaatgctggtacaggcctagcagctggctttccggggctgggtggagggacgagagcggtgatgtgtggtgttcgccactttccatggtgcaaatactcctgcacggccgagttcaagttttgaaggtgcagtcaccgatagtggagttgggaagagatttgcaaagtcagctccagagccagcatgagccatctcccacccgccgctgccccctgccttcctctctcttgtccatgcagcctgggatctcactgctgctctccaagtgaggaattccagtaagccgtcttaagacttctttttggtttacctggcagaaccccacctcaaastggcttaagcaaagagggagatttgccggctccgatcctaaagagtccgggctgcaaccgggtgcaggggtcgtcgactgccagggctctgagtgctcccccaggctctgctttcctgtgagtgctcccccagactctgctttccccaggggacactcacgggggttccctgatggggcgaaggtggccgcccgaggctgtggcttggcctccagtggagcgatgtcgcctctttcccggcagttccagccaccatcccakggctgattctcaggggcccggctttggctgctcgtctggccagcccgagggtgaccccgcctggagcaaggtgtgtttggagagtgggaggcagcactcccgcaggacagccgaggacgctgttcccagagtaaggatggggcgccctcctcactggacgtgcaccctggccatggaccccgagctgacctcggcccctccctgactcggttgctctcaggtccaaggccactgctgctgtctctgtctcccagcgtcagcctctgaccttgtcccgaccccacttttggcttccccaccggcttcacatctgcttaaaggatctaggccctccctgccacagactgaaagaaggatccggtgtgtctcccgggccatggaaatgagctgggtcatccctcctttggctcccgtccacgcgggccaatctggtttcactttgtcattttctccaaaacccagtttcctttttatttctctcccactcagcttcacgtgctcccggtcccctccccgtctctgcagcccatttttccargttctcggtcctctccttcacagattttctgtcctctttgttcacctggattgggaatcgggagccgctggggatggagggaatgagaacctcagatgaaggacaggtagggctagagaaaggttttcagagagaaacagagaagaatgagatgaaaacacagcaaaccctgcatggaaggaggggcagtgcccataagagaaagggaagggagcggacaaggtgcagagaactgcacacggacaggctcccgaggcctgggccatgccgtggcagggccagaaacaaagcgaaacaaacggacaggccaaggaaatttccgtcggcgtggacactgccagcagttttcctaggagctgggggtgccagcacttggagcaagcatgggccaaggacgatgagtaacagaggtggcggcaagggctctttccagggagcgtgtatggccttgaaggccaaggaggaaaggctgggggagcaaagcggkgggaggagggaagggggagaggagaggtgccagtcacaaaggaaaacagcagccagatccacgcgctgccacactgtgcctgtcccaccttgagtgccccccacagacagctcagctcattccctaaaggtgcgggagggcccagctcattgggcagggctgtgtgaagcacttggcaccattctgggagaattaagcatttagtagacaatagcttccttcaaaataaatccaaacgaggcctgagagcccggaattggggggtgcctgccaggctgtccgcatcagaggaggaggctctagggacctcttggctcctctagtggggcacaaatcggcagctccaagatgagagacaggggaagagtgaattccttggaggggaatcctggcagtgtcgggactgggactgtggctgtgcggttcaaggacgacccctggactgagaggaaacgatgtgagcatcacgcttatatcctgggaaagtgatttatcatcacaagttcataaactggcagtctagttcctaaagcgactacatgtgtgtgcacgtgtgtgtgcatgtgtgttcgtgtgcatgtgtgcacatgtgcactgtgtatacatgtgtgcatgtgtgcacatgtgcactgtgtatacatgtgtgcatgtgtgttcatgtgtgtgttcgtgtgcgggtgtgcattgtgcactgtgtgcatgtgtctctatgtgcacgtgtgttcatgtgtgtgtgcacatgtgtgtttgtgtgtgcacatgtgttgtgtgtgcatgtgtgcacacgtgtgtttccatctccattctgtatgtagctcctgtttcttccctcaggcctgggtgtgaatatttttggggaagttaggtagaagtcagtgtcccctctctctctacagatattttctctgctttctggtcctcaagactgaaaaatgaaaacgtaccaaacagcttccaaagtttacctgttagagattcagccactggggagccactgttcctgttcttgctcacttccaattctaaattcccagagcagtgactctgattggcccagccctgcactaattaggagcgggactgaggaagaggctctgattggtccagcatggtttgagtgcccatccctgtccaatcaactgtgaccaggggtgcgatcatgttggacaaaatgtcaggcagtggagccactgttgttatcatttggatccaraagcccatttcttttttcttttcttttcttttcttttctttttttttttttttttgagacagactctcgctctgtcacccaggctggagtgcagtggagctgtcttggctcactgcaacctccgcctcccgggttcacaccattctcctgcctcagcctcccgagtarctgggactacaggcgcctaccaccaygcctggctaatttttgtttgtatttttagtaaagacggggtttcacygtgttagccaggatggcctcgatctcctgacctcgtgatcctcctgcctcggcctcccaaagtgctgggattacaggcgtgagccaccatgcccagcccaaaagcccatttctgatcgtccagcttcccagacacttcccaggtgcaccgcgacccctgtgtgctgtgtggtcttttgtagggagaaaggatcaatcaagacagtgaaacccctgctcccatggagcttgccttctggtgggataagaaaattagtaaacattaattaataaataggtacttctctacacaagtttacagaaaaataaacgaatatgtacataagaaagaagatggttttggatagtgataagtgctgtgatgaaaatgaaagcaggtgataggccagcggtgactccactgagggaggttgtgagcattacacaacatggtcagaaaagaccccactggacccaagtcccagctggtaagaaagtgccagcttcatgacggtggggaggagcattccagcatcaccgttttaaaatacgagcatcctaaatattacacaaaccatacttatgctaaatatttgggatctacactaaaaatgtagtgtagtgtaaaaatggggtttcaccatgtgggccaggctggtctcgaactcccaacctcaagctatccacccacctcagcctcccaaagtgctgggattataggcgtgagccactgcactcagccaatccgatggttttttgttttttttttttttgagacggagtcttgctctgtcacccaggctggagtgcagtggcgcgatctctgctcactgcaagctccacctcccgggttcacgccattctcctgccgcaggctcccgagtaaccccttttgcttggttctcattctgtctcttggctgccaccatgcaagacctgcctttcgccttctgccgtgattgcgaggcctccccagccacgtggaactgtgagtccattcaacctctttttctttgtaaattacccagtttcgggtatggctttatcagcagcatgaaaacagactaatacactgttgtttcttattaaatgttattggcttattttgaaaacaaaagcttaccaaatacatgtggttatgggaaggggccagaaagttacactgcaagtaaaaatatcagtaactatgtttactgggtggtgatggcataaacaatagtttttcctttttttttttttttttytttttttggagacaggatcttgctctgtcgcccagsctgcagtgcagtggtgcaatcacagcccactgcagcctcgacctcctgagctcaattgatcctcccacctcagcctcctgggtagttgcatctacaggtgtgagccacaaaaaaaaaaaaaaaaaaaaaaaaaattttgacacaggatctggtactgttgcccaagctgaagtgcatctgggctcactgcaagcttctcctgagctcaaaccaccctctcaccttagcctcccaagtagctgggactacaggctcactccaccacgcctggccttgtttttcctttgtaaacatcgttctacaatgctgtgggtacawcgctttttcaatataaagtttcctttggaagtttataaatccagtttgggccttggaggaaagcagtcagtgatagaaatttcgtgactctgagkgagtttggtggagcttcgaattgtagattgtttcccagggaccgctgcagacacaaagccctgacctctggatccccagtgataaatgcsatcaaaggcgagtgtggtcggacgtgcgctgcaacgcgagtcgaggtttcatcgagcctcattcggtggctcctggggcagttgtgtggatgaagagggccatgtccgtgaaacgctcaggatggagctggtggtgcggcggccatgctggccccatcgctcacacccctcacccgtcaactcggtgcccggcgttttccttagctcctctgtggattaactctcgttccgaagacgggaggccgaggtttcatctcagctctgttccyggctcatggctgcrcttctctgtgcccatcccctcccctgacgaggggaatgagaaccttgcctagggaaacacttaggggacggtggcccgtgactccatgccagcccctcccaagcccagccgccagctgaggtcctgaccaccttgtggactgsccsgtgctyccgccctgcgcccgcccccacgtcctccctcctgctctccgtggttccctcgtgttgctgtgccagtagctgagcccccatgcccacccactgcaactgccccttccctccctscwggcttccccactgcgttgctcccctgcaggggccagtgagtggctctagctgtgttcagacggctctgtgcctcctcctcctcccaccccagttcctcagccttggagacagacgggggtgcagcggggctgaacggcactgcaagctcgtggggctgggggtccgcatctgcacccgccgcgtggctagcacccccygagtgttttggtcaatatgccatcatcccacccctcagtgcygctggcggttgcctgacgaaaagctgcacttaatagaaatcactgtggatgcaggagatggacggtgatgagctcaggaccagccagcaaccccatcaggcggtaatgcctaccatggtcacccgtgacttcctctcgccactgctcggagctcctgcaaagccacaggcaacaacacatttctgctccatacgagaagttcctattgtaaatcggtgacatggctgcagttttctctcagcaaatattgagcaaacactgactgtgccaggtgatgtgctgggtcccagacccttcccagacccagccctggcactcacggagatccagctaggaagtccgggaaaaggtcatcggggaaataagcgacgtcaagcacagtggatgaacgcgctgccgccgctccccacgcctcttgtggtgracatcacttacgcttcctcgtggtagacgtcacttaagcttccttatgccctcccagatgaccccccttgggccactacacacggctgcacccagcaagagcagacaaggatggtctactcagcgagcctgcaaggctggtgtgcaggacgggccagctacgctccccaggtgtgtgcaagaccggggacgagtcagtcactgggaggtgaggtgctcgggcagtgtggggtggaggaggagggagggaagctgagtgtgggctcttcgtattggagaggaggggggggccacggcacagacactcagatgggaaggtgcaagaaagagcagagatttcaaaggagctacggtggaggcccacggaagaggaatgctgaggcttttccatctgaaatgctgaatagactctagcacacgcaaaacagcccaccacagtgagctgcaggattcttccgggcttttaacagtggtcttgtaaaaaaaattagccgggcatggtggtcccagctactcaggaggcagagaggggaggatggcttgcgcccaggaggttgaggctgcagtgagccatgatcacaccattgcactccagcctgggtgacagaatgagacccctgactcaaaaaaaaaaaaagactggaacattcaaaacctgttgatgggccaggtgtggtggctcacgcctgtaatcccagcactttgggaggccgaggcaggtggatcacctgaggtcaggagtttgcgaccagcctggccaacatggtggaaccctgtctctggtaataatacaaaaattagccagttgtggtggtgcctgcctgttatcccagctacaggaggctgaggcagaattgcttgaacctaggaggcggaggctgcagtgagccaagattgtaccactgcatccagcctgggtgacagagcgagactctgtctcaaaaaaaaaaaaaaccatgttgcggtttgttggcgaaggccccacttcctttygccaccwycggcgccgaccctgttgcccctgtaatcccatctcctgctgcccctgacagtgccttcgccggctrgtgcttccgcctgttccgttgtggtggctgctgtcaccagggtcctttccgctggtcgtccctttctgcctggagccgccattatcttcacctgacaaatagaaacccatcttcagggctccactgaaacgccgcttccacgggggccctcctgggcgtcccaagcaagttyagggccccaaagcccacactctcacctctcagacacacagctttttatctctaccaccgtctgcccctcctggattccacgctctgcgagggcaagtctgagcccagagcctcctccctctgtcccttgtactgagcgtggtgcccggcacgygggagaaastcagtgggtgttttcggatgaatgagggacttttcttcttttatgcttgcatggttggcaaagccctttcttatggacgtgttcttaagacatatttatctttcgacgtctttacgtgcaggtctcaccttgagaatcgtggtatctgcttcaggggactgcggatctctgccgtggtgagatgatggtgatggcagtgaggatagcaattttagtttattttattgtttatttatttattgagatggagtctccctctgtcgcccaggctggagttcagtgacacgacctcggctcactgcaacatgcacctcccgggttcaagcgattctctcacctccgcctcccaagtagctggcactacagtcgcgtgccaccacgcccagctaatttttgtatttttagtagagacggggtttcaccatgttgcccaggctggtctcagacatctgacctcaagtgatctgcccgcctcagcctcccaaagtgctgggattacaggtatgagccaccgtgcctgggcgatgacagtaattttaataataacaataacaccagtcataataatagtaagtggctaccattatttgagctctcactgcgtgccagggactgtgagggaggtactttgtaagcatcaccgtactcaatccttgccatgggcccctgaagtaggcatcattatccttttayaaacgtctagtctgggccacagacctataaaacaacttgcaaagccccaccgtgtgaagccaggattggagcccacatttgcctggctttcaaaccagtgccaatatgtgatggtctcagaggctaacttccagggagcagtctaggttccatcgtcgcsgagttctgtgggcaggggcttgcrgtggctgcggcccctgcctgcctggggaggtggcacacagaagccctcakccgtgtcaccctttacagcttgggaacgtgcactacctcccagagtggcaccggaagcaggccggtcctttgcagcatcatgttatttgaaatttccagtaattagaacatctcaaacttctcgtgtactaattttaagccttcaaacaacccgtgcctgccaaaagcctgctcatcttggtaaaagccccgaactacaaatagatggctattaacagcatctgttgtaatagcagagacaatattctctggggccagcacgtcacmgcctggagccggccccaaacgtcatctgttattatgtttggagagtctggcacgcgctgaggcaatcgttcaattatatctccatgagccggttctgacgcacctgcttacacagaacgctgaggcaacagtggccagtgctgcccggtggaccagccctgctgatagcagagtccgggggatgggggctggcagcttaaagaccccttttcgtgaattgggcttgccttttttttttttttttttttgattaaggagaataccctgacattgtattgtcattatgaaaagtcactttaggctgggcacagtggctcatgcttgtaatcccagcacttggggaggctgaggcggcagatcccttgaggtcaagagttcaagaccagcctggccaacatggtgaaaccccgtctctactaaaaatacaaaaattagctgggcatgctggtgggtgcctataatcccagctactcgggaagcacaggtgagagaatcgcttgagctcaggaggtggaggttgcagtgagccaagatctggccattgcactccagcctaggtgacagcaaggctccatctcaaagaaacaaaaacaaaaacaaaaattagtggggtgtggtaacacatgtctgtagtcccagcaactcaggaggctgaggcaggagaatcactggaacctgggaggcagaggttgaagtgagccgagagcaccccaccgcgctccagcctgggtaacagagtgagactccacctaaaaaaaaagaagtcactttgagattattttatccaggtctgcagccttaaattgggtccctaactttactggcaaggcaagtagcagagtttggcctgaaccctactacaaaagctgagggcctggaccgtcagacctgggtgaggttgccggctaaactggggcaggtgaccgaacctctctgcgtctcaatttcctcatctcaaagttggactcacaggacctgctctgtagggccattgtgaggagttcatcctgggaggaacataaagttacctcgcaatgcccagcaggtagcaggtgcccagcgaacgccagctcctccgctgcactctggtacacaccaagccttctccrtcacgacaacgacgtgagctcatggacaggatgcgtggtgcccgggacacggcagaayctggccagtgagagcctttgccccttaatcagctgtttcaccccatgaaggcttcagtggcttccagttcgttgttttttgtttgtttgtttgttttagagtgcttcctttacgtcaagcgttgtgctaaggacttcgtatttcccatgtgacttaaccgtaacagcagtcctatggtgggggttcaaggatcatccgcactttacaaatggggaaactgaggctagaaggggtgcaaaagctggacctagagcacacagtttgggagtggtggccccagcttctgaacgtgcgtccgactccagaccccactcctgaccccatgctgtgttgtctacaggaagagtaacgaaacacggctttccagtttttaaagaaatacgcttggcattttgctggtgggcggtcttcgcggcgcaggtctaatttcggaatttacagtgggatttaaaatttgcagtgagattctctgtttcaccttgaaagaggctcaaggtgtatgaatcccacactagactgatgctgaagaggagccygtggaatccacacccgctggcatttccagtaaaaaggcctctgtgtcttcctgaaatgcgtgcgccccgcgcgggccacgttgctcttcaccgaactgccaccaggggccgctccagcccagcccgagtgatccatcggcccctgcacctgctgttcccgaaaacgcagcggcccagccttcctttgcagttatcctcttagaagaacgaacgtttcgcttccctcctcatttgcgtatcatagagccagagagacccagtagccttttgggttttcccctgagcgtgcttggtccccagcccagggtggccgccgtttcaagcaagtcccttgttcaggtacaggcgtgcagatgccccgagggccccatggttcccctcaggaggcagattggaaagggctgacttgtctcttactccagtgagtagagaggcgggggatccggcccatcagaggctgctgcagtaaagaattctgtgagaggctgggcacagtggctcacgtctgtaatcccagcactttgggaagccaaggcaggcggatcatgaggtcaggagatcgagatcatcctggccaacatggtgaaaccccgtctctactaaaaatacaaaaaaaaaaaaaatagccgggtgtggtggtgcgcacctgtagtcccagctacttgggaggctgaggcagtgaggcaggagaatctcttgaacccgggaggtggaggttgcagtgagctgagatcacgccaccgcattccagcctgggcgacagagtgaaactctgtctcaaaaagaagaaaaagmagaagaagaaggaggagaagaagaattctgggacagctcggggtcgggaaggatgaagagatgcctgtgggctccagccctgctggaaacccttgggaaagtcttccagccccagagttagcacagcaccttaccctgcagaggctcagggctcacaagtcccttccggtcccagcagctcccgttcctggcccttgttggttggccacagtctggagggtgasttttctactaggttttgtgggtggggatccggcaggcatcggctgtcagtggacttatgcctcatgcagttggcgtcgctctctttggaaccctatttatgtgcctacgtagaaccctagggtgcttgagctgggaccaggagaaacgtgtagtaactctctttacacagacgaagctgcggagcccctgaagggtgtgcgakgcgcaatcaccaccactgccatcatcagacaacactttacaaaatgcctcctgccttgtctccatttatcctgcccgcccttctcatttaacaggtagagaggcttaggctcagagaggctaagctacttgcccagggtcacacagcaagttagaagcagagctgagttgcaaatccaggtctttaactatttctgtgttctgtggactttcctagagatcccagrcggttccccaactgccgtgggaaaggctcgattccactgtaacacacagagctgcttaccgaccaagtgattcgatgaataaatcagtggactgactaatcccattcgttcctgtattcattcatcccatgagggttcgttgtgtgccttcgatgaccccttcctgcactaagtcctgttgatacagtgatggtccagacggaaacaaccgcttttgtttgtttgtttgtttgtttttgagacggagtttcactcttgttgcccaggctggagtgcagtggcgctatctcggctcactgcaacctccgcctgccaagttcaagcaattctcctgcctcagcctcccaagtagctgggattacaggcacctgccaccacacctggctaattttttgtatttttagtagaggtggggtttgaccatgttggtcaggctggtcttgaattcctgaccttgggtgatctgcctaccttggcctcccaaagtgctgggattacaggcgtgagccaccacacccagcctagaaacagcctctgctctaagagtgcaactggatgggacttaactcagtcttacaaatggcatctacsaggctgggtccagtctaatttgtccatgaagcatccatcatccctgccttctaggcatttctattctagaagagatgatacagacatgcgtgaatttccacacagtaaacttatcatgagtgagcccatcccaagagagagaggcagaccccctggsagkctccaccctcagtcacccatcaatgcactttgatgctgctggggctggtcggctgcaaaccccctttcccccacagacacaggccgaggcagaagcgagcacagagctcaccgtgctcccattttgtggttctgtaagttccttagattgtgttttggaggccaggcacggtggctcacgcctgtgttttgtttttgagacagagtctcactctgtcgcccaggctgaagtgcattggcgcaatctcggctcactgcaacctccacccgccaggttcaagcgattctcctgcctcagcctcccaagtagctgggattacaggcacccaccaatacacctggctaattttgtgtatttttagtagagatgaggttttatcatgttggccaggctggtttcaaacacctgacctcaagtgatacacccgccttggcctcccaaagtgctaggattacaggcgtgagccactgtgcctggcctaacaaagtgattttatgtgcttattgtgggaaggactctttctgtgtattttaaaaattaagatgtaattcatctgtgtatgtttaaggagaatagaaattttgctcataatggtagaattttaaaactagatatgactctgaggttgctccagaccaacactgagattttgagtgaagaggggcagtgagcagctctgtggcttggtccagcacttgcctagcccctgactggactaaagccaaatccattttccattttccagtttacaccttggtgcctccaactatgagtacttttttttttgagactgattctcactccgtcgcccagtctggagtacagtggcacgttctcagctcactgcaacctccgcctcccaggttcgagcaattcycctgcctcagcctcccgagtagctgggattacaggcacccgccaccacacccagctaatttttgtattttcagtagagatgggttacaccacgttggccaggctggtctctaactcctgacctcaagtgatccgcccgcctcggcctcccaaagcgctaggagtacaggtgtgagccaccacgcccagcccaagtacttctggtgtcgggaaaccaccaggagtcagcagtgtcaagctccccaaggcattcatcacgcgctcagtgctttcctggcttttgccacagcgggaggtgacatgaggctcctccacagctatgggaggcactcgggccaccctgaattcgggatcagtgctccagttctgctggcgccttccagccttgcccagccatcccaggagcacgctgtgctgctttcagtgaaaacgtgtggaacgggtaccccatttgtagcagctgctgatggaaatctgttagtgacaaagtrcttagacacaggagaagccacccacatccgaacccctggggagctcgttaaaaggcagactcccagcactacctggacgtgggaatggcagccatgactctgggggccrgagccagaggcctcagcgagcgatgcttatggctgagccccacatgtcaggagaagcaagctcctgggaggcygcacctggcactgtgccatggagaggggcaccccgaggcctgcaggtagagagtgctgactccaaggtgagtgtttagggtgacttaggaaggaaggagtgttccaataaaagctggccctgtggtgggcctagattaagcagggactgccagagatcaggactgatgctacagctcagggtcttcttatttaaagaccttgctcacccaggagcggtggctcacacctgtcatcccagcgctttgggaggcagaggcgggtggatcacctgagatcaggagtttgagaccagcctggctaacatggtgaaaccccgtctctacttaaaatacaaaaattggcttggcctggtggcacatgcctgtaatcccagctactcaggaggctggggcaggagaatcactagaacccagaggtggaggttgcagtgaggctgagatcatgccattgtactccagcctgggcaatagagtaagattctgtcttaaaataaaacaaaacaagacaaaacaaaaactttgctcattgtgtgttattttataatgttatttggtgataggatttaagctgcttttaaaaaatatttggaagacacctttttttttaattaaagtctggaaatcttataggacaggcaggcatcacagaaacgttctttacggatttctgcctgcagggagttgaggycctcaccaccacccagtggcagcactgggaccctgccttcattccacatttactgtgaacctctgggcaggcgctgggctggskgggggcagagtgaatgggacagacagagcccacctttcacggagcccacctttggcttgtcacttcaaccatacagcaaccccttgcgagtgaactcatataaccctaatgtagacaatgcctcaggtaacaccacagctcaacaaacagacaaaatgacacacacgtctcactgcctttatttccaggaattagtggtgggcccttggaaaaccactacagactgaagcaatttcacttccactggggagcagtgaacgaggggggctcagagcacacagtggacggccacgcgtacccygcagaggtttgtagacgtggcctaacagcacatatctgcacactttccatgtctccggctctatggtggggggtgaacaagccatgcgcgccgctcagatgtgaaggatttcctggggcctgggactgtcagtgctcaaaccagaaccgtcggccgccccacccgtttagtcacacctctcctacgaggaaggcgctgtaagttctctctcatttaacggaagaagagactgaggttctgaatggttacggaacttgccaaagccagacagccgggatgcaaagtcagagcttgagctctttgccgcacttcactcagctgtgtgcttgcagctgtagggactagcaaatccacaaggccctctgctgagaagctgaacatctttgcaatagagatcatcttcttttgtttgtttgtttgtttgttttttggtttttggttttttttttttgaaacagggttcactctgtcacccagactggagtgcattggtgcaatcttggctcaccacaacctccgtctcccaggctcaagcgattctcctgcctcagcctcccgagtagctgggattacaggtgcgtgccccaggccctgctaatttttgtatttttagtagagatggggtttcgccatgttggccaggctggtctcgaactcctgacctcaagtgatccacccacctcagcctcccaaagtgctaggataacaggcrtgagccaccgtacccggctaagatcatcttaaagcagtcttattttcaaccttccaaagtgggagtcagtagagaaaatcagtgcatatcaatgttgggaattggtttttgtagtttttttggggtgataagtgatgccttatagatttccccaaatatttcattatgaaatttttgcaacatacgaaaaaatgaaaagaaatgaacgagaagaatctacgagtttgatgtctcagtcctgtgatgatcatttttgccatattcactttatcacacctctgctcacccactcacctaactttttgatgctttttcaagctgaggactctttctgttttttgaacttgttgttgttatgaaagtaatgctgcagttaatgtggaactagagtccacccaaaccaaaaaatgaaaattgcttgtaatctcacacccagaggtgacctccggacattttataaatagggagtgatatctattgtcatcatcatacacatatttataaattgttccaagaatgagcacaacaatggcttctgtgtgcttcctttcatttaacaacatgacttttattttagtatctctatctgcaactttgtttttgatgaacagatattttatttatttatttatctgtttttgagactgagtatcactctgttgcctaggctggagtgcagtggcgctatctcacgatcttggctcactgcaacctctgctgcccaggttcaagtgattctcctgcctcagccttctgagtagctgggattacaggcacctgccactgcgcctggctagtttttgtagttttagtagggacggggtttcaccatcttggccaggctggtcttgaactcctgacctcgtgatccacccacctcggcctcccagagtgctgagattataggcgtgagccaccgcgcccagccgaggcctgagtttcttctggtaattcttgtccaaggataactaggaagtagaaaataatgaaaccacccatttctattggatgaggttaacatgatcctctcctttccccccccaccaggaagactgaggctgttccttcctgtggcttcgtcaagggcctgggagctcagaggtgctgctggtgctgggatcttactcatctggctgcaacaacttagttctttttttttttttttgtgagatggagtctcgctctgtcacccaggctggagtgcagtggcacaatctcagctcactgcaagctctacctcctgggttcacaccattctcctgcctcagcctcctgagtacctgggactacaggctcccgccaccacgcccagctaattttttttttttgtatttttagtagagacaggatttcagcatgttagccagcatggtctcgatctcctgacctcgtgatccaccygcctccgcctcccaaagtgctgggattacaggtgtgagccaccgcgcctggccatttcattatgattaagtggacacataggtcagccattcagaaggggaagtgactgtcttatttcttgcygatcaatttaagttctctttccattgtgtttcagctgcatttagttcactggaattctgtgaaataccaaaattacaaggaagctgtcgtgggagagaatggtttggctgtgataggcgtgtttttaaaggtaatcacttgctcgggtgtagatctaatgaagaaagtggtgatccatcattaggattgcttttttttttttgagacaggactcgctgtgtcacacaggctggagtgcagtggcacagtctcggctcattgcaacctgcacctcctgggttcaagtgattctcctgcctcagcctccccagtagctgggactataggagtgtgccaccacacccagctaatttttgtatttttagtagagacagggtttcaccatattggccaggctggtttcgaactcctgaccttagatgatccgcccacctcggcctcccacagtgctaggatcacaggcatgagccaccgcacctggcctaggattgcttttaaaacgtggtgtatttacagtggagtgagcttccccccccatccactgcctttgcagctaacccctcctttgtctgccatgcagctcggggcccatcatcagacgctgcagaggctggtggacatcttgccggaaataaaacataaggtaagctgcatatttgaaatcagcaggccgggcgcggaggctcacgcctgtaatcccagcactttgggaggctgaggcaggtggatcacgtgaggttgggagttcgagaccagcctgaccaacatggagaaaccccgtctccactaaaaatacaaaactagctgggtgcggtggcacatgcctgcaatcccagctactcgggaggctgaggcaggagaatcgtttgaacccagaggtggaggttgcagtgagctgagatcgtgtcattgcactccagcctgggtgacaagagtgaaatcccatctcaaaaaaaaaaaaagaaaagaaaagaaagaaatcagtataatctgacaagcaaaattgtttagtgcagcgattcatttgcaaggaaaaagaaatggcgtnnnnnnnnnnnnnnnnnnnnnnnnnnnnnnnnnnnnnnnnnnnnnnnnnnnnnnnnnnnnnnnnnnnnnnnnnnnnnnnnnnnnnnnnnnnnnnnnnnnnnnnnnnnnnnnnnnnnnnnnnnnnnnnnnnnnnnnnnnnnnnnnnnnnnnnnnnnnnnnnnnnnnnnnnnnnnnnnnnnnnnnnnnnnnnnnnnnnnnnnnnnnnnnnnnnnnnnnnnnnnnnnnnnnnnnnnnnnnnnnnnnnnnnnnnnnnnnnnnnnnnnnnnnnnnnnnnnnnnnnnnnnnnnnnnnnnnnnnnnnnnnnnnnnnnnnnnnnnnnnnnnnnnnnnnnnnnnnnnnnnnnnnnnnnnnnnnnnnnnnnnnnnnnnnnnnnnnnnnnnnnnnnnnnnnnnnnnnnnnnnnnnnnnnnnnnnnnnnnnnnnnnnnnnnnnnnnnnnnnnnnnnnnnnnnnnnnnnnnnnnnnnnnnnnnnnnnnnnnnnnnnnnnnnnnnnnnnnnnnnnnnnnnnnnnnnnnnnnnnnnnnnnnnnnnnnnnnnnnnnnnnnnnnnnnnnnnnnnnnnnnnnnnnnnnnnnnnnnnnnnnnnnnnnnnnnnnnnnnnnnnnnnnnnnnnnnnnnnnnnnnnnnnnnnnnnnnnnnnnnnnnnnnnnnnnnnnnnnnnnnnnnnnnnnnnnnnnnnnnnnnnnnnnnnnnnnnnnnnnnnnnnnnnnnnnnnnnnnnnnnnnnnnnnnnnnnnnnnnnnnnnnnnnnnnnnnnnnnnnnnnnnnnnnnnnnnnnnnnnnnnnnnnnnnnnnnnnnnnnnnnnnnnnnnnnnnnnnnnnnnnnnnnnnnnnnnnnnnnnnnnnnnnnnnnnnnnnnnnnnnnnnnnnnnnnnnnnnnnnnnnnnnnnnnnnnnnnnnnnnnnnnnnnnnnnnnnnnnnnnnnnnnnnnnnnnnnnnnnnnnnnnnnnnnnnnnnnnnnnnnnnnnnnnnnnnnnnnnnnnnnnnnnnnnnnnnnnnnnnnnnnnnnnnnnnnnnnnnnnnnnnnnnnnnnnnnnnnnnnnnnnnnnnnnnnnnnnnnnnnnnnnnnnnnnnnnnnnnnnnnnnnnnnnnnnnnnnnnnnnnnnnnnnnnnnnnnnnnnnnnnnnnnnnnnnnnnnnnnnnnnnnnnnnnnnnnnnnnnnnnnnnnnnnnnnnnnnnnnnnnnnnnnnnnnnnnnnnnnnnnnnnnnnnnnnnnnnnnnnnnnnnnnnnnnnnnnnnnnnnnnnnnnnnnnnnnnnnnnnnnnnnnnnnnnnnnnnnnnnnnnnnnnnnnnnnnnnnnnnnnnnnnnnnnnnnnnnnnnnnnnnnnnnnnnnnnnnnnnnnnnnnnnnnnnnnnnnnnnnnnnnnnnnnnnnnnnnnnnnnnnnnnnnnnnnnnnnnnnnnnnnnnnnnnnnnnnnnnnnnnnnnnnnnnnnnnnnnnnnnnnnnnnnnnnnnnnnnnnnnnnnnnnnnnnnnnnnnnnnnnnnnnnnnnnnnnnnnnnnnnnnnnnnnnnnnnnnnnnnnnnnnnnnnnnnnnnnnnnnnnnnnnnnnnnnnnnnnnnnnnnnnnnnnnnnnnnnnnnnnnnnnnnnnnnnnnnnnnnnnnnnnnnnnnnnnnnnnnnnnnnnnnnnnnnnnnnnnnnnnnnnnnnnnnnnnnnnnnnnnnnnnnnnnnnnnnnnnnnnnnnnnnnnnnnnnnnnnnnnnnnnnnnnnnnnnnnnnnnnnnnnnnnnnnnnnnnnnnnnnnnnnnnnnnnnnnnnnnnnnnnnnnnnnnnnnnnnnnnnnnnnnnnnnnnnnnnnnnnnnnnnnnnnnnnnnnnnnnnnnnnnnnnnnnnnnnaaaacctcatctctactaaaaatacaaaaattagccaggcgtggtggcaggtgcctgtaatcccagctactcaggaggctgaggcaggagaattgcttgaatctgggcggtggaggttgcagtgagctcagattgtgccactacactccaggccgagtgacacagcgagactcatctcaaaaaaaaaaaaaaaaaaaaaaaagaccttaggaggtaaaaggcccagccttgggggcaagagtctgtgcttcatgggccagggaatgggaagagacttgaacaactctctcgcctagaggctcctagcctaggacttctgggagcttctcccatagcacagtgtatcagagagccccacagttggactcctgggttcagagcccagatccaccactcctgagctgcgcacctctgagcctcagcttcctcgcctgtgaaatggagatattaaacatccacagtagcccaggtatggtggctcacacatgtaaccccagcayttagggagactgaggtgaatagatcacctgaggtcaggagttcaagaccagcctggccaacatggcaaaaccccgtctctactaaaaatacaaaaattagctgggtatcgtggcacactcctgtaatcccagctactcaggaggctgaggcaggagaatcgcttgaacccaggagacggaggttgcagtgagccgagatcgtgccactgcactccagtctgggtgacagctcgagaatccgtctccaaaaaaaaaaaaaaaaaaaaaatccacactagagcagcattctcaccatgtaatggaataaggagcatgtctggttcttggtgaaatgtgcagttgagtttaaggcccagctgtggccaacactcacacactcaagtctgctgtggaaggcacaggctgctgctgcccgtcacgaaacgaaaatccaccagcccaatcactaaggttaaaatcgctttttgttgctgcgggtgctttctgtcaggtgattcccagagagagctattaccttctgggagcccatgaaattttagaatgatggccttgtgatggaaaatgctagaagtgtggttgaatctaattcctgattggtgggcagtgcagggcaggacagggccatggtggcctcaggctcaagggcagatggccttggcttcaaatcccagctctgccactcccccgcggactcagcagttctcacccagggacgggctcacctgcagcttctgggctgctttcctggtttcctccagttaaggaacaagttgtcctgaattagggcaggaaagaccagagtcacgtagtccccatcatctctcctggttccaggctgrtccgggccctgctgtgggactgactcggcagagaccctccaggaatgcctgccacggtcactccctggggacccagctggcttctatgcagtgctcagggctccaagggtgcatttccagaaagagccagatggacacgatgtccttttctgccctggcttccagagtcacaaagcactgctcctgcggcatcctgtttaccactcccgtcaggagcacctgcccaggctcagggcaaggggacatcaccctacacctcggcggaaggggttcaaagaagcgacagccctccacataaattatcacactgaatcttccaatcactccacggggcagggcctgtgattcatctgtcttgcacacacaggaaaaccaaagctcagagaggcagagaaggccttgcccgagcacacagctggcaggtgaagagcccgtttttaaacccaggaagtgggtccacgcagcctgaagtcccagtcatcctggcgcccacctcccgcatgcagtcagaacccaggctgagctccagcccctgctgcacatttctgagcttttcagcagcttagagggaaacacaggcagtgtctgtaaccaaaaccacatcaggcgctgcctggaagcctggacccccacccccacccccagcaccatcccatctgcacaggcccctaccagtgccgacctgtcactatgcactcagctcccagcacgcaggcacagccccagtgtggtcctggtgaccccgggcagacaattccagaatggagacctcaaggcttcgcctttgaccctctcaccatagccagaagttttggcaaaaactgcccacagagggtccccaccctccatgcctggacaagccgcaagctcctcaggctgctggggtcccccctcctccctgccttcgcaacagtcagagctaccggggaattggctgccttgtggaggtggaaacagcccaccaggtccaggggatccagggaacggctctgtgccctgtgggggctcttctagctttggcagcagcagcggcagcacctactgagccccacgcccacgtggcaggcactgatggaagcccattaccgccaccacactgcctgtcgtacacctggggaaactgagactctaagaggacaaagcaagggcggagttaggctgggtggggcttgacgctcataaaatgtggggtcctgtttaagagaaagaagacaaaaccaggaacagagcgtggctcacgcctataatcccagcactgtgggaggctgaggcgggcggatcacctgaggtcaggagtttgagacgagcctgaccaacatagagaaaccccatctctattaaaaacagaaaagtagccaggcgtgatggcgcatgcgtgtaatcccagctactagggaggctaaggcaggagaatcgcttgaacctgggcggtggaggttgtggtgagccgagatcgtgccattgcactccagcctgagcaacaagagtgaaactctgtctcaaaaacaataaataaataaaagaaaagtggaacaagtcaccaacccacttccaccagcaaaggcttgtggtgctttccacaggtagctgggccatccgtgctcagataatggatgtgatggtcttcagcctcattggtgtgctcaccggtgtcccattctagctgcctgaggatcaccacatgcataaaggaagggccctgatttgctttgggggccctgagggggagcagttttctgtaaccacatggctgctccagccctcatgcatcttagagacaggacaggaactcctggggacgatgaggcaacacacaggcatcctcttctcagcccaaggcagaaagcttaattggcaagaaacctacccgcagtggcatggctggagcctgccactcccctgactgattcctgcagccttggggagggaaggaagagcccgcacctcggaacgggccaggcctcagtggccctgactggcaacgtggctttgggcaagttttttatatctgtctgtctatcttcatcagtaaactagaaatacttctcaaagggttgttctgaagatttgaagtagttgctcagaaagtgactggcacatctgtgccctggggatgtgtggcaggcaggaggagacggacgtctcactgcacacccgcctgttacccacgtgcaccagactgatgtctcactgcacacccgcctgttacccacatgcacaagcagtctgctccttcacagcccagctagagcgtgcaatgggatgtcaacccagctagaccatgcagtgagatattacttggcaatcagaaaggacacagctctaactcatgctgcggtgtgggtgagcctcaaaagcsccgygctgagtgagagacacaagacacaaatgttccacatgttacatgactcagttcctatgaaacccacagagacagaagcagcagggcgggggtggggaccatagctaaaaagtaccaagcttcccccttgaggtggaagttctaaaattgacttgggatggctgcacaactgtgaatatacccaaaaccatagaactgtacccttcaatttttatttactttttttgttttttgttttttgttttctttttgagatggagtttcactcttgttgcccaggctggagtgcaatggcatgagctcagctcactgcaacctctgcctcccgggtttaagtgattctcctgcctcagcctcccgagtagctgggattacaggcatgcgccaccacgcctggctaattttgtatttttagtagagacatggtttcgccatgttggtcaggctggtctcgaactcctgacctcaggtgatccatccgcctcggcctcccaaagtgctgggattacaggcgtgagccaccgtgcccagcctatttacttattttaagaaaggatctcactccgtcaccgaggctagagtgcagtggtatgatcacagctcactgcagcctcaacctccggggctcaagccatcctcccacctcagcctcccaactacctgggaccacaggcgtgcaccactgcacctggctagtttttgtattttttgtagagtcagggtctcgttatgttgcttaggctggtctcaaactcctggcctcaagcagtcctcccacatcggcctcccaaagtgctgggattacagacatgatccattgcgcccaaccaggctgtacactttagatgggagagttgcatggtatgtgaattctatcacaataatgctgtgggttttgctgctgctgctgttgtttgagacagagtctctctctctgttgcccaggctggagtgcaatggtgccatctcggctcactgcaacctctgcatcctgtgccaaagcagttcctgtgtctcagtctcccgagcagctgcgatgacaggcacctgccaccatgcctggctaatttttgtatttttagtagagatggggtttcgccatgttggtcaggctggtcttgaactcctgacttcaggtgatctgcctgccttggcctcccaaaatgctgcgattacaggcatgagccactgtgcccagcctataatgctgtttttttttttttaattaactggataattataaacgtgaacatgcgtgcatagaactgatgcatgtgtctgccagtgtggacactcccgggcttccttctggtagctcagccacctctcttgaccctgaccctcactgcttgatgttaggagacaagcccaaggcatctgggttgccagcttccaccttggaaggccagggcccagcaaagtcaaggtgatgtgatgtggctgagcagggaggccatcttccttgcagacagggactctgtcactttggactggactcttgtcccacagtgctggccaggggcaggtgcagagctatgcttggttggcatgggacgctgatgagggctgtgttgcggccaggcccaaccaccgtgagctgagatcatgccacggcactccagcctggaagacagagtgagactctgcctcaaaaaaaataaaaaaaataaaaagttataaatagaactaccctatgattcagcaatcacacacttctgggtatatatccaaaagagctggctgggcacagtggcttatgcctgtaatcccaatattttgagaagccaaggcaggaggatcgcttgagcccaggagttggagaacagcttgggcaagatggcaagaccccctggctacaaacaattaattttaaaccctggtgtggtgtcctagctacttgggaaactgaggcggggggatcgcttgagcccaggaattagagcctgcagtgagctatgatggcatcattgcactcctgcctgggtgacaaagtaagaccctgactctttttgttttttggctgtgagtgtattcaatgcaaaataatcctctctgattttactgaggtagctggccatgtccacgaccaaatctgcctttaaactggaattcggttgctgacccagcccgagcctcggctatcttgtcggcaccaggggcacagcactccgtctgtaggtatgtctgtcagcttcccctcttgtgagtcttgcaggtcgcccaccctccagacctttaggccgaggcctgccagtccctggacggctgcagcatagggtggcaggcacagtttccagggacagatgaaggtaatcacggagatactggatgccctcattggtaaggtagcagtagaaatgtctccaggcaagccgggcgtggtggctcacgcctgtaatcccaacactttgggaggccgaggtgggcagatcacgaggtcaggagatcgagaccatcctgactaatatggtgaaaccccgtctctactaaaaatataaaaaattagctggtcgcgatggcgtgaagatgtagtcccagctactagggaggctgaggcaggaggatcgctggaacccaggaagcagaggctgcagtgagctgagatcgcaccactgcactccagcctggagactctgtctgaaaaaaaaaagaaagaaagaaagaaagaaaggaagaaagaaagaaatgtctctaggcaaactgttccttcaggcagcctcggggcttgagagactgcatggccttcgtgacatgaaggttgggcacattcttgtctgccatctccgggtgcttaggcatgtggacatccttcttggccaccatgactccctccttaaaaaggagcccataggccgggcacagtggctcaccccagcactttgggaggccaaggcgggtggatcatccgaggtcaggagttcaagaccagcctggctaacatggtgagaccctgtctctactaaaaatacaaaaattagctgggcgtggtggcaggcgctggaggctgaggcaggagaatcgcttgaacctgggaggcagaggttgcggtgagccaagatcacaccattgcactccagcctgggcaacaagagcaaaactccatctcgaaaaaaaaaaaaaaaaggttaagatggtaaattttatgttatgtatattttatcacaataaaaagtaatattttttgcagccaaggtatgctaaaagaaatggctttatttttatttttattattaattaatttattattattattattattattattattattattattatttgagacagagtctcactctgttgcccaggctggaagtgcagtggcatgatctcggctcactgcaacctctgcctcctgggctcaagcgattctcctgcctcagcctcctgagtagctgggactacaggcgcccaccaccacatctggataatttttgtatttttagtagagacagggtttcaccacgttgaccaggctggtctcgaactcctgacctcaagtgatgcacccgcctcggcctcccaaagtgctgagattacaggggtgagctactgcgccccaagaaatgacttcaaaaggaaaaatgtgagcaccaacgtaagctggtgtaatgtaacgtaattcccaccaatgtaagttggcaggaatccttgctctgtatagaagggtcacattttctcatcactgcttgcaagtgtgacagcagtggcctcatggccttatctgggggaaagcacttccttccaagcaccatgaaggcctcacgtgctgagacaagatggaagctcctagtctcccctgaggactgacacgtcctgtgcttctcggtctctcaggacgcgcgggcggccatgcgccccttcgacccctccactctgctgcccacctgctgggattactggacctacgcgggctcgctcaccaccccgccgctgaccgagtcggtcacctggatcatccagaaggagcccgttgaagtggccccaagccaggtgagccgtgcccgtaactggcacgatggcgcttcatggaaggcgtccctcttgcttggcagcgtcactaagatgctgcatgagagcgttgtggagttatatatattctttcatgcatttggggcmttcttacacaagaagaaarttccaactgaagtaggagcttgttgagattggacagcggttccagtgatcacagcaagcatgtcctgagcaacgccctaatctatcacacacagacacacgaggcatccatgggagttgtcccagggtcatgggtctgcatggtttttgttttcttcctttttcttttctttccttttttttttttgagacagagtctcgttctatcgcccaggctggagtgcagtggtgcgatctcggctcactacaacctccacctcctgggttcaagcgattctcctgcctcagcctcccaaatagctgggattacaggcacccatcaccacgcctggctaatttttgtatttttagtagagacggagtttcaccatgttggccaggctggtcttgaactcttgacctcaggtgatctgcccaccttggcctcccaaagcgctgggattccaggcataagccaccgagcccggcctcctttttcttatctaaatagtttcattgcttttttttttttcgaaaattaattaataatatttgtatacactttttaaagttatactcttgggctgggcgtcatggctcatgcccataattttaggacttaaagaggccaaggcagccagatcacttgaggccaggagttcgagaccagcctgaccaacatggtgaaaccccgtctctactaaatctacaaaattagccaggcgtggtggtgcatgcctgtaatatcagctacttgggaggctggggcaagagaataacttgaagccgggaggcagaggctgcagtgagctgagatcacgccactgcactccagcctgsacaacaagagcaaaactccatctcaaataaataaataaataaaaatacaaaaattagccaggcatggtggcgtgtgcctgtaatcccagctacttgggaggctgaggtaggagaatcacttgaacctggaaggcggaggttgcagtgagctgagatggcaccactgcactccaacctgggtgacagagtgacactctgcctcaaaaaaataaaataaaaaataaataaaagttatactatcatttttttctggaaatcttaagaatctgtagcaattctgtctgtccaaggcagttcagagccacagacgtgctgcctatgccccgcccccgcccggcagacgtttctcagcagtcgcagcgcgacttagcatctctggctcatctctttccgagggctccaggtgagctcttagagggtctttcagtctcccgggcctgtgaaaatattcccttatatacaaacggggaaggcttttgttgaaggtggccccttgtcagcaaggcccttatgccactcaacaagcatatatgtgacaagtgcccattctgggtctgtgccaccaagagagggtgggaggggggcaggtgtggaggggcggtacaggaacagggcattcgtctcagaacactgctgtatggcaggaaagtagaaacgaagccaatagtattaagccagggtggccggtgtcatataaaaatgcagggcaggagccccttatcctgagcaggggagccagggaggcacatgtcctggaaggcggggagttttccaggggaggagaaaggctgcacagtcaacaaatgtgcagaccacaaatgtggatgagcacaccgtggtcacggcccaggaggccacgtgcaccatgcgcgcaactctagggggcgctgcatcatcacgcagggctaactggaccagtatgctgtcagcatgtagacataatctcacttctgaatgtaatcaaatgcgtgagttgcctcacagggttcataagtatattctgtgaacaagtgagataatacataaaaagtctttttttattttttattttattatttttttttgagatggagtttccctcttcttgcccgggctggagygcaatggcgtgatctcgctcaccacaagctccgcctcccaggttaaagagcttctcctgcctcaccctcccaagtagctggattacaagcatgagccaccacacctggctaattttgtatttttagtagaaacagggtttctccatgttggccaggctggtctcaaactcctgacctcaggtgattcacccacctcggcctcccaaagtgctgggattacaggcgtgaggcaccacatccagccataaaaagtagtcttttagttccttcagtgaaaagtaaattcaaatgttactttagcatttacattataggtgttagttatctattgctgtgtaacaaatagctccaaaacatagtggctttagaaaacaatcatttgagccgggtgcagtagctcatgcctgtaatcccagcactttgggggcctaggcaagtcgatcacctgaggtcaggagttcaagaccagcctgaccaacatggtgaaaccctgtctctactaaaaatacaaaattaggcctagcacagtggctaaacgcctataatcccagtactttgggaggccgaggcaggtggataacctgaggtcaggagtttgagagcagcctgaccaacatggagaaaccccatctctactaaaaatacaaaattaactgggcatggtggtgcatgcctgtaagcccagctactcaggaggctgaggcaggagaatcccttgaacccaggaggcagaagttgcggtgagcaaagatcacaccattgcactccagtctgggcaacaggagcgaaactccatctcaaaaaaaaaaaaaaaaattagccgggcgtggtggcttgtgcctgtaattccaactactcaggaggccgaggcaggagaatcgcttgaacctgggaggcggaggttgcagcgagctgagatctcgccaatgacactccagcctgggaaacaagagcgaaacactgtctcaaacaacaacaacaaaaaccaatcatttattatctcccatagtttccttgggttgtgaatttgggtggctctggcttaccatctttcatgaattgtagcccagtgtcagctgggactgtagcaatctgaaagctcaactagggctagaggattcattccaaggttggccctctcgagtagctagcaagttggtgctggcagttcgctgggagcctcagttcctctccctatgggcctctcctcggggctgcttgagtaccctcccaatatggcgaccagcttccccccagagcaagtgatcctaaagaccaaggcggaagcggcaatgccttttataayctggccctgcacacaccatcacttccaccatatttattgatcatttcgggccatcctgattcagcatgggaggggaccacataaggcctgagggacacccagaggctggctcaccctgcactcataccaagctcaccctggctgccctctattccagctctctgcatttcgtactctcctgttttctgcacttggtgaagaggagaagatgatggtgaacaactatcgcccacttcaacccttgatgaaccggaaggtctgggcgtccttccaggccactaatgagggcacaaggtcctagagacattaggtccacatgaatagcagaactgactttgaaggaaggaagcgttgtttcccaagtttcacaatgtgattgtacatgacttctgaaattaaaaagagagcatgaggttattgttttagtcgaagtacttttcagctgcaagtgaaagaaagatgtgtaagtaccgtggggaacataacgctgggatggaggggtgtgccatggcacccaacgcaagtgcagggtgcttagtttcactgtaacgaagtaccacaaacttggtggattaaaacaatggagattgattctcttacggttcagtgagccagaagcccgacaccaaggtgtcctcacggctgcttccttctgaggctctagggcaggatctttttccttgcctttccagcttctgcctcctccttgtaagaactggcggggtgcattgcctcatgcctttaatcccagcactttgggaggccgaggcgggcggatcacgaggtcaggagatcgagaccatcctggccaacacggtgaaaccccatctctataaaaaacacaaaaattagctgggtgtggtgctgcatgtctgtaatcccagctacttgggaggctgaggcagaagaattgcttgaacccgggaggcagaggttgcagtgagccaagatcacactattgcactccagcgtgggcaacaagagcaaaactctgtctcaaagtaaaaaggaattcttgtgaggccaggcaccgtggttcacgcctgtaatcccagcactttgggaggccaaggcaggcagatcacttgaggtcaggagtttgagaccagcctggccaacatggtgaaaccccgtctctaccaaaaatacaaccaaaaataatctggcaggataaaaccagaaaacatacacaatttgatgtcaagacctacttcaaaagctgtagtaggccaggtgcagtggctcatgcctgtaatcccagcactttgggaggccgaggcgggaagaccacctgaggtcagaagttcgacaccagcctgaccaacatggcgaaaccccgtctctgctaaaaatacaaaaatgagctaggtgtggtggctcatgcctgtaatcccagctactcaggagactgaggcaggagaatcgcttgaacccgggaggcagagcttgcagtgagccgagatcatgccactgcactccagccagggtgacagagcgagactccatctcaaaataaataaataaataaaaataaaaagctatattaattaagataatgtggtacctgtcagagaaggacaaatcaaccaatgaaaaagaatagcgtgtctagaaggttccacacatttgtgatccctgactcatgctgtagggaatggatgggctcttctgtgaatagttttggatcatttggatatctattgattgatctatctattgattgatcgatcaattcatcagtcgatccatggggtctcactatgttgcccaggttggtcctgaactcctgggctccaatagttctcctgccttgacctcccaaagtgctgggattacaggcattagccaccccaccgagccaacgggatatccaaatggggaaccatgaatcttttttctcaccatacctcacacccctacctcacagcacacacaaaaattaattcctgacagattatagatctaaacaggaaaggtaaaacaataaagctcctaaaaaataacaggagctgggcgctgtggctcacgcctgtaaacccagcactttcggaggccaagttccagactagcctgaccaacatggagaaaccccatctctactaaaaatacaaaattagccgagcttggtggtgcatgcctgtaatcccagctactcgggaggctgaggcaggagaattgcttgaacccgtgaggcggaggttgtagtgagccgagatcgcgccattgcattccagcctgggaaacaagagcgaaactttgtctcaaaaaaaaaaaaaaaaaaaaaaacttgatccagaactcaatgttgggtctgagtgtggcttttctgtctctctttcatgatgttgtctctctcggcaagctcattcttttggaggaaagagagctaccactcgtgccaggatggtttccattaattcatgtaacatttattgagtgccaattacgtggcaggctctattctagactctggggacggagcctagactgtttaaggtctgaagagcctttgcctcggagctcacattctgatggaaggaggtagaccatgatgcatccacacagaaagtctggagtggtaagtcacaggaagaggacatggctgggtggggaggtctcttctacaggggccatttgggcagagaccaaaggaggagtgaaccacgtggctacccaagggcagagaattccaggcagaggctggaggcaggagcgcccttctggtgttcaaggtgcagcccgagggtgagggcagccaagtgcaggggtgaggagagaggcatgggaggcaagggtgggtactggggccccacaggctgggtggagactttggagctgctgctgggttctgagcaaagggcattttcaagtggagaggctcagttcggctgtgctgccaaagagttttccaaagtggtcattcctgtccttgccagcaggtcattgtgtgctttctggagggtgtgcccaggtgtctcctgtggatttaatttgcacttccctaatgattcatgacgtggagcactttgtgcagattcattggccgtctgcatatcctctttcaccagatacctgcttgagccatttgcccatttttctcttgggctgtctgtggttttcttattgatttttaggagttctttatatattccaattataaggcctttgtccattttacaaatctcttctcccactctggggctgcctttcaccctcttttttttgttgttgttgttgttttgttttgttttgttttgttttgtttttgagatggagtcttgctttgtcacccaggctggagtgcagtggcgcaatcttggctcactgcaaccttcacctcccgggttcaggtgattctcctgcctcagcctcacaagtagctgggattacaggcatacaccaccgtgcctggctaattttgtatttttagtagagacggggtttctccatgttggtcaggctggtctcgatctcccgacctcaggtgatccgcctgcctcgtcctcccaaactgctgagattactggcatgagtcactgagtcgggtctggatcaagcttatagcaatggttgcacctgatcagttacacaagccaataggtgccctttcatgtaagccagtttgggtttctttttacctattacttgcttggaaaaaatccaaaatcagtacagtgtttttcttttccttttttttagatggagtgtagctctgttgcccaggctagagtgcaatgtcacgatctcagctcactgcaacctctgcctcccgggttcaaacaattctcctgcctcagcctccggagtagctgggattacaggtgcccgccaccacgcccagcgaatttttttttttttttttgagacagagttttgctcttgtcgcctaggctggagtgcattgatgcgatcttggttcaccacaacctctgcctcccaggttcaagtgattctcctgcctcagcctcccaattagctgagattacaggcatgggccaccacgcctggctaattttgtatttttacgagagacggggtttctccatgttggtcaggctggtctcaaactctcaacctcaggtgatctgcccgcctcagcctcccaaagtgctgggattacagacgcgagccactgtgcccagtcttttttttttttttttttttttttgcatttttagtagagattcggtttcaccatgttggtcaggctggtctcgaactcctgacctcaggtgatctgcctaccttggccccccaaagtgctgggattacaggcatgagccaccgcgcctggcccagtatttttattttcatagcattaaaaaatattcccgccagaagagagaaagttttacaataaacctaattacattatcttccaacattaccttacagtcagatgagcacagaaaaataagcagatgctaatctgtttcccaaggtgataaaggccatttcattccggggagataaagaataagtaggttaggtcaggcgcggtggctcacgcctgcaatcccagcactttgggaggctgaggtgggcagatcacctgaggtcaggagttcgagaccagcctgggcaaaacggtgaagccccgtctctactaaaaaaaaatgcaaaaaattcgctgggcgtggtggcaggcacctgtaatcccagctacttgggaggctgaggcaggagaattgcttgaacccaggatgcagacgttgcaatgagccaagattgtgccactgcactccagtctgggcaacagagcgagactccgcctccaaaaaaaaaaaaatacgaaaagtaggccgggtgcggtggctcacgcctgtaatcccagcactttggaaggctgaggcaggtagatcatgaggtcaggagatcaagaccatcctggctaacacggtgaaaccccgtctctactaaaaatacaaaaaactagccgggtgtgctggtgtgtacctgtagtcccagcgactcgggagactgaggcagggagaattgcttgaacccaggaggtggaggtttcagtgagccgagatcgtgccactgtactccagcctgggcaacagagtgagactccatctcaaaaagaaaaaaaaaaaaaaactaaggctaggcgcggtggctcacgcctgtaatcccagcactttggaaggctgaggtgggcagatcatgaggtcaggagtttgagacgagcctgggcaatattgtgaaaccctgtctcttctaaaaatacaaagaaaaatcagccgggcgtgttggcacgcacctataatcccagctactgtggaggctgaggcaggagaattgcttgaacctgggaggcagagcttgcagtgagccgagatggtggccaccgcactccagcctgggcgacagagcgagactccgtctcaaaacaaaacaaaacaaaatctagccagaaatcgcttgaacccaggaggtggaggtcgcagtgagctgagattgtgccactgccctctagcctgggcaacagagtgagactccacccctccacgcccccccaaaataaagcgtctggctctttaaaggagatcacacttggtggcgatgcgggtgaaagaggattgggttgaaggagtcgaagtggaagcgggaaagcaccaagcggggaaatgggcacgtttctgttctgctctaagctgctgcgcctgacttcgattccatcgatcaagaggagtctgctgaaggacagggtgtacggctgcctcgcccgctcctgaaccaggcccgggtgaagtgtgttgtgcacattcagcagctccagccccgctgtgggtcgcactgacatgttgggcccagcccacgccccagaagctcgcagcgccgttggtctggggaatggtgttttaggaaaaactcccgaagtgacaggatggtgtcgttgggcgtaagggccacggcactcccattgagttgcgacaagttccacaaaatcgtccctggtttttaataaggaaactgaggctcacttgagaagttaagaaagttgtcgctgacccgctaggccaagggatacgcagcatttcactcttgccttctctgatttgtgcaatcagtcaaggaaaaagcgcagcaaagagagaaagtcctgaaccttaaaacccaggagaaaacttatcctacaatgccgggcagttcacgctgatggaagcagcagccagaggaaggcacttgtctgggcttcctgcagcgctctgagaacagcccgctcctctgctggggaaggggtgacacagtcaatggagggggtggtstctgaacctggggcttgggatgggggcagagagcagctattcagccattctccatgggctgcccatttccaggtgggcttggggacagagaaaggcccaagcggccagaggggccctgggctccagttctaccggcc

SEQ ID NO: 93766 - DNA, 21247 bp, Homo sapiens
tatacttccaattttgatgggacaaattcaacaaaagcatattcatttgtatatcagcaatcttgaatgactcaacttctggctccaaatttggcctagagtttcccaacctatatgtagcagtacattagtgtgctgaaggtattaagccttcagcccatgaggcagtcaggcaggcctggggtacagaggccccaaggtatccacctctggagtcagcacctcatctgcttctctatgtgccttacaattatgatcatttgctaggtgggccatcatgtggaaaagagcaagaagcagagcccaggacaaatgagtagtgcaaaaaggtaaggggacagaggacaattaaccttctagcactttagatgtactctaaaattaaaaccctgaaaatgaatgttctccattcattaaaacaggatccacaagacatatccctggaaaacacttaatgagacttgctatacctagacagaggtacaaactatcctttgaaactcttctgttaattcaaactaatcaccttttagtgatatgacatactctaactataacacgtactctatttaactataacaattttaactataactctatttacaacacaagaaatgcaaccactgaatgatctgctacagatagtatatacccaagaaagtcctgcaatgcttatattgcaatacaatctaacaatactatcaaatagtatattgtgatttgaaaggcctttttctttctttctttctttcttttttaggtggagtctcgctctgtcaccaggctggagtacagtggcacgatctctgctcactgcaacctccctccacctcccagtttcaagcgattctcctgcctcagcctccagagtatctgggactaaggcgtgtgccatcacacccagctaatttttgtatttttagtagagacggggtttcaccatgttggctaggatggtcccaatctcttgacctcgtgatccgcccgtcaaaggcctttttctaaagctaaaagaaaaaaaaagatcccagtttcactcatcaacactgaaggtattgatccttcagcccctgaggtagtcaggcaggcctggggttcagaggccccaaggtattcacttcttgagtcagcacctcatctgcttttccatgtgccttacaattatgaggaacctcatagaactagagtacctcataattgtaaggcacatggaaacactgaatttcaggacactacgacaccagcagctgaatgattagaacaggagaacactggttgccagcagtatggaaagaaaggttggggatctccaggaaacagaaagaaggagcaaaagaatcacatttgaaaatcctggtgagcaattaaggaaaaaragaagtctcagatctctttttccaaactaaagtccacatggtgtttaaaacaaaatctaccacgatgatgttccttactctaggcttcggtttgttatacagtattattagtttgaagttggctaaaagtagttaaaatcgtcaaaaggcttagccaaaacttagccaagttttgctgatttttgttcattttataaaaagctgatcaacaggactcaattcattaagataaattaaggaccaatcccttttaaacaatctatgacaaagacacaagtgaatttgatgaacataaggagggaatctttgtggaaaggataacaaaaatttaagaaaggtggaaggaaaaagtcaaggaaggacagaaaagggaaagggtgtagataatcagtaatttaccagctttaccagagcacaaccagcgcctcgaaaagccagtctcctcattatgtctgaaagccaagtgaagccagtgggagaaggaagggctttagaagtgctgattcagtgttagtatattcaaaactgaaaaagaagaacaaggcagagaagggggaaatagaaaagaagggtcagaaggagtaaaaatgagtacgaatagatagaaaacattcaaatagaactgctaaagaaagataaagagaactggagaaaacaggcatatcagttctcttgtacctatcaaacaaactgctgcaaaggctcaggcactaacagtacctgacagttcttccattttaaaaccaaatgctttcatatgtttaaagatgtctcattgaggttcccctttactcacattaggaatgactgtcarttccaggaatgaggcatgcctgcccaactgccccctagtcaataagagcagagttcaatcacagagctggaatggagagtgaatacatgtgggaggctcacatgtgacaccaagtgttggcaagctggaacaaaccaagaatggctcatgtgagcaaaaggtctggaaaacaccctcccccacaaaaaaaaaattcagagaaagaacatttatttccaaaagtcctatctgcattggagacaccatataaaaatttgacaaggttaaaaaaaaaaaaaaaaagggccaaccattttggcaggagttcaaaattacttttataaataatccactgaaaatcaaatgacaaaaaaatacattatcagcatgtgtatgtcgttcggatgacacaatatcccaatatccttgaatcattaatttactttggtaagataagaaaaagtttcaacttaaggataattttcaagtattttcttatccatgggacacattttaaaatgtattttgaaagtctgacaagaagggcaatgttataaggtgggagaaacaacaggacctttgctcctaagaccagaataggagtcctaagtcttccacctctgattatcagcttgatgttgtctgattagttgatgtaacctctcagatctgtttcatctctaaaataagaacgtaatgccgggagtggtgggtcatgcctgtaatcccagcactttggaaggccgaggccagtgcatcacttggagttcgagaccagactggccaacgtggtgaaaccctgtctctactaaagaaaaatacaaaaatttagctgggtgcggtggctcatgtctgtaatcccagcgctttgggaggctaaggcggatggatcacctgaggtcaggagatcaagaccatcctggctaacacggtgaaaccccgtctccactaaaaatacaaaaaaaattggctgggcttggtggcacgcacctgtaatcccagctacttgggagactgaggcaggagaatcgcttgaacccgggaggcggaggttgcagtgagccgagatggcaccactgcactccaccctggacgtcagagcaagactctgtctcaaaaaaataataaaaaaaaaaattagctggctgaggcagtgcatgcctgtaaacccagttacttgggaggctgaagcatgagaattgcttgaacccaggaggcagaggttgcagcaagccgagatcataccactgcactccagtctgggtgacagagcgagaccgtctcaagaaaaaaaaaaaaacaacataaagtgaaatcacttctgcatgttccccaggcacaggaacagcatattcatttttgtagacctgtcttacaggatagtatttggtataggttatgtgctcagtttatcttttaataaatgtattaaaagtgcacttagggccaggcacagtggctcatgcctgtaatcccagcaatttaggaggctgaggtgggcagatcacctgaggtcaggagttcaagaccagcctggccaacacggtgaaaccccgtctctatcaaaaatacaaaaaattatctaggcaaggtggtggcatgcacctgtaatcccaggcactcgagagggtgaggcacgagaattgcttgaaccagagaggcagagattgcagtgagctgggattgcgccactgcactccaggctgggggacagagtaagactgtctccaaaaaaaacaaaaaaaaagtgcacttgagaccttcaaaaaaaaaagtttatttgtatagtttaaaagtcctcagccaggcacaggggctcatatctgtagtcccagcacttggagaggctgaggcaggatgaccgcttgaggcagagagttcaagaccagactggataacatagattgatcttttctctacaaaaattaaaattagctgggtgtggtgctgcacatcagtaatcccagctacttgggatgctgaggtgagaggactgcttgagcctaggagcacaaggcttcagtgagccatgatcactttactgaactccagcctgggcaacaaagtcagaccttgtctcaaaaaaaaaaaaaaaaaaaaaaaaaaaatgcctgtaagcatcccttcagcaattttgtctttccatgaagaggaaagacagattccagagttcaatgccaagttttaaaatggccttgattacagttacaagttcaaaagtctaacaatcaataatttatagtggacagttaagaatacttaataatgtgcaactgggagaatatcgacttactatagacaaacagtgtatttcgaccgtttatgaactttagccctctcctgtatttctagtaatatttagcaatacaatacatgtttaaaacaaaatcttggaaaacaggactcaaaggaaaaaaaacacctataaacctacttccaagaaaaaaaccactcttaacgttgtcattcggtttttggtatttatgccttagttacctattattttttaccaaaatgttaacaaaccacatatattattctacagcctgtgttttagtgaaggttcttccaagtcaacattcttcctcatgatgtttgatgacttgatagtaatctatcatatagatacaccacaatttacttatcttgggaattttggtaggatattaacatttgaggtattttgtacattcccaaagccaaagaaagcggtcaaggcccttccattcatccacacataaactctttattgttttaatttgaaacacctcttcaaaacatattttccaatcttccattttggagctcaaaatcaaatatgggcgacctgtaagtaataaagcaaaaattatgctactcttttatgtgcatgagtccaatttgcactttttggggaaaagcacatagccaaatggagaaaaaaataatacctaaaattatttgtcaagaatcctgtgttggaaagtaagttaattaaaacaattcaccccaacatacgcttctataattattgtaagaatttctatatccactataccgtgtacttatttttcagggctttttctatatttttgcaactctttcttcccctttaaattaaaacttattataataacaaaactgtgcttccccaaaccaagaaatatacacagttcccaaaatcccggattctttgtggtgttgagaagctgaaatatctggcctctactataaatacaagtcccattgattaaaatacccggaaaaaatacggaaagaaaatcactaagagtttgtgtcgaaccgtcaagaaacmacaacaaaaaaaagaggccctgagcaacggaggaaatgaaggactttcccgacctgtcactggtattggggactgagggaaacgttgacagctttgaagctgccccgcgacgagcgggaaagaggagcgcggggagtttccgacccgtagtgcgcctttgtccctgccggcaggtgcgacaaggctactgggcccatccggaggccagccgccgcgccccgcccaaccccgcgcgcccggcccgacccgcgcgtccccacggccggggcggggcttccgccgcggctcccgcccgcccgggccacacaaaggcccggcagctgaccagggggagcggccccacccgccctgggcccggccttacccagccgctccgccgcctgcagccccggccgcggtcaccgaccgccgcgccycgccccgtggccgccacggctgctgctattgctcctccggccgcggccgctgccgtcgcttcggcacccgccgccctcacctcccttacccctcccggtgccgccgcaaaaccagtcccgcggccgccaagcgatccctgctccgcgcgacactgcgtgcccgcgcacgcagagaggcggtgacgcactttacggcggcagcgtaagtgcgtgacgctcgtcagtggcttcagttcacacgtggcgccagcggargcaggttgmtgtgtttgtgcttccttctacagccaatatgaaaaggcctagtaagtggggtcgggaggcgggcgtggagggacccacgtctggaagttgctgcagccaccacgacgctcttctacggctacggctttgtctctgctggtatgggggtgggagcctacgcgtaggccttggccctatttcctggtagaaccgagagttggaagtccctacggcgatcatgttaaccgcgcgggctcattctgcggaacgaagccgggcagagggtggggaagactaggctagattttcgtaaggaagcagcgtctgagccaggtttgaggcccaatattttctttccgtggccacgtgcagactggcccaggtgagagctgagaatcgcctcccagactcagtgttcctctcctgcctwatgattcgtgctgtttgacacgaagtggttgtcgttttgtgtctcatacgctgttgtgtatgatcccattctaatattgtgagggtaagtgcagggaattttgactccattctggatctactgaatttaattctctgggatttgaaagtagcacgtatgtttgcattaggcatttcgcattagacttaacgttaggtttggtagccaataacacaagaaaaggatataactccatagtgcgttaacccagaactaatcatttgggttaacagatttgtgatgtgtttctttgtagagttaaagaaagcaagtaaacgcatgacctgccataagcggtataaaatccaaaaaaaggtaagtgtagtgcttgagagagctgtaccaaacacattgctaaactgattttgccctgttcctttgcgggaaagtctgggttaatgtgatttggttttgggaaatggcattggatagactgaccatgggcacaagctcttaggcatcaggagtgcagctgtgagaaagtgcagtgatttggtgataagtctctaaatttgttcagcatgttaatctctgcatagagagccttctagttacaatttcttgctgttttatacttacatatgcattactttgtaagattccaattaaagctccattttcctaggacattttataggcataactaaattgcagccagattggtttctcacttgaattctgcttaagtataaagatatttttgtaagcagacaaaatctctttattttaataggttcgagaacatcatcgaaaattaagaaaggaggctaaaaagcrgggtcacaagaagcctaggaaagacccaggagttccaaacagtgctccctttaaggaggctcttcttagggaagctgagctaaggaaacagagggtaagttatgttagccagaattttcattgagtggtgtagtgtgttatgtgtgatatttttcagagtaaggtaacaacactagtcactggttcacctatttcccttatggctctgacagcttgaagaactaaaacagcagcagaaacttgacaggcagaaggaactagaaaagaaaagaaaacttgaaactaatcctgatattaagccatcaaatgtggaacctatggaaaaggtatgattaggtctctttatgaatgagagatcaggggttttgattttggtttttttgcttgggcctgagtgcagtggcacaatcacaactcactgcaacctggaccacccaggctcaagcagtcttaccacctcagtctccaagtagctgggactacaraagcacaccatcacgcctggctaattttttttagcagacacgggctttcactatattgccaaggctggtctcaagtgatccacccaactcagcctcccgaagtttctggtattacaggtgtgggctgttgtgcctggctgagagatgagttctgatgcagaaataaaagcacatccacaggctgctgagcttcttgggaggaagacaactgagttcagactccatcttacctatttaacaactgcaagggctgctactcagctgtggaaaatggagttagaggttacagttgctctacttctaattttgtgttatttccccctttatcctctaggagtttgggctttgcaaaactgagaacaaagccaagtcgggcaaacagaattcaaagaagctgtactgccaagaacttaaaaaggtatcttagcctaggtcagtgtctgacagtagtaatgaggtttaaaagactcaagtcatttttttttaaccttttaagatgaagggtgcatgtgcaggtttgttatatgggtaaacttgcgtcatmggggtttgctgtacagattatttcatcacccaggtattaagcctagtacgacattagttatctttcctgatcctctccctcctcccaccttttcaccaacaaatcatttcgtgactcgactctagcttatgctgtttaatgcctttcctgctatgtttacctgacggaaatagtttctttggttctaaatatttgcacaaaactggttctgcctgtaagcatgattyacaacattaaaaaaaaacgttgacatagtgttgagattgagaaaggtacattggagtaagcagtgtcaggctaaaggtctctaaagtactctgttgaaacctaagtgaaggaggacaacttggtgtagttgctctccagcactcccatccccaacatccattttcccaagctcactcccccatggatagaacctgactgcccctcagcagcttttggcaaggccagaaggacctatcaaactatataattcactatgggaggattcagacagggatatttgcatttttgaaatccatcttgatcagagactgctgagcaagcctatgttttactttcctgtgtgagaaatgatgagggtcaacattcttcataccaaagtgaagacatgagatccaactctgagctcaccctgttgctaaatggataatgccagtactctcttgtggaaggtattaccagaacaagggatgtagttctgatcattttctccttgataatgtagttctggtcattttttccttgataggtgattgaagcctccgatgttgtcctagaggtgttggatgccagagatcctcttggttgcagatgtcctcaggtagaagaggccattgtccagagtggacagaaaaagctggtacttatattaaataaatcaggtgagtaaagagggtaccctttgtcttctgtgtacatgggtgaggtacgaggaaacagtctgatagtcactgaagactgattagatccaactctgatctcagcaaagccagagtacgtgcactttgccagagacagtgctaggcagtggggagccaggtgacttttacaactgactcaactggtttctactattcttttgccattcagtatttaccatcttttaaataaagagtgtaagctgctatacccagcttattgtgtagtatatttcatctaggaagtgatgacagtgtgacaaattccccacacctacacaatgtcgggtattagttcaagagtgaaataaatyggaacgtatgtgacaaaatatttaaatgaaatgcataattatgcatctgagtttgagcagcaggaaaaagaaaacccagaacagagaattacaaagcagaaaatgggaatgagatctaaaattgttgttggggttaagaaacaattggctgcttgggaggctgaagtgggcacatcacttgaggccaggagttcgagaaaagcctggccaacacggcgaaaccccatctctactaaaatacaaatattagccgggcatgatgatgggcacttgtagtcccagctactcggaaggctgaggcaggagaattgcttgaacccgggaggcggaggttgcagtgagccgatactgtgccactgcactccagcctgggcaacaacacttcgtctcaaaaatgaagaaacaattggctgctagctaaaggtaaattctggaaacatagctctagggttagtagggttgtaatccagacgttgagtctgtcctgaagttttcaagtgagcaatacaaggggaattgaaatagagaagtgcagatgctgagctctgttaagatacgggcagtatggtaggggagcttaccctgccctgattttctagttaaatccttttgaaaggactgggaaaatgtaaaccagagtaaaatctatagttgccagattttgcaaatgcatctcaacaaaatagccacattggagcaaatgtctttttctttttttctttttgagatggaggcttgctgtgtcacccaggctggagtgcagtggcgccatctcagctcactgcaagctccacctcccgggttcacgccgttctcctgcctcagcctcccgagtagctgggactacaggtgcccaccaccacgcccagctaatttttttgtatttttagtagagacggggttttatcgtgttagccaggatggtcttgatctcctgaactcgtgatccgcctgtctcggcctcccaaagtgctgggattacaggcgtgagccaccgtgcctggccgcaaatgtcttatttctaattgctatcagatctggtaccaaaggagaatttggagagctggctaaattatttgaagaaagaattgccaacagtggtgttcagagcctcaacaaaaccaaaggataaagggaagawaaccaaggtatcctttattagtggtaagaaatgtgattctttcagattttggttgaaatatgatgagtgtacaaaatcttgatttaagtgaatgaaaaattacaagatccaactctgatttcagccagagatcatctgaaaggcaatgtagttatcttaagagctgggctctggagcctgattgcttggggtttgttgaaatttatcaggtaagttgccagaataattcaactatttggaattttagcgtgtgaaggcaaagaagaatgctgctccattcagaagtgaagtctgctttgggaaagagggcctttggaaacttcttggaggttttcaggaaacttgcagcaaagccattcgggttggagtaattggtgagtttcagttcattactttttactttttaagtgttgaaatagttaagaagtttagccagctctccaagtgcccaagcagcagtgtatggagttgttgtcaagtaaaaggctcactcaaatactagcttcttgcttataccttactgaaagcacataaccacacacaatttaaagaaaaaaacttacacaactgctgccagattcaggttttttgttgggactgattactgtaggaagctggtttctaaaagttcttggtttgtttgaatttatagtattttcctgcctttgcattacttgtgcaagaaatgaagaaactaaaattggtcttagtattgaagtgaagacactgagatccaactctgatcttgccctaaacatyagggaaatggaaaattaggcagtgaaaatttcataagtgccaacatataatgctttttatatctggatttcccatttatttgtaggtttcccaaatgtggggaaaagcagcattatcaatagcttaaaacaagaacagatgtgtaatgttggtgtatccatggggcttacaaggtaaatggaggtgtccataattgtaatattatagtgacacactattttattttggttatctcaaggaaggtgattttttttttttttttttttgagacagtttcactcttgttcccaggctggagkgcaatggcgcaatctcggctcactgcaacctccacctctcaggttcaagtgattctcctgcctcagcctccagagtagctgggattacaggcatgtgcccccacgcccggctaattttgtatttttaatagagacgggtttctccatgttggttaggctggtctcaaactcctgacttcagctgatctgmccgcctcggcctcccaaagtgctggggttacaggccaagccaccgcgcccggcctatttttattttttaaagcttttggtgaaagcagagatttaagccagtgctagaactgattggagtgggacagctgcccacaatttagtttgaaagacaagttcagcagatagattgagagagaggaaagctccctcagaggaagtgatgtttgaacctggccttgagaaattaatagaaatttgccagatagaagtctgccaccacacctggctagtttttgtatttttaatagagatggggtttcactgttggccaggctagcctcaaactcctggccttaagtcatccacccgcctaggcctcacaaagtgttgggattacacttgtgttgggtggcatgagccactgtgcctggccaacttttagattttttttttttgggagatggagtctgtctcccaggctggagtacagtggtgctatcttggctcactgcaacctcagcctcctgagtagctgggatcaaaggcacccggctaatttttgtatttttagtagagacagggctttcatcatgttggccaggctggtctcaaactcctgacctcaggtgatccacccacctcggcctcccaaagtgctgggattacaggcgtgagccaccgcgcccagccagaaggtggcatatttatagcaaaggaaatagcatgtgttttggttgatgtaaatatataagytataacatgtagtgttctctttagaacagtcgggtatgctgttacagttttagataaatgtgaagcaaatgatgataaactggatctgactgactgtgctgagtctgttcaatccaaccctgagcttcatgttctgtctcttaacctccaaatagaccaatgcccccatcaattccatcgctcttctttcaggagcatgcaagttgtccccttggacaaacagatcacaatcatagatagtccgagcttcatcgtatctccacttaattcctcctctgcgcttgctctgcgaagtccagcaagtattgaagtagtaaaaccgatggaggctgccagtgccatcctttcccaggctgatgctcgacaggtaaaaggaccccttctcatgagctccttggagccatcttctttcatcataagcattttgagtagaaaaatcttggaagtgttttaaagtactggcatgtcagatgaaggacagctcctttgtttggttttttttttaaggtagtactgaaatatactgtcccaggctacaggaattctctggaattttttactrtgcttgctcagagaagasgtatgcaccaaaaaggtggaatcccaaatgttgaaggtgctgccaaactgctgtggtctgagtggacagggtaagctttcttttctgttsgcattttggtgaccactagaataaaccttcttttgacacatcttatttttaatatcagtgcctcattagcttactattgccatccccctacatcttggactcctcctccatattttaatgagagtattgtggtagacatgaaaagyggcttcaatctggaagaactggaaaagaacaatgcacagagcataagaggtgagaattgtgtgtcgctgctgtcttcatcagctgacaggccagtggagctcttacctgtttacatgggcttgctttctttcccagccatcaagggccctcatttggccaatascatccttttccagtcttccggtctgacaaatggaataatagaagaaaaggacatacatgargaattgccaaaacggaaagaaaggaagcaggaggagagggaggatgacaaagacagtgaccaggaaactgttgatgaagaagttgatgtaagtgtgtcctccatgagttaaaactgaagtgagttttctagcattataatacataatggaaggaactgaagataggaaatatttgaggcttgtgatccattagccttaattttgcacatcccgttatatgtacctccaaagagttaatttttcaggtacataactacttggattaaatgagcagacaagggctactaatccagcactatttttctttgtcacacaggaaaacagctcaggcatgtttgctgcagaagagacaggggaggcactgtctgargagactacagcaggtgaggcaggcaaaaggggttctaacgaagcagcatggtatagaatcacttttactttttgaaaatctctttattttcctgcaatataggtgaacagtctacaaggtcttttatcttggataaaatcattgaagaggatgatgcttatgacttcagtacagattatgtgtaacagaacaatggctttttatgattttttttttaacattttaagcagactgctaaactgttctctgtataagttatggtatgcatgagctgtgtaaattttgtgaatatgtattatattaaaaccaggcaacttggaatccctaaattctgtaaaaagacaattcatctcattgtgagtggaagtagttatctggaataaaaaaagaagatacctattgaaaaatgtaagttttatttacagatcaggccacaggttacaaaattaaaaccaacagcagttttgaattatctgtaccagctagctgaactagccatatcagttcttctttccagtcattcagcattgtagtaagaaaacacttggtaaggcagatggagacatatttatagtctatagtctgtctgggaagctgactgccagacagggcagtttgtcatctttacctagctgacacatctttttccatggcttgctaccgataggcattgaagcctagcaactgttacttcccaygcatgctatcttccaggacttcctgagaaatgcttgcttacagttcaaattctgtttcactttatgtttgagatctcggtatatcttcggattaggttgaatttgcctgttgggtctggaatataccatttttcccaaacatcagtatatgaagcagtccttccccatggcttcaaatgtccattccaatggagtaacttggcagcctttacaaactgaggtgaatatcgttttccagcactggaaccttacatttgagacaaaaatagccacatcgttgcgccatgtgaaattgtgcagaaaacttacttaagggaaacaaagaatataccccatccctgaggatagttctttagataccaattctttactagcttatgccactggttaattctacttaccaaggtggcggacattccacataggatcgatggtagagtgctgttgataaaatacgataagcagaggaggtgttgtgatgctaccagccagggttctgctatacagtccctctcttggtgggacagaaaacaaatgtttgttagtgaaaagtactgactaactcctgttagtcaagactctaggaattgaaatacaacagtttttcacagctaggccagttacatacttactctacattgagtttcatccatttttccagttggttagttatattctgtcgtttccattccgtcaggtttgcaacaaaaactccaggattaaatgagcaagtgctggctttcatggaaagcttacgaattctttcctttttatagtcaagatagccaatgtaattgtactaaaaacacaaataggatatatgtacttactgcttcaaacaaaatagatacaattttatagccagtagagagaagagctgttaaactgacttcttcagattagaaaataaatatttgaaattccaagttagaataggaacctagatgttgacataataaaccagatgttcaagaacaattaggctgtcaagtccatgaagaagtctacagaaaagcaggcttgagttttgggatgaaatgattggggagtgtaaattgcagcaaaagagttccctgaatttgcaacctcttcccattaaacaatattgtaggaagaggggtgtttggtaagcaatttacctggtttcctgctccacggatgacaactttagtagaggctgaatcacaatcttctgaaaatgcagctgcatgtcctggcttcagtgctgtattgtaaagggcaagaatatcacctgaaatagacaagatgttaagatttacatttccgttgccttgagagttccctgttactcccacttctccctatggtgaccttttatagaagaccataaataaaccactacagcccactgtagcccattgttttatttagcaattgtacccaatctgggtggagaacagcactcatggtgacatttttgataccttgcacaattacatcatcatccatgtatatggccttctttgcgctgggaaccagaattggcaagtagaaccttgcaaaggttaactggaaaaggaaagaataattggcataggataccgcactagctgtgcttttatttacacagaaactcctaggatgctttcagtacccattcaggagaagaaaggactcttagaaccacccaggcttggtccccaggaaactacttgcactatacccacagatacccaggtattccattatttcctaatactgccaagtgcaaagaaggatgcatggaactcacaggtttcatggattccccctggtcaggatcctcctttacttttccttccaaaagtttagggtcaaaattgacaattttgtatctgatgcttttcagggaatcactgttgagccaggacctgatgaagataaaacactacattttagtttcaaataatgtctccaaaccaatgagggaataatgcaaaagaaaccctatggaccaaataggtgttttcaagctccttttatctctgagctttggtttcctcgtctgaagtgagggtaattcccaccaaagtccctccctgaattaagattgtatggtaattatcttctaacactaaaactactctagaaaaactatagaattaagaacatttcatcaccacctggactatccaactcttaactgtggtgaccctaattccaccactcaagtctgaggcactacctgtaagaaaaaactgtttgctaaaggagtactgcacattttttctaggtcagtttcaaatcagtgttttgtggctacttagtgttatttctgtagtctatttttatacagcttctgtttctgtattttaaatgcgttcagaatttacagctttaaaaactaaatatgaaccatgcagagggccacaaggaccaaaatgtttcagaaatttgacaactggttaatttgttagaccaacaaatttggagtaagttttataagtcttattcattttcaaaatggattagactatccaagtttccccagatcactctgggccaggatttggatcaggatctgtgatcagcatcacaacactaccttgccattgttgctaagtcccttcccactctagaccagaactgctccgagcatgtccatgaaataaggaacttgtgacttgtaaatcaacatttactgctcccttcactgagaaagtattattatcaaaacaccatcaggtggggttaacagttcagagtgacagctgacttacttcctggcatgagctccttgtatcacttctcctattatggggatatgctcataatacagtcctaaaaaaaatatgtcatttgtacagtttatcactggtacaatttcaattgtataaaacaacatacaaaccacagaaaaacagatcctggattggcagctggcctgctctaaatcatcctctagaagcagaatcacataagcagagctcaccggagatggtctgctgtattgttgagagtaacaatgtagaaaatcacattggagcgagtgttgtgctgaatgctgtttatagctgcaatggcccccccaagcctgtcttcagatgcagcgatgaccacaggaatctcctcttgtctcccatctactgcatgtcggagagcatttgggacaaagtctataggttgaggccctacaattcctgaatctgaaaacacaaggaaggcactgtgattacaatctcatgggcttttgatatagagtccaagacatggaaaaagggaaggtaaggattatggtactgatctacctcattctcccccattaaactgaagcatatagccctgaaactttccctgtatgtaaataagcttttggaaaagtggaggaagcattttttaaaatacactgacagcactttggtacactactggtaggaaaataacagaacctgttagaatgtattatggcaatttgtatcaagagtttcctaaggacaaaatctgaaatataatcaaaagaaagaattttatttaaattgtgaaaacttagcagcaaactaaatcaatgtttttcaagtcacgaatcacaagtaggcatgaaaccaattgagtgagtcacaatcaatttatacagaaaaagtttctggattgcaatagaaaactgaaatagaggccgggcatggtaggtcacgcctgtaatcccagcactttgggaggctgaggcgggtggatcacttgaggtcaggaatttgagaccagcctgaccaacatggtgaaacctcatctctactaaaaatacaaaatgagccaggtgtagtggtgaacacctgtaatcccagctacttgggagactgaggcaggagaatcgcttgaactcgggaggtggaggttgcagtgagccaagactgtaccactgcactccagcctgggcagcaataggaaaactccatctcaaaaaaaaaaaaagaaaactgaattagaataccaaagaaaacatagtgtatcacacaaggaaactgcaattactgtcctgtatgcattcttgcctttcatttttttttttttattcctcattgaaccctggtatttactatgtgccaggcaatatctaggcactggggttacagccatgaataaaacatccctaactttctgaggatagacagccaataagcaaatacacatgtatgtacatgtgctacatgtaatgtatttcctattgtagggctgccatcaaaaagtctgaaagctgttgtagcaaaagatgttatcctgtggaaacaaattaatagacattaagattatgtatgaagagtttctaccatcacagtgacatgatatacagaaaaacatgtcatgtacagtttatatatagtacaatctcaactgtacagaaaaaaagatgtgtaggaaaaaactggaaggtactaagccaaaattgtaaatgaaatcattcaaccaactaatatttattgaacagctagtatcagccatcatccataggcacagaagataaaacagtacacaaattgccttcatggagcttaaatactgttgtctctttttttttttcttgagacgaagactcactctgtcaccaggctggagtgcagtggcgtgatcttggctcactgcaacctccgcctcctgggttcaagcgattctcctgcctcagcctcccgagtagctgggactacaggcgcataccaccacgcccagctaatttttgtatttttagtagagacggggtttcaccatgttggccaggctggtcttgtactcctgacctcgtgatctgcccacctcagcctcccaaagtgctgagatggtctcgatctctgaccttgtgagacgcccaccttggcctaccaaagttttgggattacaggcatgagccactgctcccggccgctgttctcttttttataaactttcctaccaggaacatgcattactttatatgtatcatacatatatacacgtgataaaacatgctatcagagcactccgtgaaagtcaggggaaagctattacagtctctcactctggtcagctatggtgggtggcaatccaaaaatgatttttgacaaacactcaagcctcaaacatttctcagtaccaagggagaacagtatgaacgactaattcaatatactgtgcgatatattatacaacacagtgatttttaaaaatcacttgacaaacttttattgctacagtcccactgatgcagctgcacagctgaaggaaagtaactagactgacactctagtgactagagcaggcatcaaacaccaaggacactggtatgccctcactttctgaagccctgtcctgctgacatgtgaacagatggcagccctcagaggctctcctaaggcctctgatttggtgaaaaggaatattctgtcagatcaaacccttaacaaacaactgctagtactaccggaagaagaacaacttaggatgtgtgacacagagaataccaggtccgcaacagattctaaggcattattaataagtgctcgcatacctgtaacctcattccttaacaaactgctcaagctgaggaagttatggtgcaaaaccagtaagaagagagcaacagccaggaccaagatgatgatgtttactgaaatagatagggaaaacctatgttatacctctttatctttgaccaggtataaaaacaacttaacttgtagaaagagcatacctttacggaatgacatctttttcttctgtcatataaatattagtttttaaccctacaaaacaaaaacaagcccccaaagtcagtaagcacatgagaagggacatcaaaatgccctaacactttttttttttttttaattcaggaagaaacaagaggcatatacagtattccgccagaaactcattttgaattcacagttcccaagaacccaatttgggatctgaaatttttgtggtactcattaataaaaaacttaaaaataagttggagaaacagccttagccttgtacattatacatcacaagatgaaaagcaaaagaaacatttaagaattaagtttcagccaggcagggtctggcctataatcccagcactttgggaggccgagtggggtggatcatgaggtcaggagttcaagaccagcctggccaagatggtgaaacctcgtctctactaaaaactgcaaaaaaattagccaggtgcagtggcaggggcctgtaatcccagctgctcaggaggctgaggcaggagaatcgcttgaacctgggcaacagaggttgcagtgagccgagatcatgccattgcactccagcctgggcgacagagtgagactctgtctttaaaataaaaaattacataacataattaagtttctacttaaaattcctaaagtagacatggattcacgttgtctatgaccaagtaacctgaggtcttagcctca

SEQ ID NO: 93767 - DNA, 23587 bp, Homo sapiens
ttcctgtatggtttccaccttggataccatgcttagaaaagcccttcctctaagattacagaaatattttttcctactacatactgattgattttctttttgtttctcaaataggtacgtttgcgggagcacatgggtgaaaagtatacaacttacagtgtgaaagctcgccagttgaaattttttgaagaaaacatgaatttttgagcatttgtcctaatctgctgccagaattaaagacctatttttagaggattttggcttaaaaagcaagggcaaacagtcatttggaagccactcaccactgttttatatctcttttttatatctctttggcgtttccctacagaaaagaaattggacagaacagaataatatgaagcaggatcacaaaagaaaaaaaactttggctttcatattctctttgtgaggacaaatctgttgtttgtttgattactgtttactgagccttaatccaccaagtttatatttagaattttatttttttaaggtactaattaacttaaacacagagctataaaatgctggattgaaaattttatattgtaatgtagagataaaagcagtaggagaaacaaatgacataatatgtcgtcataattcctgctattgttaataaccttaaggagtagttgataaattataaaattttaaaaagtcaattcagttctagaaatagatttaaagaatatgaagttctatctagtacttgagcagctgtatttcttttctacacattgatggacttttaatattttattctcatttaatataaacctcatctagggtatatacaaattaaaactgagacacattggctttgtaaatcagtatgtttttacataatggttttgttagatttatttttccatcagtgaaaacatttcttaagcacaaatttcatttccatttaagcaatttgtaagcaaagtccaggtccatttagtttttggatatatttaatgtttgtctcctgaagtttgtcttcatgtactgtaagatattagttgtctttccatgttttaaatgtatgattatatagcacatattttattagttgtttaataagaggtaatacccatctaggaaagaaattttatgaagttaaatacaagtcttgaatagtacattttcacttctgtattcgagggactctaaaaataaatattgctccagaaatgttttcaggtgttttttttttgagacagagtttcactctgtcagtcaggctggagtgcagtggcatgatctcaactcactgcaacctccacttctggggctcaagtggtattcctgcctgagcctccctagtagctgagaccacaggcgtgtgccaccacacctggctagtttttgtattttttgtagagacagggttacaccacattgcccaggctgatctcagaactcctgggctcaagcaatccactcacctcagcctcccaaagtgccaggattacaggaatgagccactgtgcccagccctgttttcagtttctataactaaaaatatatctatctttgaaaattacacacacacacaaatactctaatgaaatgttccctttacagccacttaacaattttttttttttttaagacacagtcttgctctgtcacccaggctgaagtgcagtggcccaatctcagatcactgcaagctccgcctcccaggttcactccattctcctacctcatcctctcgagtagctgggactacagttgcccgccaccatgcccggctaatttttttgtatttttttagtagagacagggtttcaccgtgttagccaggatggtctcaatctcctgacctcgtgatctgcccgcctcggcctcccaaagtgctgggattacaggcgtgagccaccgcgcccggcacacttaacagatttttatttagagtttactgtgtgccaggttctctgccaggagctggggatatagtggtgaataaaacaatacttcctgcccttttacagtgctcacagcctggtttctgataactcttattttcactttgaagggtttgctagaactcaacttgcaaaaccatcaagtcccaatgcccagttgggaacaaatctttggcaaacttggtatccttgagctattcacctttccgtgcatgttttggaaatccacatcgttctggagagtcatcagttttacttaatttttctaatgtattggtataaagtaggtattttattagaattaaaggaatctcacccatatcttttttttttttttttttttttgagacagggtcttgctctgtcacccagcctggagtgcagtgaggtgatcatagctcactgcagccttgacctcctgggcttaagtgatcctcccacctcagcccctcaagtagctaggaccacaggcatgcaccaccacacctggctaatttttaaaattttttgtggagaggaagtctgtgttgcccaggctggtctcaaactgcattcaagcagtcctcctgcatcggcctctgaaagtgctgggattataggcatgaaccaccacacctgacttcccccatactttcttattaattaccatactgtatatttttattttgtttaaacatcttttcttcccacttttatcgtttttacttgagtgcttaattcatcttcctaaattaatttaaaaactcatctttaagactgtgaattttcttccgaatatacctttggccacagttcagagactttgatgtgttactcttttggcattggttctaaaatgtcaatcattcttttttttttttttttgagatggagtcttcttgttgcccaggctggagtacagtggtgcgatcttggctcactgcagcctacgcctcctgggttcaagttcccctccctcagcctcccgagtagctgggattacaggcacacaccaccatgcctggctgattttcgttatttttagtagagatggagtttcaccatgttggccaggctggtcttgaactcctgacctcaggtgatctgcctgccttggcctccctaaatgctgggattacaggcttgaggcaccatgcctggcctaaagtgtcagtaattctgatttcggttttctcttttagaagttttgatttccacagacttacaaagctaaggaagttttatgtccttgctctggctacactgcagtgttactgaatatcacctgcacaacctttactgcttgcagttttttttttcctgttgctttgtacatgatccgttattcaaatggccttataggcattcaataaaggtgaaatgttaaatacaaaatcacttgtctattaaattttattcaaggttctatataagatctgataaatggaactttgtgatggaaatgttttatatggtagccactagtcacatatagctattgaacctttgaatcatggctagttttagagttttatattttaattttaattaaatagacgtgtctagtggcaccatattgtacaatgcagttctcattcaataaatcttaagtacttaacaatgcatcgtgtactcttctatgtactgggtagacagcagtgagcaaaacaaagtccccgttctcatggaactaatgttctaatgacaactattaattacataccatgaaatgtctcaaactcctgggctcaagtcatcctcctgccttagcctcctcaagtgctgggattataggtgagagccactgcacctggccagaagcacgaacttctaacttaggcttttattaattatcttccttgcagaataatcaacagaagaccctttagacaaagaacttgcactatgaggtttaattggaaacattaaaatggttaactcataatgaattataaaactttgatagttacattgtactatcatttatgaggcatttatttttcattatttacacctgaaagaaacttcatacttgtgtgttctgttccccatctcagagcaagattatgaagagaaggtctaaactacttatataaatcaaaacccaactgggctagaaatgaagtataaagagaactaaatctatacacagctgtgccataagagcattaggtggttttagctcttatctggggtatgaaagcaatttagctcatctcacagaaacaaaagcaggtgctgaatcatgaaaacctcaattatttttagcatgcctcttaatttttctttcccctggtttcttgtcgtctgtgcttgattcttgaacaggtaaccacttgagaggatgccggcgatagatgggccatggaggaagtgtcagctgggccagaaaagaggaaatgcataaattatagctattaaaagtttaaaaaatcattacgtataatgccaggttcccaaatgactcctatgctgagggaacaaaaaaacaaaaaaaaaaatccatattcctataaaggctctgtgccaccatccatgcaaaatactgtatgatgatgggaacaggctcactgcctatacaaatggctttaagacctaaaagaaaggtgggggccaggcgtggtggctctcgcctgtaatccaagcactctgggaggccaaggtgggcggattgcttgagaccagcctggccaacacagtgaagccctgtctttactaaaaatacaaaaattagctgggtgtggtggtgggctcctgtagtcacagctactcgggaggctgaggcaggaaaatctattaaacccgggaggcagaaggtgcagtgagccgaaatcgccccagtgcactgcagcctgggcaacaagagtgaaactccgtctcaaaaaatttaaataaataaataaataaaaggtgaagggacaacgtgagcaccatgaaaactcctgctggctttgaccttaagattattagccagagtagccgccaaaggaaataagctgtgtccttttatatagttcgcaccatctgacactattttggcattctacttttccaatgatagcaaagggaaacgctgtttggaaggatgagggaaacgttggctttgggtctcactactgagtaggtctaaccaaaccaacccgactcacaaaacccaagctgccactaatacccacaaatttcttaccaaacatgaaaaagcaaatccggccataactatatagacagtccacccgaactgttcagccacgtacccgtagataaatccaactatctagagacaaatgaagtatattaaacacactcaaactgagggttgggagggaggcgggggcggagattaaatgtaaaaccaatacttactgcagaaaaaagaataattccctgaaacatctgttcagctagcttctggcccttgtaatcctggggtgaagcagaggaaaaaaagaattggttccaccgccgagaacatacaattcctgccctgacctcacaactctggcacagggtaaccccaacatcagggtctcccgctctcctaagggcctgggcaagatattaaattctgggcttcccgggaggaactgaaacaccctcacggagaatggacaggagattctcgcggagtagaagagaaggggacccaggaggcaattcgggaaagagggtggacggtaaccatccgggcccggaacagcgcagcaccgggtcggtgctccaacatgggcttcgaagctgccaggcacaagaacggcgtgcagaggtccccgggttgcgccctcaccatctgcgtgggcagcgagctcagatgctccagcatggctggctgaggaggcgggcagctgagcgcgggtggcaggctgcgaggcgagggcgaccgagacttaaggaccgtgaggggtaaggtctggcactgcgcgtcagtagccgggccttctaagcccgggagagcgatggcggcggccccggaagcggaagtctccgacgggccggtacagcccgtgtccccgccccgcgccatcgctaggcgacgtgcgcttttgccgcgccgtgctgcccgcgagggcagctgaggtggtggtggcggccgccttgtcgaggcatcgcgcgcccgtgaagtgttcgccgtcagtgctgttgggtgcctggagccgcgtcccccgtcccgaaaactgtccttgacagtacttgcgcggcccaacggccgccggcgcccccgcgtctccatggcgacggcctttttccctgcgaggaccccggcggcagggctgccccgcggcgcctgcttggcgcgacgctctagcggttaccgctgcgggctggctgggcgtagtggggctgcgcggctgccacggagctagagggcaagtgtgctcggcccagcgtgcagggaacgcgggcggccagacaacgggctgggctccggggcctgcggcgcgggcgctgmgctggcagggcgggtcggggcgcgggctgcatccgcatctcctccatcgcctgcagtaagggcggccgcggcgagcctttgaggggaacgacttgtcggagccctaaccaggggtrtctctgagcctggtgggatccccggagcgtcacatcactttccgatcacttcaaagtgtaaggggggccctactgacccttggaatttaggggggctaccctaggcggcatccacaacagagagaattcccttggagaggggaccctggtgctcggctgtccctctcatccgcgtagaaagtccctcatctgggggctcccgaactcagccctctcacattgtggccggctttactgaccctcacagacccaggctgggccctcccgatagaggccagccaaaggttcactcagcctctctttcaaggctggtgtatctctaaatcttagaccctcctccgttaccgtcagccaggtgggatgcccacgttttggagagaaaccgttctgaggaacccgggcctctgggtcccagctggctctccggcccccaggttatgtattctgggttggccacaaacagtggaattctaggcactcccgggacagggtgggactgctgtcctcattcatgcaaccagcaaatattcacggcaccttgtttgtgccagacagcagaccgaggacacggttgttaccaagaccaggctgttgccttggaagagcccagagcgtgtcaagggagacagccacatcacgccagaaatacatgacagctggattagccctgggagagggaggcccagatgtgggagctcaggggaggtgcagctcaacgtggagtttggaggaggctaccttgacctttgaatgccaagtgggagccagccagatgaaagggtaggagaaagtgtttgtatatcctcagtgccctttcatccttgcacgtggcagagaccaaacagtaaaatgcagacacgtttgacacttttctgacctcagaaggactcaggacgtgtagaaggcagaaagagggatgggcaagagtttattcctgtttccttctcatgctctgtatttcttggtgtgtttgaagagactttctgttgtgtgtataaatagatatatctctgtgtggtctttttttttttttttttttttttttgaggcgaagactcgctctgttgcccaggctggagtgcagtggtgcgatcgcggctcactgcaacctccgcctcctgggttcaagggattgtcctgcctcagccttctgagtagctgggattacaggcatgcgccaccacgcccggctaatttttgtgattttagtggagacggggtttcactrtgttggccagactagtctcaaacgcctgacctcaagtgatccacccrcctcggcctyccaaagtgctgggattacaggcatgagccaccgcgcccggccagtgcggtcttttttttttgtatccacrgttttgtatccttggattcaaccaaccacggactgaaattacagatacagagggctgactgtaatatgccattttacataagggacttgagcatccgtgaatttttgtatacatggggagtcctggagccaatccccgactgatactgaggaccaactgtgttgctaatcaaattgtacacaattatatactcttacgaaaatgtagttaactattacagatccagcgtctgtgtgcaatttcgttttgagaattccttctaaccagatcaggaaagctctcttaccaggaatagccccaggaaagacaatatggattagacgtactccatgataactggcgttttgcatgtaggtaactgtggaagttttaggagcaactggtttctgccttgccagtctacttaagtatgtcagatacttgatagaattgtgtttttcttgtttccagccaagtgtgcctcttgatcccgtaactgctaactggaagtcaagaaactaaaaacattatctcttgtaccattaattaagtgggatttatttgagtgcaagatcgttttctcagtggtggtggaagttgcctcatcgcaggcagatgttggggctttgtccgaacagctcccctctgccagcttctgtagataaggtcagcccataatgtgatagaggcatatgacttagggtatatactgatgtatatacttctctttttttttttttttttttgagacagagtcttactctgttgcccaggctggagtgcagtggcacggtctcagctcactgcaacctccgcctcccgggttcaagggattctcttgcctcagcctctcaaatagctgggattacaggcacctgccaccatgcctggctaattttttgtatttttagtagagatggggtttcaccatcttggacaggctggtctcgaactcctgacctcttgatccacctgccttggcctcccaaagtgctgggattacagacgtgagccacggcgccctgatgtatatgagaagaagttcactgacacgttgtacttcatatatactgctttggaaaggtgtgtgtgggctgggcctggtggctcaggcctgtaatcccagcactttggaaggccgaggcaggtggatcacctgaggtcaggagttcgagaccagcctggccaacatggtgaaaccctctctctattaaaattagctgggcgtggtggcgcacacctgtagtccctgctactcgggaggttgaggcacaagaattgcttgaatctgagaggcagaggttgcagtgagccaagacggcaccactgcactgcagcctggctgacagagccagactctgtctcgaaaaaaaaaaaaaaggaaagaaagaaagatgtgtattttccccctaatttgtaatctggcctgtgatcccatttttaaaaaaaattttttttagatatggggttgggggatggtcatactatgttgctcaggctggtctggaactcctgggctcaggcagcctcccaccccagccacctgaatagttgggattatgggtatcagccacagtgcctggctgatccacagtttttattgctttttattttttatttttttgagacagggtgtcgctttgtcacccaggctggagtgcagtggcatgaatatggcttactgcagccttgacctccctggctcaggggatcctcctgccttagcctcccaaatgcttgggactacagatgcacgtcaccatgcctggctaatttttgtatattttgtagagatgagctttcacaatgttacccaggctggtcttgaactcctcagctcaggtgatctgcccgcgttagccttgttgttttcattttgggattataggcatgagccacagtgcccagcccccaattttttaaacagtttttcaacatatttctcttctttacaaaggccttgagaaattaagtgcctggtaggcacacaattttcccaggatgaagttaattcaaacttactttgtctgtagtccctgctacttgggaggctgaggcaggaggcttgcttgagcctaggagttagaggccagcctgggcaacatggtgagaccctgtctaaaaaaacaaatgaactaacttgcattgcaatacgctatgtttgaaagtgctttgtaaaattaatagccttatgtaagggttgggtactactatgggtgaagatgaagtaagaaagggttaaaaggtaggttcacgatatcttggttggtaaaatgtctttaaggaaacattttatccagagcttgttgaaggaatttattttttaaataaatttagttccacctactatcttgtttccactgaattgttttgaaaaagtgaaggtcagatgagctgaggaggaccaaccaggacattgtgacaattagacaccaccttcttaagagatgaatagctagctaacagagatggtttttgagaatagcaccttaaatgtttttttggccgggcgtggtggctcacgcctgtaatctcagcactttgggaggctgaggtgggcagatcacgaagtcaggagttcgagaccagtctggccaacatggtgaaaccccatctctactaaaaatacaaaaattagctgggcgtggtggcgcacacctgtaatcccaactattgggaaggctgaggcgggagaatcgcttgaatgcgggaggcagaggttgcagtgagctgagatcatgccgctgcactccagcctggacgacagaacaagactccgtttcaaaaaataataaactaaaataaacctttttttttttttgctagttacaatggctagaaatgtactccacacttttgatatcgattggattttgtgaatttttgtagctttttctgtgctgtgggtttgtcaagtgaatttggataatattcttttctctgaggacactcatgttaaaggtgaatgggatacaactctgaacaggcatgtttttactgatgaggctaagacctcaggttacttggtcatagacaacgtgaatccatgtctactttaggaattttaagtagaaacttaattatgttatgtaattttttattttaaagacagagtctcactctgtcgcccaggctggagtgcaatggcatgatctcggctcactgcaacctctgttgcccaggttcaagcgattctcctgcctcagcctcctgagcagctgggattacaggsccctgccactgcacctggctaatttttttgcagtttttagtagagacgaggtttcaccatcttggccaggctggtcttgaactcctgacctcatgatccaccccactcrgcctcccaaagtgctgggattataggccagaccctgcctggctgaaacttaattcttaaatgtttcttttgcttttcatcttgtgatgtataatgtacaaggctaaggctgtttctccaacttatttttaagttttttattaatgagtaccacaaaaatttcagatcccaaattgggttcttgggaactgtgaattcaaaatgagtttctggyggaatactgtatatgcctcttgtttcttcctgaattaaaaaaaaaaaaaaagtgttagggcattttgatgtcccttctcatgtgcttactgactttgrgggcttgtttttgttttgtagggttaaaaactaatatttatatgayagaagaaaaagatgtcattccgtaaaggtatgctctttctacaagttaagttgtttttatacctggtcaaagataaagaggtataacataggttttccctatctatttcagtaaacatcatcatcttggtcctggctgttgctctcttcttactggttttgcaccataacttcctcagcttgagcagtttgttaaggaatgaggttacaggtatgcgagcacttattaataatgccttagaatctgttgcggacctggtattstctgtgtcacacatcctaagttgttcttcttccggtagtactagcagttgtttgttaagggtttgatctgacagaatattccttttcaccaaatcagaggccttaggagagcctctgagggctgccatctgttcacatgtcagcaggacagggcttcagaaagtgagggcataccagtgtccttggtgtttgatgcctgctctagtcactagagtgtcagtctagttactttccttcagctgtgcagctgcatcagtgggactgtagcaataaaagtttgtcaagtgatttttaaaaatcactgtgttgtataatatatcgcacagtatattgaattagtcgttcatactgttctcccttggtactgagaaatgtttgaggcttgagtgtttgtcaaaaatcatttttggattgccacccaccatagctgaccagagtgagagactgtaatagctttcccctgactttcacggagtgctctgatagcatgttttatcacgtgtatatatgtatgatacatataaagtaatgcatgttcctggtaggaaagtttataaaaaagagaacagcggccgggagcagtggctcatgcctgtaatcccaaaactttggtaggccaaggtgggcgtctcacaaggtcagagatcgagaccatctcagcactttgggaggctgaggtgggcagatcacgaggtcaggagtacaagaccagcctggccaacatggtgaaaccccgtctctactaaaaatacaaaaattagctgggcgtggtggtatgcgcctgtagtcccagctactcgggaggctgaggcaggagaatcgcttgaacccaggaggcggaggttgcagtgagccaagatcacgccactgcactccagcctggtgacagagtgagtcttcgtctcaagaaaaaaaaaaagagacaacagtatttaagctccatgaaggcaatttgtgtactgttttatcttctgtgcctatggatgatggctgatactagctgttcaataaatattagttggttgaatgatttcatttacaattttggcttagtaccttccagttttttcctacacatctttttttctgtacagttgagattgtactatatataaactgtacatgacatgtttttctgtatatcatgtcactgtgatggtagaaactcttcatacataatcttaatgtctattaatttgtttccacaggataacatcttttgctacaacagctttcagactttttgatggcagccctacaataggaaatacattacatgtagcacatgtacatacatgtgtatttgcttattggctgtctatcctcagaaagttagggatgttttattcatggctgtaaccccagtgcctagatattgcctggcacatagtaaataccagggttcaatgaggaataaaaaaaaaaaaatgaaaggcaagaatgcatacaggacagtaattgcagtttccttgtgtgatacactatgttttctttggtattctaattcagttttctttttttttttttgagatggagttttcctattgctgcccaggctggagtgcagtggtacagtcttggctcactgcaacctccacctcccgagttcaagcgattctcctgcctcagtctcccaagtagctgggattacaggtgttcaccactacacctggctcattttgtatttttagtagagatgaggtttcaccatgttggtcaggctggtctcaaattcctgacctcaagtgatccacccgcctcagcctcccaaagtgctgggattacaggcgtgaccyaccatgcccggcctctatttcagttttctattgcaatccagaaactttttctgtataaattgattgtgactcactcaattggtttcatgcctacttgtgattcgtgacttgaaaaacattgatttagtttgctgctaagttttcacaatttaaataaaattctttcttttgattatatttcagattttgtccttaggaaactcttgatacaaattgccataatacattctaacaggttctgttattttcctaccagtagtgtaccaaagtgctgtcagtgtattttaaaaaatgcttcctccacttttccaaaagcttatttacatacagggaaagtttcagggctatatgcttcagtttaatgggggagaatgaggtagatcagtaccataatccttaccttccctttttccatgtcttggactctatatcaaaagcccatgagattgtaatcacagtgccttccttgtgttttcagattcaggaattgtrgggcctcaacctatagactttgtcccaaatgctctccgacatgcagtagatgggagacaagaggagattcctgtggtcatcgctgcatctgaagacaggcttgggggggccattgcagctataaacagcattcagcacaacactcgctccaatgtgattttctacattgttactctcaacaatacagcagaccatctccggtgagctctgcttatgtgattctgcttctagaggatgatttagagcaggccagctgccaatccaggatctgtttttctgtggtttgtatgttgttttatacaattgaaattgtaccagtgataaactgtacaaatgacrtattttttttaggactgtattatgagcatatccccataataggagaagtgatacaaggagctcatgccaggaagtaagtcagctgtcactctgaactgttaaccccacctgatgrtgttttgataataatactttctcagtgaagggagcagtaaatgttgatttacaagtcacaagttccttatttcatggacatgctcggagcagttctggtctagagtgggaagggacttagcaacaatggcaaggtagtgttgtgatgctgatcacagatcctgatccaaatcctggcccagagtgatctggggaaacttggatagtctaatccrttttgaaaatgaataagacttataaaacttactccaaatttgttggtctaacaaattaaccagttgtcaaatttctgaaacattttggtccttgtggccctctgcatggttcatatttagtttttaaagctgtaaattctgaacgcatttaaaatacagaaacagaagctgtataaaaatagactacagaaataacactaagtagccacaaaacactgatttgaaactgacctagaaaaaatgtgcagtactcctttagcaaacagttttttcttacaggtagtgcctcagacttgagtggtggaattagggtcaccacagttaagagttggatagtccaggtggtgatgaaatgttcttaattctatagtttttctagagtagttttagtgttagaagataattaccatacaatcttaattcagggagggactttggtgggaattaccctcacttcagacgaggaaaccaaagctcagagataaaaggagcttgaaaacacctatttggtccatagggtttcttttgcattattccctcattggtttggagacattatttgaaactaamatgtagtgttttatcttcatcaggtcctggctcaacagtgattccctgaaaagcatcagatacaaaattgtcaattttgaccctaaacttttggaaggaaaagtaaaggaggatcctgaccagggggaatccatgaaacctgtgagttccatgcatccttctttgcacttggcagtattaggaaataatggaatacctgggtatctgtgggtatagtgcaagtagtttcctggggaccaagcctgggtggttctaagagtcctttcttctcctgaatgggtactgaaagcatcctaggagtttctgtgtaaataaaagcacagctagtgcggtatcctatgccaattattctttccttttccagttaacctttgcaaggttctacttgccaattctggttcccagcgcaaagaaggccatatacatggatgatgatgtaattgtgcaaggtatcaaaaatgtcaccatgagtgctgttctccacccagattgggtacaattgctaaataaaacaatgggctacagtgggctgtagtggtttatttatggtcttctataaaaggtcaccatagggagaagtgggagtaacagggaactctcaaggcaacggaaatgtaaatcttaacatcttgtctatttcaggtgatattcttgccctttacaatacagcactgaagccaggacatgcagctgcattttcagaagattgtgattcagcctctactaaagttgtcatccrtggagcaggaaaccaggtaaattgcttaccaaacacccctcttcctacaatattgtttaatgggaagaggttgcaaattcagggaactcttttgctgcaatttacactccccaatcatttcatcccaaaactcaagcctgcttttctgtagacttcttcatggacttgacagcctaattgttcttgaacatctggtttattatgtcaacatctaggttcctattctaacttggaatttcaaatatytattttctaatctgaagaagtcagtttaacagctcttctctctactggctataaaattgtatctattttgtttgaagcagtaagtacatatatcctatttgtgtttttagtacaattacattggctatcttgactataaaaaggaaagaattcgtaagctttccatgaaagccagcacttgctcatttaatcctggagtttttgttgcaaacctgacggaatggaaacgacagaatataactaaccaactggaaaaatggatgaaactcaatgtagagtaagtatgtaactggcctagctgtgaaaaactgttgtatttcaattcctagagtcttgactaacaggagttagtcagtacttttcactaacaaacatttgttttctgtcccaccaagagagggactgtatagcagaaccctggctggtagcatcacaacacctcctctgcttatcgtattttatcaacagcactctaccatcgatcctatgtggaatgtccgccaccttggtaagtagaattaaccagtggcataagctagtaaagaattggtatctaaagaactatcctcagggatggggtatattctttgtttcccttaagtaagttttctgcacaatttcacatggcgcaacgatgtggctatttttgtctcaaatgtaaggttccagtgctggaaaacgatattcacctcagtttgtaaaggctgccaagttactccattggaatggacatttgaagccatggggaaggactgcttcatatactgatgtttgggaaaaatggtatattccagacccaacaggcaaattcaacctaatccgaagatataccgagatctcaaacataaagtgaaacagaatttgaactgtaagcaagcatttctcaggaagtcctggaagatagcatgcrtgggaagtaacagttgctaggcttcaatgcctatcggtagcaagccatggaaaaagatgtgtcagctaggtaaagatgacaaactgccctgtctggcagtcagcttcccagacagactatagactataaatatgtctccatctgccttaccaagtgttttcttactacaatgctgaatgactggaaagaagaactgatatggctagttcagctagctggtacagataattcaaaactgctgttggttttaattttgtaacctgtggcctgatctgtaaataaaacttacatttttcaataggtatcttctttttttattccagataactacttccactcacaatgagatgaattgtctttttacagaatttagggattccaagttgcctggttttaatataatacatattcacaaaatttacacagctcatgcataccataacttatacagagaacagtttagcagtctgcttaaaatgttaaaaaaaaaatcataaaaagccattgttctgttacacataatctgtactgaagtcataagcatcatcctcttcaatgattttatccaagataaaagaccttgtagactgttcacctatattgcaggaaaataaagagattttcaaaaagtaaaagtgattctataccatgctgcttcgttagaaccccttttgcctgcctcacctgctgtagtctcctcagacagtgcctcccctgtctcttctgcagcaaacatgcctgagctgttttcctgtgtgacaaagaaaaatagtgctggattagtagcccttgtctgctcatttaatccaagtagttatgtacctgaaaaattaactctttggaggtacatataacgggatgtgcaaaattaaggctaatggatcacaagcctcaaatatttcctatcttcagttccttccattatgtattataatgctagaaaactcacttcagttttaactcatggaggacacacttacatcaacttcttcatcaacagtttcctggtcactgtctttgtcatcctccctctcctcctgcttcctttctttccgttttggcaattcytcatgtatgtccttttcttctattattccatttgtcagaccggaagactggaaaaggatgstattggccaaatgagggcccttgatggctgggaaagaaagcaagcccatgtaaacaggtaagagctccactggcctgtcagctgatgaagacagcagcgacacacaattctcacctcttatgctctgtgcattgttcttttccagttcttccagattgaagccrcttttcatgtctaccacaatactctcattaaaatatggaggaggagtccaagatgtagggggatggcaatagtaagctaatgaggcactgatattaaaaataagatgtgtcaaaagaaggtttattctagtggtcaccaaaatgcsaacagaaaagaaagcttaccctgtccactcagaccacagcagtttggcagcaccttcaacatttgggattccacctttttggtgcatacstcttctctgagcaagcayagtaaaaaattccagagaattcctgtagcctgggacagtatatttcagtactaccttaaaaaaaaaaccaaacaaaggagctgtccttcatctgacatgccagtactttaaaacacttccaagatttttctactcaaaatgcttatgatgaaagaagatggctccaaggagctcatgagaaggggtccttttacctgtcgagcatcagcctgggaaaggatggcactggcagcctccatcggttttactacttcaatacttgctggacttcgcagagcaagcgcagaggaggaattaagtggagatacgatgaagctcggactatctatgattgtgatctgtttgtccaaggggacaacttgcatgctcctgaaagaagagcgatggaattgatgggggcattggtctatttggaggttaagagacagaacatgaagctcagggttggattgaacagactcagcacagtcagtcagatccagtttatcatcatttgcttcacatttatctaaaactgtaacagcatacccgactgttctaaagagaacactacatgttataacttatatatttacatcaaccaaaacacatgctatttcctttgctataaatatgccaccttctggctgggcgcggtggctcacgcctgtaatcccagcactttgggaggccgaggtgggtggatcacctgaggtcaggagtttgagaccagcctggccaacatgatgaaagccctgtctctactaaaaatacaaaaattagccgggtgcctttgatcccagctactcaggaggctgaggttgcagtgagccaagatagcaccactgtactccagcctgggagacagactccatctcccaaaaaaaaaaaatctaaaagttggccaggcacagtggctcatgccacccaacacaagtgtaatcccaacactttgtgaggcctaggcgggtggatgacttaaggccaggagtttgaggctagcctggccaacagtgaaaccccatctctattaaaaatacaaaaactagccaggtgtggtggcagacttctatctggcaaatttctattaatttctcaaggccaggttcaaacatcacttcctctgagggagctttcctctctctcaatctatctgctgaacttgtctttcaaactaaattgtgggcagctgtcccactccaatcagttctagcactggcttaaatctctgctttcaccaaaagctttaaaaaataaaaataggccgggcgcggtggcttggcctgtaaccccagcactttgggaggccgaggcgggcagatcagctgaagtcaggagtttgagaccagcctaaccaacatggagaaacccgtctctattaaaaatacaaaattagccgggcgtgggggcacatgcctgtaatcccagctactctggaggctgaggcaggagaatcacttgaacctgagaggtggaggttgcagtgagccgagattgcgccattgccctccagcctgggaacaagagtgaaactgtctcaaaaaaaaaaaaaaaaaaaatcaccttccttgagataaccaaaataaaatagtgtgtcactataatattacaattatggacacctccatttaccttgtaagccccatggatacaccaacattacacatctgttcttgttttaagctattgataatgctgcttttccccacatttgggaaacctacaaataaatgggaaatccagatataaaaagcattatatgttggcacttatgaaattttcactgcctaattttccatttccctgatgtttagggcaagatcagagttggatctcagtgtcttcacttcaatactaagaccaattttagtttcttcatttcttgcacaagtaatgcaaaggcaggaaaatactataaattcaaacaaaccaagaacttttagaaaccagcttcctacagtaatcagtcccaacaaaaaacctgaatctggcagcagttgtgtaagtttttttctttaaattgtgtgtggttatgtgctttcagtaaggtataagcaagaagctagtatttgagtgagccttttacttgacaacaactccatacactgctgcttgggcacttggagagctggctaaacttcttaactatttcaacacttaaaaagtaaaaagtaatgaactgaaactcaccaattactccaacccgaatggctttgctgcaagtttcctgaaaacctccaagaagtttccaaaggccctctttcccaaagcagacttcacttctgaatggagcagcattcttctttgccttcacacgctaaaattccaaatagttgaattattctggcaacttacctgataaatttcaacaaaccccaagcaatcaggctccagagcccagctcttaagataactacattgcctttcagatgatctctggctgaaatcagagttggatcttgtaatttttcattcacttaaatcaagattttgtacactcatcatatttcaaccaaaatctgaaagaatcacatttcttaccactaataaaggataccttggttatcttccctttatcctttggttttgttgaggctctgaacaccactgttggcaattctttcttcaaataatttagccagctctccaaattctcctttggtaccagatctgatagcaattagaaataagacatttgcggccaggcacggtggctcacgcctgtaatcccagcactttgggaggccgagacaggcggatcacgagttcaggagatcaagaccatcctggctaacacgataaaaccccgtctctactaaaaatacaaaaaaattagctgggcgtggtggtgggcacctgtagtcccagctactcgggaggctgaggcaggagaacggcgtgaacccgggaggtggagcttgcagtgagctgagatggcgccactgcactccagcctgggtgacacagcaagcctccatctcaaaaagaaaaaaagaaaaagacatttgctccaatgtggctattttgttgagatgcatttgcaaaatctggcaactatagattttactctggtttacattttcccagtcctttcaaaaggatttaactagaaaatcagggcagggtaagctcccctaccatactgcccgtatcttaacagagctcagcatctgcacttctctatttcaattccccttgtattgctcacttgaaaacttcaggacagactcaacgtctggattacaaccctactaaccctagagctatgtttccagaatttacctttagctagcagccaattgtttcttcatttttgagacgaagtgttgttgcccaggctggagtgcagtggcacagtatcggctcactgcaacctccgcctcccgggttcaagcaattctcctgcctcagccttccgagtagctgggactacaagtgcccatcatcatgcccggctaatatttgtattttagtagagatggggtttcgccgtgttggccaggcttttctcgaactcctggcctcaagtgatgtgcccacttcagcctcccaagcagccaattgtttcttaaccccaacaacaattttagatctcattcccattttctgctttgtaattctctgttctgggttttctttttcctgctgctcaaactcagatgcataattatgcatttcatttaaatattttgtcacatacgttccaatttatttcactcttgaactaatacccgacattgtgtaggtgtggggaatttgtcacactgtcatcacttcctagatgaaatatactacacaataagctgggtatagcagcttacactctttatttaaaagatggtaaatactgaatggcaaaagaatagtagaaaccagttgagtcagttgtaaaagtcacctggctccccactgcctagcactgtctctggcaaagtgcacgtactctggctttgctgagatcagagttggatctaatcagtcttcagtgactatcagactgtttcctcgtacctcacccatgtacacagaagacaaagggtaccctctttactcacctgatttatttaatataagtaccagctttttctgtccactctggacaatggcctcttctacctgaggacatctgcaaccaagaggatctctggcatccaacacctctaggacaacatcggaggcttcaatcacctatcaaggaaaaaatgaccagaactacattatcaaggagaaaatgatcagaactacatcccttgttctggtaataccttccacaagagagtactggcattatccatttagcaacagggtgagctcagagttggatctcatgtcttcactttggtatgaagaatgttgaccctcatcatttctcacacaggaaagtaaaacataggcttgctcagcagtctctgatcaagatggatttcaaaaatgcaaatatccctgtctgaatcctcccatagtgaattatatagtttgataggtccttctggccttgccaaaagctgctgaggggcagtcaggttctatccatgggggagtgagcttgggaaaatggatgttggggatgggagtgctggagagcaactacaccaagttgtcctccttcacttaggtttcaacagagtactttagagacctttagcctgacactgcttactccaatgtacctttctcaatctcaacactatgtcaacgtttttttttaatgttgtaaatcatgcttacaggcagaaccagttttgtgcaaatatttagaaccaaagaaactatttccgtcaggtaaacatagcaggaaaggcattaaacagcataagctagagtcgagtcacgaaatgatttgttggtgaaaaggtgggaggaggg

SEQ ID NO: 93768 - DNA, 30441 bp, Homo sapiens
acatagcgagaccctgtctctattttaaaaatcatatagaaagatatgctcatactcactgtggttcacctatcttagattcaggaaccccgtgctctcctgaacacactatggcacctccttccattaatttcctttaggatcctgtcatgagagggcacagctcatcttccatatttacaaaatgcaaagctgacatgaacatccttctctggcttcccattattcttaggaaaagtgtctaaatctttaatgaggtctaacaggaccaggacaatctattgccaacctcgtgctcagcgctcagaccacagctagaaggtctcctcctcagtgctgaggtctgaatgtgccccctaaaattcatctactgaaacttaacctccaatgtgagggtatcaggaagcggggcctttgggaggtgattagatgatgaggatggagctctgccccactcccccaggcccctttgaatggaattagcaccctgatggaagaggttgaagggaacaccccaggcaattttttgcccttccactcttctgccatgtgaggactcagccagaaggccctcaccagacactgaatgccctgaccgtggacttcccaacagccagaaccataataaatcaatgtctgggtttgtttgtttggttggtttttattgttgttgttgtttgttgttttttttttttgagacagggtcttgctttgccacacaggctggagtgcagtgacacaatcgtggctcactgcagcttcgacctcccgggttcaagccatcctcccatctcagcctcccaagtagctgggactacaggcacctgccactatgcccagataatttttgtcttttttgtagagatggggtttcaccacgtttgctaggttggtctcaaattcctgggctcaagcaatccacctgcctcagcctcggaaagtgctaagattacaggtatgagccatcaagcccaatcagtgtttgttgtttataagttacccagtctcacgtattttgttaaagccgcccaaacattacaaatcccccaacagcttgatctagtacttcctcaggggttacaacacagggatattaaaattatatggttccttttttatttactgctggaaattattctataaagaactattcctcatcaactgtttgttgacattgaaattcagtctatgtaagaaagacaggataaatccttggttctttccctttgccagatttcagaataattactattgggctggtctttgcttctaggtatttccagtggagagagttaagatacacacacacatacacacacacacacacacacacacacacatcgtttttgctttgagacacagtctcattctgttgctcaggctagagtgcactggcacgatgatggctcactgcagcctccacttcccaggcacaggtgatcctcctaccttggcctccctagtagctaggactgctggtatgcgccaccatggccggctaattttttatatcgtgtagagacagggtcttaccatgttgcccaggctggtcttgaactcctgagctcaagtgatctgcccaccttggcctcctaaagtactgggattacaagtgtgagctaccgagcctagccaagatgtatgtatgtgtgtgtgtgtgtgtgtgtgtgtgtatcttgagggggggaaataatcatgagtttatactgatatttccaattcaaattcaggacctcttggctttgacctgttgaattttacatttgtgtctctgttttttatactgaaaatcttggttcccaatggcattaacataattatatatttactttatcagtgtgggtatgtgcagtcttaaataataacacctgacaaatgagaacaatttaagatttttttctgtagagatggggtctccctatgttgcctaggctggtctcaaactcccgggttcaaatgatcctcccacctcagcctcccaaagtgctaggattacaggtgtgagcctcgccttaagatttttttttccagttccttttgtctttaggctataccccaccaggcatatgcagtcacattgctgtggtgtgaaataacttgaaatcattctctgcggggttatgctgacaacttggtatgttattaaattggtttgttatatttcatttccattgttatgtcattgtgttttatggtcgtgtaaaaacatttatatggttccaaagttaaaatgacccctagccataatcctttcaccagctgctgcttagtacctcaaagacatttgcaaagatttgttgacttttatgacacatgtatatgattgtcctactctaattcatctgctgggggatgggtgtttcttactggaaaaccggagacatgtcaaggagcatgatttgccttaaagctcagcttgatcgaatacttgtagggtgattcgctaacgaaaggtaaaaaggcatatttcagggtctctaatcaaaattgccctgcttcacccagatacgttttttttgttttgttttttagagagatggggtctcgccctgtcacccaggccgccatgcagcgatgccgccatagcttactgcagcctcaaactcctaggctcaagcaatcctccctcgtcagcatccctagtagctgggactacaggcatgcaacaccataccagactaattattttattttttgtacagacgagtatcactttgtggcccaggctggcctcaaactcctggcctcaagtgatcctcctgccttggtctcccaaagtgctgggattacaatttcccccaagattaacgagccctcctttcttaagactttctcttcccgccttttgcaaatctttctttctctccggcctcctctcctgatacaagagtcttttgtgaatgttctagcgcgttactatagcctatagttattatagcctatagttaatgactataacattactataacgttactatagcctatagttaatgactattaaccacaatcatcacctgtcaccacttgacacagcatctcacagtgtccctcaccttcaaagttgcttccaactctgctttcaaatatctgaaaacagctgggcgcggtggctcacacctgtaatcccagcactttgggaggccaaggtgggcagatcacctgaggtcaggagtttgagaccagcctggccaacatggtgaaaccccgtctctactaaaaaaatacaaaattagtcgggcatggtggtgctcgcccgttttcccagctactcgggaggctgaatgaggagtatcacttgaacctgggagtcagatgttgcagtgagccaagatgtcaccactgtactccatcctgggcaacagagtgagaatctgtctcaaaaaaaaaaaaaaaaaaaagaggccgggcgcagtgtctcatgcctataatcccagcactttgggaggctgagacgggcggatcacgaggtcaggagatcaagaccatactgtctaacatggtgaaaccctgtctctacgaaaaatacaaaaaaaattaaccgggcgtggtggcgggcacctgtagtcccagctactcgggaggctgaggcaggagaatggcgtgaacctgggaggcggagcttgcagtgagttgaaattgcaccactacactccagcctgggcgacagagcgagactctgtctcaaaaaaataaataaataaaatatatatatatacacgtatgtgtgtatatatatgtatatatatgaagaacaagaagtgcagagaaaatatcctagtcattgaaaaattggttactttgtttctgcactgcaaagttactttaaactttgtaatgaatctagtggagagatcatttgagatgaggcaaatgtcctgtttctcatcatacatttacccactaattttagcctgtattgatgataattctcacctgcaacagttactgtggtctttgccaaatggtgattttctttttctattttcatcattccttctatattaattaattggaattctactgtaaggaaaagttgttccttctaacccattgatttgttcaatcatgtatttaagtaggacctatattttacttgttccttgctatatcttcagtgtgtagtacagtgtctgacacaaaatcggtgctcaataataggtgttggatgaatgagcaaatgaatgaatgaattcatattcatatggcctacagagttcccgtacatgcacaaccaatatcaccaccccgtggagatgactcccaaattaatatttttagcaaatgttccagacttacaactccaacttcccgggggacatcttcagatagctgtgccactgccaccaccaggtcaacatgtcccaaaccattcagaccagctttttctcctgagctggacatctggcctccaaccttttcattctcttttacctttcatattctatcagcagcagcagctgctgaaatcataccatgcaagtttctcacgtccatctctgccttttaatggcgccctctcactcctttaagaagttttcttccactgcaacacgatctctcagtccagagtctggcccagtgcccaaattatttctctagctatgctgagagctggtcatgctttgaacttctgctttgaatactttcagtgacactgggagagaattatctcattggaccattgtcattgttagaaaattcattgttatgctgaaatgaaatgattttattcacacacacacacacacacacacaaaatagctcttcctcctggaacatgactggcctgaaaatgtgtgaagacatatccaatcctctctggttttactgttcatccaattttctgttctcctcctggcaggaggattatatttcaccttgtggaactcagacatggtcgggtaactagctctggtccgtgaaaattgagaggaagtgacatgtgtcacttctgggcagaagctttgagagccggtttaaatgatcccttttctcttcatccatgagacaagctaagttccagagagagggtgccacgctgtgagggacctgtgttacgagtacgatggctcgcgtcacttcaaattcttgaaatcactgaaatttggaggtcagttgttacatcataacccagccaattctagttagcctgttttcttcctaacttctttaatcgttcttcataagtcacaatcgcagcccctcaccgttctgaccactgtcccctggattccactcagtttactcattatcccccttaaaatgtggagcccaaatctgaacccggaaccccaggtgcaatcccactaggacacaacacaatgggttcctgagccctttgatcctctgaatagagccccttgttgctttggtgttttgtctctgtgtgtgcttttatcatcggctgagccacgctgttaactcgcagtgagcctgtgaaccaataactagagaaaaaagatttttcccattgtcctctcgacatatattgggaaacaaattttttgatccgcgttcaagtagacagggcagaactgtccaactgctacgtgatcttttaaagacaaagttagtggcagaccatttacagaaaccagatgttctgtcttttggctctgagcatgctgctaatcttcatcatctagtgtactgaacgagatgtactgaacgagggctgcagagctgcagcaccggcaggagtaggcgctcggtaggacggggcctgcacaacctccccggtagtcagcagagcggaatctaggaaggctcctttcccgcggcgccctggaggcgggggccccaccttcccacgcaggcgctatcaagccccgcctcctcacccgcccgcggcgtggcgtcggaaagagccctcagcccctccctctctggcgctgatacccaatgggcagcctcaggcctttagcgggggcggggcaccccctggacgccgttctggttggcccgcggcccggcgcagcgcatgacgttattacgactctgtcacgccgcggtgcgactgaggcgtggcgtctgctggggcacctgaaggagacttgggggcacccgcgtcgtgcctcctgggttgtgaggagtcgccgctgccgccactgcctgtgcttcatgaggaagatgctcgccgccgtctcccgcgtgctgtctggcgcttctcagaagccggtgagacctcccgggcgggccgggatggggcgcgagtggggctgaggcggggccggagggcagggcgggccaggccgggccacccagagcggggtggaaggcgccaggggagccggggagcctttacttcgcctccgcgccctgcattccgttcctggcctcgggagaagcggcacggaccgggatcacgccaaggtccgtgtgaacttcccccttctcgacacccacctcccgcccccgggcccagctgtgcgccaggcgaagtcggtgtgctcaagaggtgcctgttgggttacaggacacggaaagggtggcctcggcctccttcgagtctccaattgaccccactcatttcggatcttctaacttaatttctcttgaccgagaggctttgtaatagcgtagaatctggagacagggtggcttcgttcaaacagcaccctcaccattgactagccctgtgaccttgagcaagtttttaaacgtcccggggacccggtttcctaaaatgtttgctcgaagtggagttaatctctaaatggagataagagttatctctgaaatgttatcggttattaaaatgttatcagttaactctaaaatggagataataagagtccccacctcttggggttgtcttgaggattcaacgagtgacacgtgtggaaacgattccaaatagcacctggcacataatcgataacatgtgtgttgaatagtgttatttattgagtctccagttcggtatacatttcttgaacacctgtgctcagttctgaggcgggttcacagaaggtcagcctcttcagaaacaaacttcctcctcttccctctccctcaacatctgagcttttcttggcagtgagttcaggagcgccgaagcagaactcagaggacgctgccctccctcccttcctacacatcttagggtacagtagctaaagcaaagagcaacgatgcttgagggtggggggtagagtttagcactatttcatggcctctagcatttagaggtcctaacacctgagctagcaattctgacccccctaggcacagtgaggtcgtgttaattggtgtaactgcaggcctcgggattctggtatttcccccaggacttgataccgctctacttagtacaggcaagagattgtcaaaaggtaaagaggtatgcccctctaggaatcctgttgcctaaaataatgacaaaactgccgggtgcggtgctcaggcctgtaatcccagcattttgggaggctgaggcaggtggatcacctgaaggtcagaagttcgagatcagcctggccaacatggtgaaaccccgtctctactaaaaatacaaaattagccggtcgtggtggcgggctcctgtaatcccagctactcgggaggctgaggcgggagaatagcctgaacccgggagcggagtttgcagtgagcggagatcgtgccattgccatacggcctgggcgaacaagagcaagactccgtattttaaaaaaaaaaaaaaaaaaaaaaaaaaaaagcgttccctttaggatatctgtgggtagagggctgtaccggtagttacgggctcagaaacatccttcctttaggcacctgatgtaggttttcttcttcttctgcaagtcaggttcattgtttcctgtatcagtttgcagggtccccccccccccgccaccttacagtaggaagaaaattgagttccagatatgaagtcacctttgaaagtgcccaggtatctttccacttggtgtgtaaactcttcagataattagaagttttctgtgtcactcaacttgtcatggactaattaggaaccattcctgaagcttttaaggatagaactaaaagtttcacttttatttttttaaagggtggaataataaactaacgtgttgactctttgtattttgtaattcttcatacttatggatgtctttttacttaactataagtaacaaaatagatcaacgttttagttttttatattatacatgtaaaaagacattttgcatataagcctttcacaaaaatcttgacagtaaacaataagcagtggctcacccaaattaggcagacttactgcactagactcctaccatctgtgtgatactccatgaagggagggagaaggggagggagaagggtaggcagctggtctgatggctgtgacacaagataatccccttaacctcccaagacgctgtgtgttttttccttttttattctccctggtttactttcgttttgtttgagacagggtctctgtgtcacccaggctggagtgcagtagcaggacagctcactgcagccttagcctgctgggctcaagcgatcctcctgccttagcctcctgagtagctgggaacacaggcatgtgccaccaccacacccagccaattaaaaaaattttttttttactagagacatggtcttgctacgttgcccagtctggtctccatctccaggctcaagcagtcctcccacctcggcctcccaaagtgctgggattactctcactctcttaaaaccaggcaggtagggagatttatctcaggcttaaagattgccattgtctcatcaaagagtgtttggtgtgaaactttgaaatgaatatcaagattgtgtttttatttttgaataaggtttatagttttcatagttcttatttcatggaagaagattgaatgcatttaaaatgttattttattgtttgcatttctgtatggctccttttgtgagatctttactagcaatgttttggctttataagtggtaggtaagagttttaatttacactgttagaatctggaatttttgaaacgtttttcctctttcacatgaatggttcctatgtatttaggaagttaaagttttacttttttttaattaatttttttttttaggctggaatgcagtggcacagtcatagctcactgtagcctcaggtgtgtgccaccatacctgactaattttttaatatttatttttgtagagatgagagtctcatgttgcccaggctggctttgaactcctggcttcaagtggtcctcccaccctggcctcccaaagtgctggggattataggtgtgagccatcatgcccggcctagtttttattttttaaaatttgagtgggttgttcgtggtctctgtcagagaggaatcccatttaacagagaatctttttatggctctccagagaaaatgaatggtaaacttatcttttcaacaagctctcactcagaaatgatacacacacacttctgataggacttttagcttctttaactttgttcctttcactcatatcagtggttcttatttttgagatacacagtaatgaagccatgggagaaagtatctaagtagctttctggcagtcctaatctttgcaggcgcaagattacaggcgcatgccacagcactgggccccttcttgctctttattgtatagcattatcctgcctcattgtttcaactctaggattgagaaagaagttaccttttctctgttactgtcgcctggctggtttggactcctgccttccaaaaactgcagtttctgtagttgtatttggaaatttatttcacaatacaataaatttctggccccacaaaatatttattaactgccaagaataacacatctgtttgattgctaaatataaccattgatttgctgtttcaccttctctcagctttacttcttcccaaattcctaaatttccttcactttttctgagatacattagtggactgtctctgcctgtaagttaactgaaacactgattcctagtatttcagttgttttcctccagcactgtcattgtctgtgtttgttggctttgtccaataatggtctattgaggggtgaagatatacgtaattagctttctgcctattggcttgtacactccagggtatacttggcagatcagtcttaactcttctcaccaagatcagtccagtgctggattaggtaaggtatgaacacatcagatgtgctttttatggagaaatcatgttggtttacacgtcagtgtgtgagaatgtggcagaagggagctaaaatagtatgataatactactggataaattttgtggtctaacctaaaccttagccattacatagaatacttttgctgtgagcaggtttgctcagttgtaaaactggaaaggaatcatttctcaccccccgcctccaagctttttacctccaaacagtgacagccacccaaacatcaagagaacagtgtttcagagaacatttctactggggcttcaggaggagcctgtccaagatttaggctgttcaaattataaattataaaacarctggctcaagcccattgtgtttaagtcagagagtgctaagtatcttttcttttgtcttgtctccctaaagtatttatctcatacttcaatcaatttaaaatattttttcttacagatccaatttgatagaagagtcaagtttgcctagagtggagattaaatcatagttttatttgaagtataattttggcttgctcaaaatgaacagtatctggttatgactaagaatggcatgaaaaggccagaygcagtggctcatgcctgcaatcccagtactttgggaggccaaggcaggtggatcacctgaggtcaggagttggagaccagcctggccaacatggtgaaaccccatctctactaaaaatataaaaattagccgggcgtggtggtgggcacctgtaatcccagctactcgggagactgagacaggagaaatcacttgaacccgggaagcggaggttgcagtgagccragatcgcaccactgcactccagcctgggtgataaaagcaaaactccgtctcaaaacaaacaaayaaaagaatggcataaacagacacagctcacagatgatctagtctctttagccactaatttcattatattctcactataatttctttgaaaacamaggatgggtttgttttttgcccctctttgcgctgcttgccttcagatgcgggataatcctgtttcattggccaaagcatggattcattttggaggccaaggaagatgcaaacacagtgcacagggtggaagagaagcctatgaatatgttggggcttattaaatttccataacttyattctgataactgattattatactttccaaaatagctgacaattaaaaagtactgatttgtttgtatatttttgtcttttaaggcaagcagagtgctggtagcatcccgtaattttgcaaatgatgctacatttgaaattaaggtaagaggtgttttactttgttaataattttttcacaggtacactctgatatacagttttacctttagaatagaacattttgatgttcatgcttagtcatcattttcttctaaatgttccaggatcagaagttcagagaagcttcacgaaaactagaatttattattagcagcttgctgttgttctgtggggggaagggggaggagctagaaaatgaaaataaaaataaaagcttattcaaaagtttggaatgtaattcagtgaaatatttgaataagaagagtcttagttgtttctttgaaggttctttcaacctataactcagttggcttctaggggctttcagtgaaaatcatcttagaaagatttccttcccccaagccccatctcattgcacagtgaggtttatggatttaaggaacagaggcgatatgaagcattactgatgtgctcctttgcagtttttcaagttcaatattatttgcaatgragttagatcttagagtggtcaacagtgtttgcaatgtagtatgtggaggataataactaccttattccatttcagaaatgtgaccttcrccggctggaagaaggccctcctgtcacaacagtgctcaccagggaggatgggctcaaatactacaggatgatgcagactgyaygccgaatggagttgaaagcagatcagctgtataaacagaaaattattcgtggtttctgtcacttgtgtgatggtcaggtgagtggtaggtttgtggtggaactgtgttatttaggtactgaagtatggcttgtacttattgggctttaccctgccatatgtatcagaagagtttgaggctggtaatgtaattttcttttatttatttatttttttgagacagtctctctctgtcgcccaggttagagtacagtggtgatcttggctcactgcagcctctggttagagtacagtgtgatcttggctcactgcagcctctgtccactgggctcaagcaatcctcccacctcagcctcccgagtatgtgggaccacaggtgcacaccaacacacccagctaatttttgtattttttggagatacggggtttcactatgttgcccaggctagtctcaaacttctgggctcaagtggtccgcccaccttggcctcccaaggtgctaggattacaggcgtgagccactgtgcctsgctgaagccagtattttagaattaaaaagtagaatgccaaaacctgctatgaagcttaggctaaagaattcattcacacataacattgccagttttctgtacctgttcttagagttttactattttaaaactttctggcactatgatcgcctgtactgtatataatttggagagaaaggattagtttgttttttgttttgtgggcttaggtcaagggttagagtcaaatacctacaagggccagccaggtagaataaatgagtgaagaaggctaggtatacaaaacagaaaatggtgacagggactcatgctgaactggcaccagcatgccctacccagaggaatgccatgacttggttccagccagttggtgccatgtggaaatcaggggtaatgtttcctgttttccatgtctaagagaaggcggaagtctggattttcatgtgaaattcccagtgttttaatgttgacatctgatgtaggcttttmttttaggtcatcatacaggagaaaggaaggaagtggcacatgtgtgggttgccagtttattgcttctggtttgggccttccactctgtattttggtggaaaatagctactttctctggttattaatgacaggttctactagcccacatatttcactgtggtctaggaaacgtttttatttagaaacatgtatcatattgcctcatagtttctccttcctctaacacaggaagcttgctgtgtgggcctggaggccggcatcaaccccacagacsatctcatcacagcctaccgggctcacggctttactttcaccyggggcctttccgtccgagaaattctcgcagagcttacaggtttgctgttgatttacagaaaggggaaatgagtggattaagtttttaaatatctgtcattaagatgctattatgagttaatatttgttaaaaattttaagtttctttttttaaccctctctcctttggtgctctggtacttctgttgtgctcttgagttaactgaccatttgtgaagttctctggcccctcaggtaaaagtttaaaacaggttggtgctataaaatcacagtaggtttggttatcattcaagcatgccagaagaagtctagcagtcatagaaagtaagttcggttgaagcactccatggtatgcaatgtaaattctagaaatcttcttaatattccccttttctttgtcccccgtgactatttgtttgttttggtggttttttttttttttttttttgagactgtgtctcactccgttgtccaggctggtgtgcagtggtgtgatcagggctcactgcaacctccacctcccgggttcaagtgattctcatgcctccacctcctgagtagctgggactacaggcatgcaccaccacacctggctaatttttgtatttttagtagagatggggtttcaacatgttggccaggctggtctccaactcctgacctcaggtgatccacctgccttggcctcccaaagtgtgctggggttacaggcgtgagccaccgcacctggcctgttttgtttttttgagacagagtctcgctttgttgcccaggctggagtgcagtggcctgcctcagcctcccaaaatgctaggattacaggcgtgagccactgtgcccggtcctcctcctcctccttttttttttttttttttgagacagagtttcactctttcacccaggctggagtggctggagtgaagtggtatgattttggctcactgcagcctccgccccccgggttcaagcaattctcctgcctcagcctcctgagtagctaggattataggtgcccaaccaccacacctggctaatttctgtatttttagtagagaccaggtttcaccatgttggccaggctggtcttgaactcttgacctcaggtgatccaccctcttcggcctcccaaaatgttaggattacaggcgtgagccgccgtgcccggccctccttgactcttgaactatggttgtccctctatatatccaggggattggttctaggaccctcgagtatacaaaaatcctcaaatactcaagtcccaaagtcagccttccatatcttcgggtttgcatcctgagaatattctattttcaatacatgtgtggctgaaaaaaaatctgtgtataagtgtacctgtgcagttcaaaccctgttcaaggattgaatatatttagtgtactagtataggagaggtcctaagatgtttgtaactggccagaaaacccagaaaagtccagggtatcatctggatggaacatctgaaggaaactaagtgactagagagtaggaaaagctggaaaggttgaagcacatggaactagtgaaaggacaaggagaaacatgtgtttgcctggagggacaggtacttagacgactgaactggcctctgtgttctaatggttgagcctcagagtacatatttggggtgcggtttggtttgctttgtagagttggtttgttctgcacatgtgtatgttctgccatttccaggacdaaaaggaggttgtgctaaagggaaaggaggatcgatgcacatgtatgccaagaacttctacgggggcartggcatcrtgggagcgcaggtagtcaaggaygaggattgtgtgctgctttagatttggccctggactttgtcttcaaaamctttcacagccccagacaacttttcctgaagtagtacagccatgtgctgcacagtgacgctttggtcaatgtcgcatatatgatgttggacccataagattataatggagctgaaaaattcctgtcgcctagtgatgttgtagtggcacaacacattaccttttctacgtttaggtacacaaatattttgcctacaggattcagtagagtcacatgctgtgcagggttgtagcctaggagcagtaggctctactatacagcctaggtgtgcagtgggctgtaccatctaggttcgtgcattacagtatggtgttcacatgacaaaatcgcctagtgatgcaattctgagaatatatccctgttgttaagtgacgcgtgactattttgggggcttggtttgcttttaaagacctagtgcttcatatcctaccgtttgagagatgagtagatttggatggtgatttataatgtttccttttaggtgtctgctgttttataagtaagcaggaacctctagcagtggagccataccttccccttcctatttatatttcagtacattaattgctttatcttgtcaacttcattttggggtccttgttctcatcagttagtgaatgatgaagaattaacagcacaaaattatatccggactgtttcttttcctttctaatatattaagattctattatgtgttgtttttttttaaacctaggttttatttttccttttgaaatggagtcttgctcagccgcccaggctggagcagtggtgtaatctcagctcactgcaacctccacccccgggttcaagcaattctcctgcctcagcctcccgagtagctgggaatatagttacgtgccaccatgcccaaccattttttgtatttttagtagagacggggtttcaccatcttgtccaggatggtctcgatctgtggacctcgtgatctgcccaaagtgctgggattacaggcgtgagccaccacgcccggccaggttttattttttaactcttgaatgcagaaatgttagtgcttactggttaaaatagaacatagtatttatatattactttagtgctttattgaaaatatcggaggtgggataaacagagagatagggttggaaggagagtttgtagcagcagtgtaatttctgtgtcagattctggccaggagtgaaaatgcagggcattaattagtatctcccctcatggatttctgtggttcctttctcggttgtccttaatgttaggtgcccctgggcsctgggattgctctagcctgtaagtataatggaaaagatgaggtctgcctgactttatatggcgatggtgctrctaaccaggtaattatgtctcttaacttcccaaaaacagtcttattttcaaagtctttaatatttacagttgaatttctaaagaagtagcatattgcttattaggtgaaatagcaagtcctatggctagctcaaatttggttgacttatggccagattagagattgacctcttagcgttgtttcacaagagacttacgggggcacattcctgtgaaggagctcacctttgctctacatcagtgcttggcaaaggccctgtggtaaaggacctccccacaacctattgcaaaacaatacagacccattctcttggatgtccgggctggcagtgtcaaattcggataatagcgtctgagtcctaactcagtttctatgcttctcttgttaccgagtaatccccagtctgtggccagcactctgtgaagccctgttctagaggctgattcttaggtgctggttcactctggctatccagtgggcctgatagatttcatattgatcttttttccagtgtgttccttactgctagcatggccccaaagaaacaagtagtagttggtttgtcaccttccttagttgcaagagtatgatgcctgctacttctcctccaccacccaccccgctttccctcaccacccaaagctcggttttagaagaggaggctttctgtgctttatgaaagctttctgtgccaggcagagcagcagctgttagagatgatgaagcctggagaaagaagccaaatgaaaccccttttygtaactacttccagggccagatattmgaagcttacaacatggcagctttgtggaaattmcyttgtattttcatctgtgagaataatcgctatggaatgggarmgtctgttgagagagcggcagccagcactgattactacaagagaggcgatttcattcctgggctgagagtaaggammcctgtggtggggccggggccaaggccaaggccaagggtatgtccttgtgcagacccttgacgatcttagaaacattggagagtttcattctcatacaggagcaggtcatgtgaaagtaaaatggtttggggcagttggattcatgcttcgcccctccmctgtttattaccaggtggatggaatggmtatcctgtgcgtccgagaggcracraggtttgctgctgcctattgtagatctgggaaggtaaggctctaaagccctctgggctagtgacatttatctctggaagttcaaagactgcctcccatgtgcctgctgaagctgttagtgggtacctgctaattgaggtgcatgagatggaagcagagtgaagggagcagggctcctttgggtagcttggtcttggtagctcacctgctgggaagcctacgtttctctcatttgggggaagtccgttctggtgcttcctctgctttggcctgtcttcatgacaactgatttgccttttccttaggttaattctgtccctcctccccaccccccattaatcatgagtcccttgaaggaacagattggggatccccacagtgtccagcatagaatgtcatgtatacaataggcatttaatatgtgtgtcttatacaaattaaacagtatggtagaagctcgtaatcttagtcttgctcagtcctaaggatctttcccttttcagtgtatggcagtgagggagatggtaagagggagactggcctaaagaggtttcacttcctttggcactagtataggcttaggaggtttgggtgttctccctaaatcagtgttctacagcccagaaacaaggtttctgaagttggcacttcagcgccataccatgtacgtttaggcagtgatgtgaatcagatgtggccagcaatgatggaaatgtcacaaagtggagagacagggaagtgagggtgggaatgtagtaacattaaataagagctaatgagtagaatgaactagagcaggaccaagactacagcttgggtacaatgggctgagcagtctatgtcaggaccctaaggctgggagtgccaggccctgagtgatgggtattgacgccacctctcccaattcctgaaaagaatacatgggggccagccctggctggagacaaggggagttgtagaatgtagttgtagaatgtgtgactttcccaaacagataaccttcacaattctgagttaggtgttattgttttgcccattttgcagacaaggaaactgagccatagagcagttaaaggtacacagctactctgtcttggagccagctccccactcgcccattttaactgctgcaccaaaccaaccaaggatcctcaatgtttctccaccccagtgttcagagccgtctcctggaagtgggctagtgtagaatgagcgagcccaactgtccagactcccagcagagccttggggtttgggtagcagaggttgttggtgcctgccaactttgttacacactagcaaggtctgtgaagtaggagtggctgccagccccacaacacaccatgagaaaggagcatgagatggaaatctgtctagccaatagcaggaggctctagaacatgctcagagcctttttcttttttcacagggtctcgcgcagtggcacactcacagctcactgcacccttgaccttccagaatcaggtgatcctcccaagtagctgggactacaggcgcacgccaccatgcctggctaatttttgtattttttgatagagatggggttttgccatgttgtccaggctagtctcgaactcctgggcgcaagtgctctgcccacctcagcttcccaaagtgctgggattacaggcatgagccaccatgcctggccttcaaagcctttttgattcaaaacaagctgttggcagattgccttattaaaaatgagaaagatgaaatatgcaatcaatacttgctagaaatgagaacagatcagtcaaccaataagaaattcgtgacaactcagaagatctgataagactacactggacgcttaataaagggcctgcgtttgaggccgtggattgccggcctgttcttycagtcatcgttcctaactaactaactgcctaccggttctgttttaggggcccatcctgmtggagctgcagacttaccgttaccacggacacagtatgagtgaccctggagtcaggtacgctcatgggcagtgtggtttccataggggtgggctttgaatggtgttacatggcaaaagcaacacatttcagtatttgcttttggagctagataccagttcacttcatgtacgcagttgtgttgggcatcaagttatctgaaagcagtgcctcctaataagaaagctttctgaaaatgcctacagtgtatagtgtgtgtgagcacaagcagcaatttttaaagaaagagtgttatataccttaattgtagagggaaattgttacataaaacagggctgatggtagtgtagtatcttgggggcatttagcttttgtaggcattaccccaagtctacacctggcatactctacctgaagaggatcagaatttggagatgttcctctgtctggtatagagctaagggtaactgggtgttcaatccgttgaaatacatcaatcaaaaaagctaggttccactaggaaggcatgaattttacttttttgcttagtagctctggcctgtgattctggaatcccagttttgacacagttgaataaataagcctttgtagagtggacttctaaggaaaaatcatgtagagagcacagtatatggaaaaatgcactttgtgtaaatctattgttgaaaatggtagaatccttttagtgttacttcagatgatataggcataagatacattggttttgctggctgtgcttctttagggggacttaagggagaaaggcaaggcacatggatttcctgcttggcgctctgatgtctcaaagtctaattatcaccacacacaccatctctgctgtccccacccatgtagtatacaggagcccaaatgggtgggacaagtgacacttctttagaaccttacatctaaatcaaagcagcaagcaaaaacttggcccctgttgtcggaatgccagggaagccatgtgactcaccagtgtacggttttctagaaaagacagaagcagttattacagaatgttaggctgcgttctggtattttgaaagtataacaacaactctgccacgcctatagtgacataagcattggtatgcccctttgtttcagaaacacacttctgtatttcacctcattgggacaatccaaccccatatcatgtttcwwcacgccgtccttgctctactggaactgctcttactgatcgattactacttttccctccccatagttacydtacacgagaagaaattcaggaagtaagaagtaagagtraccytattatgcttctcaaggacaggatggtgaacagcaatcktgccagtgtggaagaactaaaggtacagtcacttgttcatggtggtttgaaggttggctttaaaagttgccacccctgggtggccacagagtttgtgtgggttcctccaagcccagaaagtgatgtcctgggacataaatagttccatagttccaaagtcccttggggtgggggcttttcctttagtttcctctattcaaaattgtattactcttcagatttcagattttggtggactgtgaaccaccatcacagtggcaaagcccccacagtagtatggttcttttttcctaaaagtatactgtggatttttaattcataaaatagatacaccctagaaatctgtattccaaaatcttctgaattagcaactgttcgtacttgtagttaaagagttacaccagcaacaggtcctcagcagaactctagttggtacctaagctgctgttcattctaaaaccttytacactgttacctaatttttaggaaattgatgtggaagtgaggaaggagattgaggatgctgcccagtttsccacggccgatcctgagccacctttggaagagctgggctaccacatctactccagcgacccaccttttgaagttyrtggtgccaatcagtggatcaagtttaagtmagtcagttaaggggaggagaaggagaggttataccttcagggggctaccagacagtgttctcaacttggttaaggaggaagaaaacccagtcaatgaaattcaatgaaattcttggaaayttccattaagtgtgtagattgagcaggtagtaattgcatgcagtttgtacattagtgcattaaaagatgaattattgagtgcttaaagattatttttgacttaaaatagtatactttgaacaaatactctaattatgaaaaggaagaacaattccttgtatgcctgtttcccctgcccccagccacctttttgggaggagaccattatkgcrgggccccatcacagcaattctaccaaccatagcacccaccccgagcagcgctggtgctgcagcctgttcgcgctgaccatttctctacaagatacaatatttattatcaggcaagaggacagttccattttaaaataagacttttgtaatcattccaattttgtaatcatttcaaaggccacataacttagttttctctacttacacattcagtataaatatgaagctattttctgttcatatcaaacattaactacaaggcacattcgtatcagttttgtgtttctcaaattgaagtaccataccagttctgaggcagtgtcccagcttccatgtttgttaaataccccttgtttgtttcaccattccagcaagtgctgaagggtgtactttttttgagacagggtygggctctgttgcccaggctggagtgcagtggtgtgatcatggctcactgcagcctccacacctcctgggctcaagcaatcctcccacctcagcctcctgcatagctgggactacargtgaatttcctaatattccgggaggtcaaaaccaaggctcactgttttcacaatacacacagttctatgtttataaataacaggtttcaaaagaaactcaggacagtatttaaaacaagttcttaaactattaattgaacaatggcatttttaaatatgtaaacacagmggaattcgtgtatacactaacagaagctttaacaaaacatgtagcrtggtgggacactctgccacagcttagctgattggtatcaagccttgtctttggtttctgaggcctcctgagccyttctgtactgggagaccgcactccagagtctgcagaggagaccacccctgggaaacaaacacagctgtcttcagagtcagtgcttcaagccaacagagcttaaaactgcagtccctaatttaaaaacctaatgaaaataaaaacattctcctcacatatggaggtgacgctcgtgtcccagcagtagtaggacatggccttagaggtacgtacctgcagagagctggctatttcaaatgactcgggaacaagaaggcaggctgcagtttaaagaagggggtgggtccagcgtgcaggcacgcttgccatgtgcctccacccactcccagccaggcattaatggcaggagattggccagctcttctctgtcacattcctatttctgacttctgcctggctttcagtttctgccccaccttggctttttcccagcttgaacctaatagaactccagagtttggggggaggcccagccctttgttttctgctcttgaagcatattcacacataaaaagttgtattctcttatacaaactgttttgaggctcytaccgtagtcgaaggtatcttagatcttccttagtgatctcattaagaatatccgaaagtgtataaccctcttcaacaatctgaaacaaagatcagatccttaagagctgagcagctgtgtaacaacagcataagaatttctttgttgtaaatttaccttttcaattgtctttgcatcagctccttscagccgcaaccagtctataagctctttatctgttctctgcccgtaggggcctgctgggttctctgtaatacctgtaacgattggcaatttgttatatattagtctaaccataaaactcttcaaaagtaaccagttggattaataaatgattccagaatgtaaatgtgatgtgaaaaagagatgaattaaccctgtatcactgaaccacgctaatacgtattacacaattcataattctgagattcactttctagaaagcctcctcatctaggataccttcagttagtttggaatttgacatgttaggtctaccactttaaatgctyatccccacatctttcaaatgcctttccttaggaatcacatccctaactgcactggaaatcctacaaggaaataggttttagtgttgaggtcagagcttatctagtccacattccaagaggtagctctggagctcgtttctaagtggcccaaaacgaatgtcaggttgatggaggcatatttatttacttatgcagtaaactaccctttttaggtgtccaatgtgctatgaaggtggcagcacagatacagaaatgactgtcactcccaaaagtcctcatgtgccctttacaatcagtcccgtcacctccccattctgattctgtccctgtagttttgccttttctggaggaaaaggaatcatggtatgtggccttttgaatctttttttttttttttttttttgagacagggtttcactgtcactcaggccagagtgcagtggcatgacctcggctcactgcagcctcaacctcctgggctcaggtgatcctcccatgtcagcctcctaagtagctaggactacaggcatgcatccaccaagcccagctggtttttttctattttttgtacggatggggttttgccatgttgaccaggctggtcctgaactcctgggttcaattgatctgctagcctcagcctcccagagtgctgggattacaggcacgagctacggtgctggctgtgaatctagctctttcacttagcatactgcatttacaatgcagccatgttgttgaatctatcagtagtccctttttatgattgagaagtagtctagaatctactggagtcctggattaacagaagataacctcaaatgtttcttcaaagctaactagaatattagctagatgttaaagtctgtctcattggaaaatgacttacaattcgattttaattttaactgaaggtgatacaattcttgagttttctgttctagagtttgccgcagaagattctggtactctctctctttttcaactaggtgttccaaaagtctggtttaaaaaaaaaaaaaaaaagccattatccagagagcattcaacaccattcaatttaactcaagcatctgttgtgcatacattagagatggaaaaaaaatggaaaatgggacaagtctaagagtcagcctagagagggaagcacatgtgtttcttcaggttctgtgactcagacttcagtctgcagaggggaaccttccttgtgttttcctccccttgacaacaaaggccagtgctcacagcttggatatatttttgcaatggactcaatgtgtgcccctcacccggcccaagttcatatgttgaaatcctaacccacaaggtgatggtgttaggagacggagctttgagaggtgaggtgagaggagtgtccttgtgaaaggagaccccagaggctccctcatcccttccaccatgtgaggacacaccgcgagaagatggccatctgtgaatggggaagcaggccctcactggccacggaatctgctggcacctcgatcttggacttcgagtctccagaactgtgagaaacacatttctgttgtttataagctgcctggtctctggttattttgttacagtagcctgaacgcactcaggcagttttgtctcaaaaacgtatcgtgaaccaaaagatgccgatgttaatcagaactcagccagaaggacgatgtgattatttaaacctggctccctaagtcagataaggcagctgaaactagaatagaatggtaagtttctttcctcctcacacagggactaaacgaaggggacagaagcccctgcttcttattttgtttttgtttttttttttttggagacagagtctcactctgtggcccaggctggagtgcagtggcacaatctcggctcactgcaacctccgcctcctgggttcaggcaattctcctgcctcagcctcccgagtatctgggactacaggcatgcgccaccatgcatgggtaatttttgtatttttagtagagacagggttacaccatattggccaggctggtctcgaactcctgacctcaagtgatccacctgcctcggcctcccaaagtgctgggattacaggtgtgagccaccgcacccagctggaagcccctgcttgtaatggggcagagcagggacagtgagtgagacatgctgctctgccggtggggaggatggctcctgccaacatccaccaagcacttcctacccagaatccaggactgtgccaaacactgcatgaattcagtcactgaagccctgcggcacttctaggaagcactggttgttctaaacccctgttttgaagctgaggtaactgaggcagaggagttaagtaacgcccagagtccacaggctgggctcttcccaagggaccgcctcctgaaacccagtcttgctcatgggctctctgggatcagatatgacttggcacaactgtgcctcaaacttcccccacatgccagctcaggcatagcatgccttgggggaaagggctgacagattggaaccacgtctagcttttgttggggctcagaaaacagtgcccccaaatggcctcagcagcagcctcagaagaaaaagttttcctctgaccttctcctgcctccctctctcagtccattctcctggaggcaccatagaatccctcttccccaaagcggggcacagaaaccagaactcctccccaaagccagccacaaaacctaaaaatacgactctaactttccctccgcctttctgtgtaaaaattggttataaagaaattcttggccgggtgcggcagctcaagcctgtaatcccagcactttgggaggctgaggtaggcagatcacctgaggtcagaagtttgagaccagcctaacatggagaagcctctctactaaaaatacaaaattagccaggcgtggtggcacatgcctgtaatccgagttacttgggaggctgaggcaggagaatcgctttaacctgggaggcagaggttgcggtgagccaagatggcaccattgtactccagcctgggcaacaagagcgaaactctgtctcaaaaaaaaaaaaaaaaaaaaattctttgggctgggcgcagtggctcaagcctataatcccagcactttgggaggtcaaggcgggaggatcacctgaggtcaggagttcaagaccagcctggccaatatggtgaaaccccgtctctactaaaaatacaaaaatcagccagttgtggtggcgtgcgcctgtaatcccagctactcgggaggggagactgaggcagaagaatagttcgaacccaggaggcagaggttgcagtgagcagagattgcaccactgcactctagcctgggcaacagagtcaaactccatctcaaaaaaaaaaaaaaaaagttcttcgacctactttgtttgactgtagttcataagacccccgattccagagggtcctgccccacacccaggagaaaggaatgctactcagagaggccaagaaggatctagacagacaggccttgctgggtttccccactcagtctatcagcattcgatcaggccctttttatccctgtttctccacagctctccatactttgttaagcctaagcataaaaatggacaatttcccctggatctttgggtcttcatgctgaagttaaatacatgttaaatacatttgcatgccttttctctcattaatcagcctcatgcaggtgattttcagcaaacctccaggggccaagggccttggcccccacacttttattgtttgcttacatacctagtacatgggatttgtttcttaactgtgtgttcctttaattcatttatatgatccatgctggtgaacttgggaatacagaactaagctttattgaaattactgaaggctgctgggggtggtggctcacacctgtcatcccagaactttgggaggccaaggcaggtggatcacctgaggtcaggagtttgagaccggcctggccaatatggtgaaaccccatctctactaaaaatacaaaaattagctgggtgtggtggtgtgcacctgtggtcccaggtactcgggaggctgaggcaggagaatcgcttgaacccgggaggtgaaggttgcagtgagccaagaatgtgccactgcactccagcctggatgatagagcgagcctccatctcaaaaaaaaaaaaaaaaaaaaaaaaagactgaaggtaattattgaagttgccatgagaagtcactgcaacagtagagagatgagaacacaggaactcctggattatttggtggcaaagtggggtggggagaggagaacacttctgccccagcacaacagcagaggaaatattggcactcagcaaattagaagtcctctcccagccctgcccaactgcctgccttcatcctggtctctctagtagtcctccttttacgttagtgaaggagacaactcaagcttgtgcctgtatccagtgggaaggactctcaggacttcatcaggacagacacatcatcctgtctaagaggtgtcatcttcctttggctctgcccaactgccacatagccaaggcacttcatactacagtgatatggtttggctgtgtccccacccaaatctcatcttgaactgtagctcccataattcccttgtgttgtgggagggacccagtgggagataattgaatcatgggggtggtttcccccatactgttctcatggtactgaataagtctcatgagatctgatggctttataagggaaaaccccttccgcctggttctttcattctttcttgtctgctgccatgtaagacgtgccttttaccttctgccatgattgtgaggcctccccagcctcgtggaactgtaagtccattaaacctcttactcttataaattgcccagtttctggtatgtatcagcagcgtgaaaatggactaatacacacaaggacaagcaccttatgcaggaatgtacagtttacgtcaatgccattcacagactggctgctgcctaaccaattcctcattccactgagactggaaaataacacaatgactatcgacagtggagagaaataaccttcaaacccatatataatcattttatgaatttggtgattataaatcttattgggtgacccagcaacctcattactgggtatatgcccagaggaatataaatggttctattataaagatacatgcacatatatgttcattgcagcactattcacaatagcaaagacatggaatcatcctaaatgtccattgatgatagactaaagaaaatgtggtacatatacaccatggaatattatgcagccataaaaaaagaacgagatcatgtcctttgcagggacatgaatggagccggaggccattatccttagcaaacaaatgcaggaacaaaaaaccaaataccacgtgccgtgggagctaaatgatgagaacatatggacacatagaggggaacaacacacactggggcctaccagagggtggaggctgggaggaggatcaggaaaagcaactaatggatactaggcttaatgcctgggtgatgaaacaatctgtacaataaacccccatgacacaagtttacctgtgtaaaaaacctgcacttgtactcttgaacttaaaaaaaaaaaaaaactttcaaaatgttgccaccactaccatttaactaaagctctgggtcttttaaaaaaagaaatgattagatgatctaagattgaacttgagagatccctgacagcatacacaacctttcatccaaaatacgtaactggccccttgtctcccggttaaatagtcattagcattcctcagcaatgatcccacagcaacaaagtgtcatttggaatgagtaccaactcatttgctataactatggatttttttttttttttttttttttttttttttttttttttttttgaaacaaagtctcatgctgtcgcccaggctggagtgcagtggcacgatctcggctcactgcaacctccgcctcccgggttcaagcaattcttttgcctcagcctcctgagtagctgggattacaggcaagttccaccacccccagctaatttttgtatttttagtagaaacggggtttcaccatattggccaggctggtctcgaacccctaaccttatgatccacccatcttggcctcccaaagtgctgggattacaggtgtgagccactgtgcccggtcaactatggattacttttaaaaaccaaatcacgcagctgataatgtgacttcccagagcaaacaggaataattttattcatttcacaaatatttcttcccctttttttctttttttcagatggagtttctctcattgcccaggctagagtgcaatggcacgatctcagctcactgcaacccccacctcccggattcaatcgattctcctgcctcagcttcccaagcagctaagattacaggcgtgcgccaccatacctggctaattttgtagttttagaagagatggggtttcaccatgtt

SEQ ID NO: 93769 - DNA, 36873 bp, Homo sapiens
ttggccaggctggtcttgaactcctggcctcaggtgatccacccaccttggcctaccaaagtgttgggattacagacaggcgtgagccaccacaccctgtctgtttcattctttcttgatctttcattgacttctgtgtgaaccaaatccctaagaatctcagacatggacacttacgcatcatcatagttatactgtttctacattatgcaggtttcccagaagaaaataaattcctttaaaagaaaaaaaaattattctaatacaatttgttactactacccaacttattctacaaagctagggcaaggtctaaagagaggaatggagaaaacaaacaagaccagttaaacagtgaaagcaggctcagtgaacagcagaaatctttgtgtgtactcagtcttgtagagacgtttcttcctaaggtcaagagaggcttcatctattcatttccttttgggaagttttaggaacaaagaagcagtatctttagttttgttattgaggagcagcagctgagactttcgtgcatgtaaaatgtcaccactagggactttgagatcttctgccaagctgctcatgacttcctaccttttaaatgtcttgtattctatagtactttaagatttctaaccaattaaattttcttctatatctgcatcacctccattctcatgctcacaatactagcctttgtgcctagaatagacttcagaccatttgctcctcttgttcaaaacacaacccaaacttttctcactggaccctgtgtatacctcactcagaacactgaccatgttatctaggaagggtttgtttgtatatattttcctatttaactctctgccttgagggcctaaccctttgcctatcatagagtaaggccctcagtggatatctactgacctttggcaggagtgatagtcagtcatcatatctgccaacagctatgtgtggtcaattatcatttgcaataagctagtctaaaaaaattatcctgaaatttaaaattacataacaaaacaaaaaaacactgtgcaggacaaagagaaagaaaactgcccaaggctggaaaatacaaatttgaacacagctgggagctgtaaagggaaacaagtacaactcttcactgatattatgaaaagtcttttgtaatgaagcatcagaaaattaaacaatcatacgatatgtactaatacaaaatagtgcacattatgctaatacaaaagataagacagtggagtggtttagggcatatgcttgggagccacatttcaaagtttatattctggctctgctacttccaagctatgtggaattaggcaaattacctaacatctctgtttctgtagcttcatcctttgtaaaatgcagattctactattgttctcctcagtggacttttaataaaaggagttaatatatcaaaagcacttagacaagtggctgacatatagaagcagcaatataaatattttagtattattgtttttgttataattccccatctttaagcatgactcatgacaacaaaaaccagaaatgttaaggttggaagcctaacacatttatatatgtaaatagtaaagaggatggattaagatggcaatgtgggtcattcattacttttaaagggggtcttaacattatacttttaggcgggtgcggtagttcacgcttgtaatcccagcactttgggaagctgaggcgggcgggtcgcttgaggtcaggagctcgagaccagcctggccaatatggcgaaaccccgtctctattaaaaatacaaaaattgggccaggcgcggtggctcacgcctgtaatcccagcactttggggggccgaggcgggcggatcacgaggtcaggagattgagaccatcctggctaacacggtgaaaccccgtctctactaaaaatacaaaaaaattagccgggcgtggtggctgacacctgcagtcccagctacttgggaagctagctgagtcaggagaatggcgtgaacccaggaggcggagcttgcagtgagccaagatcgccccactgcactccagtatgggcgaccgaacgagactccgtctcaaaaagaaaaacaaagtgtatgtatacatatacacacacacacacacacacacacacacacacacacacacacacaaattagccgggcatggtggtgcacccctgtaatcccagctacccaggagactgaggcaagagaatcgctgaacccagaaggcagaggtttcagtgagctaagatcgtgttactgagaggtgacagcgtgctggcagtcctcagagccctcgcttgctcttggcacctcctctgcctgggctcccactttggcagcatttgaggagcccttcagcccccccctccactgcactgtgggagcccttttctgggctggccaaggctggagcccactccctcagcttgcagggaggtgtggagggagaggcgtgagcgggaaccggggctgcgtgcggcgcttgcgggccagctggagttccgggtgggcgtgggcttggcgggccccacactcggagcagccagccagccctgctggccccgggcaatgagggacttagcacccaggccagtggctgcggaggatgtactgggtcccctagcagtgccagcccaccggcgctgcgctcgatttctcacggagccttagctgccttcccgcagggcagggttcgggacctgccgcccgccatgcctgagcctcccacccactccgtgggttcctgtgcagccccagcctctccgacgagcaccaccccctgctccacggcgcccagtcccatcgaccacccaagggctgaggagtgtgagcgcacggcgcgggactggcaggcagctccacctgcagccctggtgcaggatccactgggtgaagccatctgggctcctgagtctggtggggacgtggagagtctttatatctagctcagggattgtaaatacaccattcagcaccctgtgtttagctcaaggtttgtgagtgcaccaatcgacactctgtatctagctgctctggtggggccttggagaacctttatgtctagctcagggattgtaaacacaccaatcagcaccctgtgtttagctcaaggtttgtgagtgcaccaatcgacactctgtatctagatgctctggtggggccttggagaacctgtgtgtggaaactgtatctaactaatctgatggggacgtggagaacctttgtatctagctcagggattgtaaacgcaccaatcagtgccctgacaaaacaggccactcggctctaccaatcagcaggatgtgggtggggccagataagagaataaaagcaggctgcctgagccagcattggcaaccagctcgggttcccttccacactgtggaagcttggtttttttgctctttgcaataaatcttgctactgctcactctttgggtccacgctgcttttatgagctgtaacactcaccacgaaggtctgcagcttcactcctgagcccagcaagactaagagcccactgggaggaacgaaaaactccggacgcgctgccttaagagctataacactcaccgcgaaggtctgcagcttcactcctgagccagcgagaccacgaacccaccagaagaaagaaactccgaacacatctgaacatcacaagggacagactccagacgcgccaccttaagagctgttaacactcaccgcgagagtccacggcttcattcttgaagtcagtgagaccaagaaccctccaattccggacccattactgcacgcccgcctgggctctgtctctaaaaataaaaaaattatacttttataaactctttccttgaagggttaaatgcatatgaggaagcggcacatggacttccttggcgcttcccccaccctccctttctaccttgtgtccataccaaattttgtgatttatcactaagtacaaattattagttaagtgctataaagattcttttgaaataccttttgggaaggatatagaatttattttaagagcataaaactagacaactggtgtttctttattgcttgctttggaactcatattcctattggagttcccaattaggcagtttgcgaatgaaaatttctaaatcttgggctaaagcctgttttggtaacaactttagtccttatttgaattacattagtaggcatgtgtacaacctgtaacttctgagatatttggtccttgagacttctagcggcattaaaaatatgacaggttctaggctctcggtacttacacacttttctctcttttttttttttttttttgacaaggctgctaagagaacactgcaatctttgggtagttcacccgttttctttactgtgcaaggttcataaaggcaggcactatgtctgtcatgtttgtcactatatctcccatgccaaccacagtgtgtacttcacataatgagcatttcaaaggcaacatttggtaaagagatatgaatgaaggtcttacactgaagcagtggggaacagtagaaccagcctaagcattagatctgggttcaaattccagttttgctcattatctatgtgatctacagcaagttgcttgacaaactttaatttttacttttttgtaaaatgggaataatacctattatataaggattataagaatctataatcatttattaaaactaaggagtgtttagtgttttcttcgtaatgtgtttcaaaatatgggctttaaaaattgagtgaaatacaattcctgtccttaataaatttccacatacgatagtaagacaaataaaaaaatactacggaaattttatgggttttcaaggtcgggagtgatgatgtgtttgagggaattaggaaaggaggtggcatatgaaaaagtccttaagggatatttaggatctcagcagttaaaatgggtaggcatatccaaggtaaacaaagagaacataagcagggaggtaaaaaggtactgagtgtgactgaagaagggccagttactcctggctgaactgtaaggttcgcacaggaaagtagagatacgtcagaaatgtgtggtggggccatattagtggtgacaggttctttctttaatccagtagacaatgagaaacgctgatttgggtctatggcataataggaagtagtatgccacatactgcatgtgggagttctgcaggacagattgggaagtgcatgcgtgtaagactgggaagaccagttaggagaggctattgcactgttttaagtaagacataataaagccctgcaccaggcggagagcagaaggaacgcacagaagacgcaggagaggcacatktcagagagaatccagtatgcaatggatgtcgcacacaagagagagagacgcaggtgaccggagccatttacactaatgggtaaatctcgggaaagcgctggtttcggctaccggccagttacaggtttgaggtgcccgtcgccgccaccttccctttttttatattcctctttttctcatggccgcctccgcttccctccatctctcccgcgctagtaactgagctttcagtcatcgacctgaccctgcgttttccctcacgctccgattctgcttcctatcactgcctcctactgtactatcacagccaggacgagcacgggtcaggcactgaggctgtgggacactccacccgcctggtcccctatcgcctccgcctaggcagctgccatgcgtgcgcccccacagctctaggaccaataggcaggccctagtgctgggactcgaacggctattggttggccgagccgtggtgagagatggtgcggtgcctgttcttggccctgcagagagctgtgggcggttgttaaggcgaccgttcgtgacgtagcgccgtcaggccgagcagcccccaggcgattggctagacaatcgaacgatcctctcttattggtcgaaggctcgtccagctccgagcgtgcgtaaggtgagggctccttccgctccgcgactgcgttaactggagccaggctgagcgtcggcgccggggttcggtggcctctagtgagatctggaggtgaggcgggcggtgaccgagaagaggggcaggggcggcggggagcggggcggagatgggtgggagcggggtttgggctgtgttggtggcaattctggagcttccctcggccctgggaagtggctaccggcagctcctgcggacctggagggggctgcggttgcgctttgtcggtgtggcagctcggacccgcggggactgcaaggaatgtccttgaggcccggcaggccgagcggcggccggcatcagtgccggagtaacccggggtcccggggtgggcttgagaggcgggcggcggtctggcctcttcgtgactgcggtcatcatcggtggacccgcggggcgtagctgcgttcatcgtccctgttcagtcagagtaggcagtgctggctgcacggtcacgaaaatcggggcggaaagggtgtcaggcagggtgacctcggaggcccctggattcgagaaatgctaggggtctatggggctgtcgggccggcagctcgcagggcagacgggagaagcgcctgcatcccgggatccgggcattcacgcccaggaactgctgttcgttagcacctttcttttaggtgacgggaaagatctctgtaaatactgctgactaacttagaaccatgaaagaaccgtggattggtgtagatgtgtctggttatttacaggagaacggcttgagaggatgcggagcccaacgtggggattcgcacaatgactcaaaagattcttctccctctttttttttttttttttttggtaaggggtgtagtctccttggtgctgatattcttttaggaaaaatgtaccttggagatacaaatatagaacagttaatttctgcagtaggaggaggtcgatgtactccattcttaagtagtcgtttgaaatatttcaggatttgaggatattccttcttagacatggtcctgcagagtcgtaggaagcatttgtttctgggctatactaaatgtgcatgatttcggcgtcccacaaggtagagaatgtactttttgtttacttatgaatttattttcctctccatgcagtgaaaggcattttgcaatttagagataatctagcaaagacctggacagtactttggggataggctggattttgcaggcctgctttgttgtagtgttcttccagaacttatgataaacttggtggccaaaacaaatgggaattagtaacatgaaggttaaacaaaattgcacataggttacagcattaacatgaaaattgtcgggtatgtgggataaccatttcaagataagagtgtgagtatgcgtgcatgcacacactctttgtattcctttatggtctagtttctagactrtagatagccacattatggaattacatggtctacttaggttgacccatgtgaaattgccagtatttaaaattcaactaacctacaaaaatagcagtttcatatgattccatttaacacttatctttgtcagagaactttggagctctagcttcataagtgaatgaagagaatagatatgacttaaaaaacaacatgtaatagaatgtgagctaattgggtatagaatccagatttcctgattgccagtgcaagattcgtttttttttttttttttttccttctttctggaataccagcttgagcagcagaatgctagatcttgttgggattgaaaatgactgccatataagacgcagttcttggcttcaaagagacaaaatgtacacatttattaatttgagaacactgtgagatagtatataatcaaatactggaatgtgtaatgcaggcggagtgctgagtaggaggaagtaagatgccaaaacatccttttctgcagttggccatggtaggtggcttctgtagcagattggattgacatttaagaattatccattcttttaaagaatctgtaaaagtttgcagcatactttttagtctgaataagtaaggcataccttgcctatttgtttctttaagtaaaattaatttttggccgggcgcggtggctcacgcctgtaatcccagcactttgggaggccgaggcgggcggatcacgaggtcaggagatcgagaccatcccggctaaaacggtgaaaccccgtctctactaaaaatacaaaaaattagccgggcgtagtggcgggcgcctgtagtcccagctacttgggaggctgaggcaggagaatggcgtgaacccgggaggcggagcttgcagtgagccgagatcccgccactgcactccagcctgggcgacagagcgagactccgtctcaaaaaaaaaaaaaaaaaaaaattaatttttattgcagcattgcataaatactgtcaacttaatttgcaggagctatcctgtagcctgcttgtgacatttgcaactgctgatgaaggtggacgattgaattctatggcatgtaaatgctttgcgtaatcacagggcaacggggaggatgttcctgagaaatgagattgtttataattatggttacttttgacacaccctcataagattgctcagtttgtttccaaataggtggagttctctgtgtttaggggcggctgacagaatcatgtgtaatttttttccttgaatattgcaaagatgactttacacctaggaaaaaaagtcccagaattacaatgccaccataaaatcttttgagggaaaacataatgtgtctaatgtataattatgggtttatgatgttaaaccaatttgttcacaagttagtgttccttctgggttgcagctaagattttaactcaaatgaattaactttttaaaacaatgaatctgattgacataatgaggaataatctgagctgaagagtttttttttcagggaaagagggttagaaataattttgacctaattttgaaacatgtagttaatttactttctggaactttgatgctaattgatcctttagaacagttggtagagttgtgttttaaatgtaggaaagaaattatgtgatagaataccatgatgaaaatctagccttttagtgagtgagtcttttgtttataattaagtagagttcaaatctaagatttgattaaagatttccaatacttaaaagtccaagtacctgctaatttaatagaaagtattttgttgctgttgttcattttccaggatagttccaagttgactgtctctaatctgaagatctgaaatccgaaatgctccaaaatctgaaatttcttgagcaccaacctgacactcaaagaaaatgctcattgcagcatttggagtttggattttggattagggatgctaagctaataaatgtaatgcagatattacaaaattcaaaaacatccaaaatctgaaacgcttctggtcccaagcattttggataaaggatactcagcctgtatgtaaaatgtttctccttcccgtaccccattaataagttccctgaatgctctgcatttagccttaaactagagggcatgggttacatccatatctaggtgccttaaaaaaaagtcgtctttaggtctgtttcaagatgtgtcataaaatacatgctactatagcttaagaatttaagccagcatttgttgagcaatgctgtatatgagtgcaaggtgctggagggtaaattgatgaataagactcagggtggaaggttgaaaaagcatgagtaaacacaggcaggtacatgccacatttatattcctttaggtactgccagctttttaaaactgtgacccacagtaggaaatacacgttaatttaaaagccagacacacacttatataggtatagtttcttgaaacatagttttaagaaataatacctacccatactacctggcttacccaacagctattttttataatattgttttctattttattttatttaaaaatgtttgttcttaacgacaaaattgatgtcatgatgtaattgatgcagttgttgtggatcaacagtttgaaaactgtttagctagtggtgtggtatgtctgaaatgtagagaacatggagtgatgcagtgagagatgacacttggtatttgctttggttccttaaagctgctctttttttttttttttggtctttcccctaaccctttataaatagattaatgctttctttcacttacttgattgcctttttatagtctgtcttcaacagatgaatcacttttatttattactaaatgtgagattcatttgaattcttgctagagtggcagttaatgagctttttaaatctttttggttgatttttgcaggttactaatatgccttatcacaggcattgattttagtgaaagaagtaagacttgcaggtttatttgtggagaccaatggtaatagaagatttgttttcaaaatcagaatgtcataattattatttagcaaacaggaaatttagtcatggtagtcagtaaatcaaaatcttctatatgttcttttgggaatttttttgaatgctatatacagatacttcagccagtcatcctcttctagtactgttccagcttttgattagttgtgaaagtttggagcttttcacatctaatgcttttccattggtcttctagcactattgttgatgawtctgctagaagaaaagcagccaccacagcaaaattcttaaccctgttttattaatgtagaaacatctatcagaaaagactttttttctgttgacagcaatgttaggaaggtttattaaacatccttttgctagtgacattatgccatatgttctatggaatgaaaaagtacaagaggtccctgcccttgaggatcttatcaactaacatgatttatagcaggacactcaataagtggattcttgggtgtttaccttttgtgtaatcagaatgtagatgatgaagaagatacttaacatgcrttttatatctaggtaattagaaaatgtgaatagctgtttctcacttgtgttttctgcttgattgctcttctacttgcaaggcttaggtaataaggtcgagatacttatctggtttgatcttaaatgtttgaattcatataatttttaagaaatggctgctttaaagttggttgccagtaagtaataaaggatttattgtttgagtgaagaagaaataacatarttctcttaattttataattattttccagaattataaggaacagtatcaaatagtcatatgtatgggacactgtgcatacaaagcagggtttatagcacacttttccttaaaatcttttcctaaaaatacaatgagctgtatactaagtgttcacccttgatattccttccaggatccaaggattctgtagctacaatgttgtcaagactttttcgaatgcatggcctctttgtggcctcccatccctgggaagtcatagtggggacagtgacactgaccatctgcatgatgtccatgaacatgtttactggtaacaataagatctgtggttggaattatgaatgtccaaagtttgaagaggttagtgaagttaatttgatactgactaaagtaaattacattttcaatttttgaagagcccttaagcccctatagggagcacataatttttaaaagttagagtaaaatatttattttagtattttggaacttacctcaaatttctgcttacatggaatgcactggaaatgctcttattttgctttgtctttacaaatgaatgtaattgactttatttgagaaatacatcttttataagtgactaatagtcaaaaatgattgtgggccgggtatagtgactcatgcctgtaatcccagcactttgggaggccaaagcaggagaattgtttgagcctaggagttcaagaccagcctgggcaacctggacaacatagtaagacccagtctttaaaaaaaaattaaaggccgggcacggtggctcatgtctgtaatcccagcactttgggaggccaaggcgggtggatcacgaggtcgggagatcgagaccatcctggctaacatggtgaaacccgtgtctctactaaaaaatacaaaaaaattagccaggcatggtggcgggctcctgtagtcccagctactsggraggctgaggcaggagaatggcgtgaacccaggaggcagagcttgcagcgagccgagatcgcgccactgcactccagcctgtgtgacagagcgagattccatctcaaaaaaaattaaaaaattagctgggtgtggtagcatgtacctgtagtcctgctactcgggaggccatggcaggaggatcccttgaacctggaggttgaggctgcagtgaactgtgattgcaccactgtactctagcctgggtaacagcatgttaccctgtctcaaaaaaaaaaaaattgtggtgatgtattggcttaccacagtggtttgattaaaagttggatttaatttttgatttgtaggtttgatatttttattggacttgtattgtgcttacatttatgttctcatgactatataaatgaattacacatgcaaaataaaaattcttagttttgattacttattttaaaagtcaaagctaatggaatttccttttctttctctcctattaggatgttttgagcagtgacattataattctgacaataacacgatgcatagccatcctgtatatttacttccagttccagaatttacgtcaacttggatcaaaatatattttgggtaatagttttacatatttaacttctggtgtcatcagatttttgatttgctgtggaaataaacctgttcattcaaatcatgtatttggaaatatgtgtattgctgaaagtgtgctgcatgcattgaatagtttccttattattggcaattagacattctgaaatttgagaccttaataatttggagtaaactagtattatctcagaatgctgtgtgacactgttattatttgtgtagtaaaggataaagtttttttagtattgaacttttgtcattttaggtattgctggccttttcacaattttctcaagttttgtattcagtacagttgtcattcacttcttagacaaagaattgacaggcttgaagtaagtatttaaaacctaaatatactttctgtcaaaatacattttaaaaaacttttcttccccatgctgtaaaggtacattttcaaaagttaagaaaataaggggaaatttttttgtataattttactattagctaattttaataactattaacattttggcatatatccttttctactgtttttatacttaaagaaaatatctgatatcatatatattgttttataatttctttatgcttaataatagtttatcaacatctttccatgtcccttttttttttttttgagatggagtttcgctcttgtcacccaggctggagtgtaatggcaygatcctggctcactgcaacctccacttcccgggttcaagcagttctcctgcctcagcctcctgagtagctgggattacaggcacctgccaccatgcccatttaatttgtgtatttttggtagagactgtgtttcrccatgttggtcaggctggtgtcaaactcctgacctcaagtgatccgcctgccttggcctcccaaagtgctgggattataggcgtgagccactgtgcccggcctccatgtccttaatgttaaactaaattgtttgtaatggctatatgtattctcttctgtctaaacgtcttgtagtttattaatcatctaatgttggactgttaggttatgtaattttttttattaataacaacactgtgatgaatgtctttgtaacgaaatttttgttcatatttgtaatcattttcttaagatacattcctagaagtgagacagtggttttgctttttttagagctttgcttttttttttttaagagctttttagtgctattattgccaatttagtttacagaaagtttgtttagtttatccttccacaggtagtgatcaatgaaaatttttatatattccactttttttccctaatggtaatccaaggagatattttttactaaggatgatactttgatacaaaattatcaaaaggtgtttaaatgtaaatatacttacattttaacattaaaaatatttttaacaaatattttgagcaactactatgtttagctttgaggatgccaaagaaatatagggtatacttttttgtctgcagaaaggtacacatactacaggatcatacartatggagggggaaaggttttgttctaaaaagaatttttttaaaatcatactttttcccgttaaatttatctgatcattttgttcttttccagtgaagctttgccctttttcctacttttgattgacctttccagagcaagcacattagcaaagtttgccctcagttccaactcacaggtaagtattatttataagataggaatgtgaatagtattccttttttcagtttacattaataggaaggattaatagcrtttcttcatagcacaagatttaagaattgcccaaagttttaagtttaattctcaagtcccaagactggtctccataagtgccccaggaacagtcccctgtatctaacaactcaattatgattctgtagctactggaatttggaattrcccccatttttctttttgaaagttttcagaacttatggtaataataatttttgggtaaataagagtattttcctagtgaaacacatcagagagcagaacaagatctaatggaagagaaacccagggtagattgattgattgattgatttgagatgtagtctcactctgtcacccaggctggagtgcagtggcgagatcttggctcaccacaaccttcgcctcctggtttcgagggattcttctgcctcagccacctgagtagctgggattacacatgtgcaccaccatccccggctaatttttgtgttttcagtagagacggagttttgccatgttggccagactggtctttaatttctgacctcaagtgatccacccgcctcagcctcccaaagtggtgggattataggtgtgagccactgcacctggccagatttatttttaaaccccttaaattaacactggcattatttcctattttaagtttcatcttaatgttcattagtcactttgaagaacctaaccattttaacaatattatatcagagtatcttgagtataaaatagcacacaattctgccctgattatttgttgatgaaagtgtgtgatcatttgaacatattaacaaggaaataagtttggttttattaatactaatatgatctcataaaatttgcaactaagcttctgtcatggtaggtaaaaatatagaatgttgtaggatttaattatgtgtgatttaaatgacagagttaatgcactacctcaaaggaatattcctaacaaatatcttattcagtggaaagggaatcagggcactatatgttcttttttaaaaatttggctgggcgcagtggctcacacctgtaattccagcacttcgggaggccgaggtgggcagatcacctgaggtcaggagctccagaccagcctggccaacctggtgaaacccagtctctactaaaaatacaaaaattagctgggcatggtggcgggtgcctgtaatcccagctactcgggaggctgaggcaggagaattgcttgaacccaggaggcagaggttgcagtgaaccaagatcacaccattgcacattgcactccagcctgggaaacaaagtgagactacatctcaaaaaaaaattttttaaaatcctttatattacaatcatactttgtatcttgaatacctgttagttttatcatattgtatattttactctttgaatagtaatttgatattaatataagccataggatgctctaacatttaaaaaagttgttctgtcccttgccttcattgatatgtttgatctgttttaggatgaagtaagggaaaatattgctcgtggaatggcaattttaggtcctacgtttaccctcgatgctcttgttgaatgtcttgtgattggagttggtaccatgtcaggtttgtaagcaatttttgccatattttaaaataggtatgtcgctaaagaggaaaaagaacatcttggatttgtattatttattgttaaattctgacttttaaattactcttaaaattttttattatattagtgtgtgggtatatctggcctgtttgctttggtggaaacttagcagcaggttactgatttatttttcactcctgccatcctctctttgtgttccactttgtgatatttttattcatttgatttcttttgtttgtttttttaaccaacattgcattccaaggttggtctggaaaacactttccagcccctgctgttacttagactcaattggtgacttggttctttgtgttttaattatcatgtagggagaaaagagtcaggaattggacagatctgagtaagattcacctaataaggtgattggaaatatttaatccgatagtaagcagtacatctcagcaagtacccagcattagcttcaacacatgtttcttcattcttaattggatagtagagaattagatattaatatcaaacataggacttcattatgtagaataaaaattacagactggcatggaaatttgccagaaggaatatattacgctgtgtgaaggtctcctaatcattaggattatattttatggctttcttataaagaccatacttggttaactactgtgtatttcctggtaccttagagccctcaatgagatgcctcattctttcagaagtaaattatctaacttttaagggggtaaattattgtcattagtttaggcctcttcagtagatagtatattaaaaatgtaatattgcttctaactttctgagagcaaattattatttatttattttattcaacaaagattttatttagcaaataaaatattttttaattttaaaaatttacttactttaaaatttacttttgggagtacaattttatgagttttgacaatgacatagtcttgtaaccaccactacactcaagaaaaaatgttgatcaggtgaaaatgtacttgtttgattttattcaagcaaaagaatatatgagaaggggattcgccaggaagtaatagttgggccatgaaaccatgggattattcattgaaataataatgatgtggaaagcagctgggcgatgagttttgtcatgatatggtcagagaagtagacaaaggaagtgattagatttgtggttggagaagacagtgagacatttacagctatacagaaatggtataattagagatttgggttacggtaaaaaaggacagatttaacacatattaacttggaagtaaccctttgaaaaagccagtacaaaaagaagaaagtcttagcttcttggatgtctgtggattggtgctgtttctttgtgtgtagagagacttatctggggacacagtaaggaagaatgcctggagagcatatggcaacaacatgagtgaatattgtgcagagagaaatagtagatagtcaagtcatgaaagcattggtcaagtatggttttaatggcctcaagtttgaaaagattatattcagctactatttaaaatgtagtttgatttataatgcttttgttattgtgattttgtagtctcttgaatttccacatttgagggtaatcgtggaattaaaaaaatacaatatatgcttgttctagtcagtcaaatgatatcttaaaatttaggtaataaaatacaactttgagtttttgtgagcagtttttataggacaatttaaatttatgtttcaaagcattgggaattaaaaaaatacaatatatgcttgttctagtcagtcaaattatatcttaaaatgtaggtaataaaataaaactttgagtttttgtgagcagtttttataggacaattcaaatttgtgtttcaaagcattgttatgtttgagcgacatcagaaatatgttttatattatactcaagtttatttgtaaagtgagggagaaggatttggtggtcatctaaggtctcttctagcctctataattctgttttctatttgagatcaccaaatgataccttaaacagttgtagtacaatatgtttgttaatttttagtcttaagttggcattttgtattatatcattttccaaacagatcaatgaaataaccaaaattataagaacttcagtaggcatcatagaggttatattgaaattagagtttgttggtacacaaaaaatattattttgaccttatatcaggactggcataactggcaggatattctacttatataaaaaatccttggttaattggcaaattgcttttctcctaacaagtgggattagatcaatagtgtcactggggttttgctctgttagagtagcctgtcctctccttatttaataataaggcactactgcttgacaaaaaggaattggaaacacatatgttttatcaattgtgtattaaacactaccattctgcctggcattgtgatatggggacatgagagaaggcaagagctttgctcttgagggacttagagttctgttgttattcctgctgtttcctaaggcttggcatcacctctaagttgctaattctatttccagtaagtggcaaggagcttaatgtactaatattttcatgttttgtccacctgcaggaagacaaatatatccttgtgatatatgcagcataaaaaataacgtagactttactagttgtatctttaatttttctctaaccaggggtacgtcagcttgaaattatgtgctgctttggctgcatgtcagttcttgccaactacttcgtgttcatgactttcttcccagcttgtgtgtccttggtattagaggtaagaccaattcttacatatggcactagtagaagagtaagatttctgcttacacagtttacctaaacagaatcaataccttctaatgtcacactgacttaatttgtagctttctcgggaaagccgcgagggtcgtccaatttggcagctcagccattttgcccgagttttagaagaagaagaaaataagccgaatcctgtaactcagagggtcaagatgattatggtaatgacatggttttcttcttcttttagtatcctcagttccaatctcattatttwtaagatttctttttttctacaattttggcccattcaatgatattgcacccccttcttcctttttttcttaatgtgttcatttctttgaggctcctggtctttattagcccctctctcctaaacagactttttaagttcccccaccttatctctcgttgaaagcctgttctttggggtgttttcagtagttcagtggggtcactactttagttagttgcatagcaagcttggggctttttttttttcatggtaaggggaagctatgagagataatgtctggctgtccagttgctagggataagaaatttaagttctattgatatgcagaggatacattactttaaaaattttatttcagtctctaggcttggttcttgttcatgctcacagtcgctggatagctgatccttctcctcaaaacagtacagcagatacttctaaggtttcattaggactggatgaaaatgtgtccaagagaattgaaccaagtgtttccctctggcagttttatctctctaagtaagttaattgaaatctactttgtgatatattaatcataacactctatgctaatgtaagtttagattgtgtcctttacatttctgaataagattttaatttgytttcttttatttagaatgatcagcatggatattgaacaagttattaccctaagtttagctctccttctggctgtcaagtacatcttctttgaacaaacagagacagaatctacactctcattaaaaaaccctatcacatctcctgtagtgacacaaaagaaagtcccagacaattgttgtagacgtgaacctatgctggtcagaaataaccagaaatgtgattcagtagaggaagagacagggataaaccgagaaagaaaaggtaacttrttattctcttcgctttcaatccttcattgctttgtcaaaaagtagtctgttttcaaaattatgtgccgtgttgtgagatttcttttgatttcttgaacagttgaggttataaaacccttagtggctgaaacagataccccaaacagagctacatttgtggttggtaactcctccttactcgatacttcatcagtactggtgacacaggaacctgaaattgaacttcccagggaacctcggcctaatgaagaatgtctacagatacttgggaatgcagaggtgaggatgataacataaactccaatgtggcatttttcattacaaaggagctttttcaaggaagaaaaatctagtatctgctgaacactacagctaagttctgggcacggtgtaacatgactaacagatactatcttctttctttatttcacacaaccttgagaggtaggtacaattatctatttttcagatgagaacattgaggctccaatatgtttaatttcccaaagtagtacctctaggaaatgataaagctgatagcagggtccaagattttctgactccagagtcaaaactctttctagtttattactgtttatcatagagatgagtgactactgtattctcataggtgtgttgaggcctagaaagagtttaacacagagacaagtttcaaagatagaagaaagtttgtttttgttttgttttgtaagcttgatacccatgaggaagtttgcttttctttctgacatttgaacaggaccttctgcctacatgaccatatgaatctactcatgctttcatgcaaataatcatgttccatccatgtctgcttaatatggttctttcttttaaatatatgttaatacgtttattggtaaaatgcaattttttgccagctttattgaggtatacttgacaaaattttattttattattattattattattattattattattgttttggagacagagtgtcactctgtcacccaggctggagtacagtggcaccatcttggctcacagcaacctccacctcccaggttcaagcgattcttgtgtatcagcctcccgagtagctgggattacaggcatgcgccaccatgtctggctaatttttgtgtttttagcagagatgggatttcactatgttggccaggctggtctcaaactcctggcctcaagtggtctgcctgccttggcctcccaaagtgctgggattacaggtatgagccactgcatgcccggcctgcattcttcaatcatatgctttttagctaaacttagtcattgttctttaaatacagttcccaactctgggttcctattcttgtcatctgacatgtctccccctctccaggtgttcacacctttagggcaaatgctagcatctctatgaaacctacctcaattccgccaaacagaagtaacctttcttttctgaagcatccattatatagagactgtgcatttttaatggcagtcgtaccttgttgcttatatcacatttacatgaatatctccattattagacatcgggctcttagatggctaagtccatgtcttgagagggccttggatttcataggtgctcagtaaacttactaagagaatgaatgaatttgcattgataatacataaaccagctaatgtttatcttactattcttttgaaaaattaggctaatattagtgtttgcaaagaagatccttgaataaacccacaaaatggaattactggtaccagttttgtggagggtggtgattgtgagtgtgtgtgtgtgtatgtgtatgtatgtatatcaccaccacaagcagagtcaagagacagctaataaaccaagagaaaatattggcaatttatatttaaggctaaagggctaatctctaatatataaagagctcctacaaattgatgagactaaatttttatctaatttttaaaaagagcagataatcagtctattgtcaggaaaaaagtacatatggctcttaaaaatgtgaaaaggtgattaacttcatcctaagagaaatgcaaattaaaattgtacttgagatattttcactcatcagattggcaataatcccaaagtttaataacatactctattgaggttgtagggaaaggtcttttcttgtttttttgggtttttttttggtttggtttttttttttttgagaaggagttttgctattgttgcccaggctggagtgcaatggcatgatcttggctcaccgcaacctctgcctcctgggttcaattgattctcctgcctcagcctcccaagtagctgggattacaggcatgcgccaccattcctggctaattttgtatttttagtagagacggggtttctccatgtttgtcaggctggtctcaaactccggacctcaggtgatccgcccgccttggcctcccaaagtgctgggattataggcgtgagccactgcccccaggctggaaaggtcttttcttacattggtggtgagaaggcaattggaccgtgtttattcaaattaataaatttgtaaaaattataaaaatttataagattgtaaatgttcataccctttggcccaacacttgtgtgaatatatacccatatgtgtgcgtgtatatatatatatatgcatatttataatcatgcctaaaaacatctctggatggatacacagtgaaacagtggtacctatttatgtgtaggtagcaaagaactgggcagatggtagacagggatgggatgaagactttttgttatatctcttttaatatttagtttttaaaccatgtgaatatattgcctgttcaggatatcaaaaatagcaagtttactagagtttaaacaatagctgttatatctgacacacacttgaaaccttgctaaattcacatttatttttctttttatggtgtattagtgcaagcctgtctttgtattgtaaaatctaatgatayggtatttatattatttttgtttggcattttttgcattaaatgaattattttgcagaggtatcttttaattaaaaactacagtgatttaatttaaaaattacattattttagcttagcattgtttgtattaaatggtttataacatgaaatacagtccttcaagtcttctgtttcatctctctctctgaccacaatttcattttttttctccatttctttagaaaggtgcaaaattccttagtgatgctgagatcatccagttagtcaatgctaagcatatcccagcctacaagttggaaactctgatggaaactcatgagcgtggtgtatctattcgccgacagttactttccaagaagctttcagaaccttcttctctccagtacctaccttacagggattataattactccttggtatgttattttctcgattaagagagatttgctttgtatgtttttaatcttttttcttgattagtttcatatatgtacatagttttataaaacattttccttttaaatcattttatcctaattttttattctgcttatgatgtaggtcatagaaattaaaaatatatttcctgcttttatagtcattactcaaagattttagtattttaaacactttttaaaggtgaattaaacattttgtttaaaaagaatacatactaaaggattaagtttgaagatagttatactgacaagctgagataaaattttgtgcatttactatatagattttcatttggtgcctgactttaccttttaggtgatgggagcttgttgtgagaatgttattggatatatgcccatccctgttggagtggcaggrcccctttgcttagatgaaaaagaatttcaggttccaatggcaacaacagaaggttgtcttgtggccagcaccaatagaggctgcagagcaataggtgtaagttggcatttatatatttgccagtttaaaaatacatcatargtaaggcaatgagaagagttttaaggacaattagtgataccttttgggtcaagcatgagcatttttgggtaacatgtgcttgcttctctaacatatactgtgtagcttggtggaggtgccagcagccgagtccttgcagatgggatgactcgtggcccagttgtgcgtcttccacgtgcttgtgactctgcagaagtgaaagcstgsctcgaaacatctgaagggttcgcagtgataaaggaggcatttgacagcactagcaggtgtgtgagtggatttgtatgtacagttatatctatttgtttattttagaaccagtgtcattttctgtgattaccaaacataattgttaacatattacctgctaaagagcacataacagaatatcaactttaaagccattcatttaaaatgagtaatatttatgcttggttggggggaaaaaaagaatgttgattcaaatgaatagctccacagaggtaaattagtaagaaaaaaaaaaaagtgtgagctagtaattttgattagatgttactttgcctaggagagaactgtcttagaaaaaaagatttttcaaataggagagaaatattagtataataagacttacttcaaataaagaaaattaataaagtagcataatcaacacaaatgataaccatagtatagttcaagctaacacatttgtttttatgtgaactgtgtaagtttattaagaaataattgtgactgggcgcagtggctcacgcctgtaatcccaacactttggggaggccaacgcgggcagatcacttgaggccaggagttcgagaccagcctggccagcatggcgaaaccctgtctctactcaaaatacaaaaattggctgggcatggtggcccgcgcctgtaatcccagctactcgggaggctgaggctggagaatttcttgaacccgggaggtggatgttgcagtgagccaagatcaagccactgcactccagcctgggccacagagtgagactccgtctcaaaaaaaaacaaaaaacaaagaaataataataataaaagaataaaacacagtctttgcatcttttatttatagatttgcacgtctacagaaacttcatacaagtrtagctggacgcaacctttatatccgtttccagtccaggtcaggggatgccatggggatgaacatgatttcaaaggtaagtgtaggcagagtatctgaaagtacttttattaaaatgaaagtacttttataaaaaacaaatcaggcatttgttgattggtattccttacatttgatagatttaatttagacttggcattacacatatcctgagtttacttaggactgggaacaatcttagtattgacatttcaaaactttatccagtcaagagaccacctttgaagctgacctcttcaagatttgtctttaagaacaccaatataatttcagtactttgggaggccaaggcaagaagattgcttggggtctggagtttaagaccagcctgggcaacacagtgagatgctatctctacaaacaataaaaaaaaatagttgtgcatagtggcacacacctgtggtcctcgctacacggtaggctggggcaggaagttagcttgagcctaggagcttgaggccagcttcggcaatgtagcaagaccctgactccattcatccatccrtctgtccgtccgtccgtctgtctgttttcaatttaggatattttctgcttatgtggggtttacagcctaataaacctatcaaaagtcaaggagcatctgtataagctttaaaattgccaataaacagtatggcagttcaacaacttaaacatgaaattaccatatgatccagcagttgcacttccgggcatatacccaaaagaactgaaagcagttctcagagagatatttgtacagctatgtttgtagcagcatttttcataatagccatgaattggaatcaaccttagtgttcgttgttggatgaatggacaacaaattagatgtatttgtatgtgtgtgtatgtatatgtctatataaaatggaatattattcagcattaaaaaggaaggaaattatagcacatgatacagcatggataaacattgatgacattatgctaaatgaaataaaccagtcacaaaaagacaaatactgtatcattccacttgaatgaggtgtctagaatagtcaaattcatagagacagaaagtagaatggtggttatcatgggtttggggaaggggaaaatgggtggttgttatttagtaagtacagagtttttgttttgtgagatgaaaagagttctgggagcaaagacatggaaccaacccaaatgcccatcaatgatagaccggataaagaaaatgtggcacatatacagcatgcaatactgtgcagccataaaaaaggaatgagatcatgtcctttgtagggacatggatgagcctggaaatatcattctcagcaaactaacacaggaacagaaaaccaaacaccacaccttttcacttgtaagtgggaattgaacaatgagaacacatggacacagggaggggaacaacacacaccgaggcatgtcggggggttgggggcaaggggaagagcattagggcaaatacctaatgcatgtggagcttaaaacctagatgacaggttgataggtgcagcagaccaccatggcacatgtatacctatgtaacaaacctgcatgttctgtacatatatcccagaacttaaaaaagagttctggggatttgttgcatggcagtgtgaatatacttaccactgtacacctaaaaatgggtaggatggtaaattttatgtgtttcaccacaataaaattatgtttttaattgccaataaatatgttttggattattgaggtatgagttgttaattgaattaatgccatttaattggaagtcattgggaagcttatttgtattttatgtaatataaagctcaacgacataagagtcgaatcacaagatcaactcttatgacccacttctctttacagacttcattacttggggttttaggtaacagctgaataactagaagatggaatttattactcattccccagtgacatataaatatgagtatttttattgaatatttttaacattatcatcttttatctacatctttttcaacaatgactacaaagaacttggttttcataccgagaaagaaacacattaggaatttatacctgaccaagaaagtaattgtgatggttaacaaaacagctgttacttttgtgctcagtttcttygaagtatagttattatacttagaaatatatcatagatacaaattcttctcataaggatgaaggatgaatatttcatgcagtttaatatgtgtgtgttttgggttcttgttaacagggtacagagaaagcactttcaaaacttcacgagtatttccctgaaatgcagattctagccgttagtggtaactattgtactgacaagaaacctgctgctataaattggatagagggaagaggaaaatctgttgtttgtgaagctgtcattccagccaaggttgtcagagaagtgagtgactggatggataatttatcttttttattttgtaatctttaattgtatttaaaaatgggggaaaggagtattaacattttaaataaagttaaatatatgggacagtgttttccatcaaagatgactgttgtaccttgcccatctgtctgtgtgtatcatccataggaacaaactttactgattttttttaattttttttattttttaatggaggacagggcttaaatggggccacatctaaactttgttttctggaggttcagaaagatagatttgggtaacattcccctgaaccttctggaggaacatctaaatgtacacagctctgttttgtaggtattaaagactaccacagaggctatgattgaggtcaacattaacaagaatttagtgggctctgccatggctgggagcataggaggctacaacgcccatgcagcaaacattgtcaccgccatctacattgcctgtggacaggtgagctctccagcctccacttctcttgtgttacgtctttctaagtgaaagaagtatattgtatattttttcttttcttgtttccaggatgcagcacagaatgttggtagttcaaactgtattactttaatggaagcaagtggtcccacaaatgaagatttatatatcagctgcaccatgccatctatagagataggaacggtgggtggtgggaccaacctactacctcagcaagcctgtttgcaggtatgatgtatcaggcatagagtccacaagcctagttctgactctctgggtttctctttctatctgagaytatgtatcactcacctctattttaattggtcttttccaaactctttkgtcatatcagcctaatccattgtgtccaaataagcatgtttaagcttatgcttagataagaaagtagatgaagagagcaaatgaatgttcatctactgagttaagggtactgccagtcaggctgtgaatattatgttagctatggtattatgcactgtcaggtgtggctgtcaagtcttggaaagttagtgcttccagtggagtctagttctattctgatgccattayagttgccctgtttttagttgatttagtaagaaattggtcatgattttaagkgtgaatcttgttgtgtctctccctggctacagatgctaggtgttcaaggagcatgcaaagataatcctggggaaaatgcccggcagcttgcccgaattgtrtgtgggaccgtaatggctggggaattgtcacttatggcagcattggcagcaggacatcttgtcaaaagtcacatgattcacaacaggtaagactcaaagatatatttaacatgttccccctatacttcaaaaaatatgcagtgtaaaaacttactattcatctactgtagttccaagttaaaattctacactcctgatatttatatattgctactttgtcattttctaccataggtcgaagatcaatttacaagacctccaaggagcttgcaccaagaagacagcctgaatagcccracagttctgaactggaacatgggcattgggttctaaaggactaacataaaatctgtgaattaaaaaagctcartgcattgtcttgtggaggatgaataratgtgatcactgagacagccacttggtttttggctctttcagagaggtctcaggttctttccatgcagactcctcagatctgaacacagtttagtgctttacatgctgtgctctttgaagagatttcaacaagaatattgtatgttaaagcatcagagatggtaatctacagctcacctctgaaggcaaatataagctgggaaaaaagttttgatgaaattcttgaagttcatggtgatcagtgcaattgaccttctccctcacycctgccagttgaaaatggatttttaaattatactgtagctgatgaaactcctgattttgtagttaatttattaagtctgggatgtagaacttcaagaagtaagagctaagttctaagttcatgtttgtaaattaatacttcatttggtgctggtctattttgattttggggggtaatcagcattattcttcagaaggggacctgttttcttcaagggaagaaacactcttattcccaaactacagaataatgtgttaaacatgctaaatagttctatcaggaaaacaaatcactgtatttatctccgcaggctatttgttcagagaggccttttgtttaaatataaatgtttaaatataaatgtttgtctggattggctataacatgtctttcagcattaggcttttaagaaacacagggttttgtattctttactaaagatatcagagctcttaatgttgcttagatgagggtgactgtcaagtacaagcaagactgggaccttagaaatcattgtagaaacacagttttgaaagaaaaataccatgtctctaagccaactttaattgcttaaaagacatttttatttagttgaaaaatctagttttttttgtaaactgtatcaaatctgtatatgttgtaataaaacttatgctagtttattggaagtgttcaagaaataaaaatcaacttgtgtactgataaaatactctagcctgggccagagaagataatgttctttaawgttgtccaggaaaccctggcttgcttgccgagcctaatgaaagggaaagtcagctttcagagccagtgaaggagccacgtgaatggccctagaactgtgcctagttcctgtggccaggaggttggtgactgaaacattcacacagggctctttgatggacccacgaacgctcttakctttctcagggggtcagcagagttattgaatcttaattttttttaatgtacaagttttgtataaataataaagaactccttattttgtattacatctaatgcttcaagtgttgctcttggaaagctgatgatgtctcttgtagaagatggactctgaaaaacattccaggaaaccatggcagcatggagagcctcttagtgattgtgtctgcattgttattgtggaagatttaccttttctgttgtacgtaaagcttaaattgcttttgttgtgactttttagccagtgactttttctgagcttttcatggaagtggcagtgaaaaatatgttgagtgttcattttagtgactgtaattaatatcttgctggattaatgttttgtacaattactaaattgtatacattttgttatagaatacttttttctagtttcagtaaataatgaaaaggaagttaataccaataagtgtaagcagtaaccttttttctttggattaaccctagccctgaggtctggaagcttgtaaagtctggtcatagtagtaacctgtaattcatgctaggactcacatgaccatttattctcaaattctacaacattgattgatagcagtattctattacattaaaatgagctctcttagagggtttgattagttcagatttatcatctcaactagacatcttttggatagtgagagtgggagggctagttaaggagaagaggggcagccacaaccaaacagccattgcaagcatttaagctgtgtgagctgaattggagaggggaatttgtacagcttggtatagctgaggatggcctctttagaaattactgtgagtcagtaatttacagaaaattattgactacacttttgctgtaattagaggtaaaaaggtatgtgtgagcactaagaaagaaccaaggcccagatactagagaatcagtttgagtttttctctgaaatgacctgtggtcacctgtatgctcagccctctccagggtggaacaggctggacagaagagagtgaaggatctttaagcctgctctctgcctgggtgatctgctgagcaatgagatgcatgtggcaggacaggatgtttgatttcaggagacgatacaggattaaatctaaggggcacatctcacactgaagagcaaaacacatcaataccaatctcctgagcattatgttcattgtggagattttttcatgaccagtgtttctcgaagtatgctcctacgctaggtaagtcttgaatttattaattactttgccagttagcaaaaataatgggtaacctctacactggaagccgagagaagatggcagatgatttagtttacaattatatatttaaagcttaacggattgcttttttcattttggtgtgcttggaacacagccctcctacccctatccctgccgcttgttttccatcctgagcaagtttgagagctgcagagggaggtatgggcactcttgcatcaggatgtgagttttctaacagctgctccctaaggccaaaagaagagcctcacactaacagctggagttaggaggctgaatgcaaaagatggctttaatactgcggctctcaaatgagtgtgcatttacccagaggacctgcttaaacagactgctgggccctgccccagcgatttctgattctcttgttctggggtggggccggaacgtggcagttaacagttgctgctgctgctgcactaataggttggaatttcagtatgaggtgcctggtggggcttgaatgaatggttttacaaaactgtttattcagtagcacaaggttgggaaacacctggggagagaccgagtgttggctaataaaaatttaattggaattaacccgagagatgtaataactaactagaaaatgttatttgaatttggtgctcctcacacgcccccctcctgtcccagaacaacactgaaggtcttctccatctcttcaacctgtggagtgactgccccagagagaggcatttgccatcacctattccgtttaccctcctgtttgttccctgcactctgctgcaaagggccaaatagggggaaaaattgagctcctgttaagggtatgtatcactgtccactccccatcctcaccccacctgccctatgaagtttgactcctttgaactttaatgtcccaggattgtagtgctggagcaggattagacccaggcaacagcattccagttggctaattctgaagccagttggcagggagcataaaagtaggagggccttgtgccagctgctaagcatacaaggtgtgtatgtgtgtgcgcgccagctaactaagcatacggggtgtgtgtgtgtgtgtgtgtgtgtgtgtctgtgtgtgtgtgtgttggaaggaaagcatcgggaagtaatccaaactagaagggctatggtcatctaccctgtgttgattatggaagtcctttgctttcatgtcacttgcaaatttgaagtgggctggagtggaggtgggggggttgcagttggggcaattctgtctccactctaaaatcagctgggattgtactcagtagaatccttggacacaataaagcaaatagagtattagccctgcgtgatgtgtgatgttctcctgtagccctgaagctcacgaaggaattaacagaggagcctctaccttcctgcccatttcactgtctagacttgggctataacctcaaagggctcttacaatgaaatcaagctttggtgcacttcctcagtcctttctgatctaagacataacctgtgagctctcgttcttaaaactccatcctctaataacaaaaggtactcagatctgtatggagagctcgcctacctcaggccaatcctctttcaacacacctggatgcttttacccagtggtcccaaacctttttttggcactagtgatcggtttcatggaagacaatttttctacagatggggtggggttgggaggatgattttgggatgaaacagttccacctcaggtcaggcattagattctcatgagtgcaactaaatccctcacatgcgcagttcacaatatggttcttgctcctatgagaatttaatgctgctgctgatctgacaggaggcagagctcagcctaatgctcgctctcctgctgctcacctcctgctgtgcagcctgcttcctaacaggacatggaccagtaccttattcaactgtacaacagttaaataactgaagcttgctggtatagccaagagaatggtaattttaaatggaaagttattgggggaaaagccatctttaacttgctcaggacagcatttaactatgccagtagaactcaaaccttgaacaccccatcagaaaaagttctggacacgcacctccaataattttgttttttgagacagtctcactctgttgcccaggctggagtgcagtgacgcaatcttagctcactgcaacctccgtctcccaggttcaagtgattctcctacctcaagcctcccaagtagctgggattacagacatgcaccaccgtgcatggctaatttttatatttttagtagagacagggtctcaccatgttggccaggctgttaatatttcttgataaattatattgaattatatacattatcaaacaaaaaattaaatgataaaaaatatataaaaataaaagccaaagattttttattctgtactgcagagataaatcttgcccccattttttccagactgaggtctctggaaggcagggactatgtcttttcttgttaccttaaacaagtgccttacattaaaggtctaagtttgttgaatggccgaggcaataaattaatatactccacacttatgccaaacagaaaacagtcacaacagaggaaggcagtgttgagggagctggaaatccagagacttccattccagtccttgctatggcactgactagctgtgagaccttacgctattcacttcctatctcgtcttcagtttccttgtgaaatgacagttggattcgctggcttctaaggaggtatctagctctacgtagtctatgaaatgctgtatttattgtgtcctcatataaacacagaatcagtttatcatccaaagatggaaacatgtatatttttgtagtggatgatatgaatctcatgtgtattgatactttagagaacagcctagtaccttccacagagcaccacagggattgtcagcagaggtgactcagtcaatctttgttttcatcgtctctcctcagcagttgcagctaactagccataaccctttgcagcccagacctactgtgggctgccctgcatttcttttgaccccttgcttatctgccactatctctggctgggagagctggcatctctttataaagcttaagtcctaggggaaaagaagataatggtgttccttttcctggatctcatccttgcaccttctcattgaagttaaaaactcttctgcccctccaggttcatttactgctattcacaacctatccatattttttttttcacttttttgccaccttaaacatacactccattgaaactgctctctgactttaggtggggccttgtgttctactggtcagttgagctgataagctacagcctagcttattagtagagcttctagactaatacaacaagcaatatcatagtagttatataatccaaatacaaaggaaaaggacatattatagaactgaataacagttgagggggtgcagtggctcacgcctgtaatcccagcactttggaaggccgaggtgggcagatcatctgaggttgggagttcgagatgagcctgaccaacatggtgaaaccccatctctactaaaaatacaaaattagacaggcgcggtggcacatgcctgtaatcccagctactcgggaggctaaggcaggagaatcgcttgaacccaggaggcagacgttgcagtgagccgagattgcgccattgcactccagcctggacaagagcagaactccatctcaaaacaaaaaaaaacccaacaaaacaccaccaccaccaccatcaggcttatggcgtaatcccaggattttgggaggctgaggtgggcagatcacttgaggccaggagttcaagaccagcctggtcaacatggagaaacccccatctctactaaaaacataaaaattagtctggcgtggtggtgcatgcctttaatcccagctactcgggaggctgaggcatgagaaccacttgaacccgggaggcggaggttgcagtgagctatcgcaccactgcactccagcctggatgacacagcgagactctgtatcaaaaaacaaaaccaaaaccatttgacttattccctattcaaacgaaaccaggtggcaagacccacagatatttctaaaacgtgtacaataataatgctccaaaaagtccctcggtgtctcccattgctggcagaacaaagatcaaactttacacacttcaaggttttctaccaactgcctgtgcctctccccctagtcttctcccttactggttatgtcctggaggtagactaaaccccagacaagccaagtaacttacagttctgctcaaagcctccaaatgtttgcaacttgtcattattcctgtctcttgctcatcttcctatctctaccattcaaaacccagcacctagcacatatttgtagttgccttagtattccttagtatttgcatagtactttaaagtttttaaagcactaaaatacattatcttgctcttccccaaaccaccctgtgatgtagccatagtaggtggctttgtataattttatagattaaaatagacttagacacattaaaatgatttgcccaagataaaagctgttcaagtgagagagcaagagaacctctggtcttctgacttctaagtctcattctttctcagtatgtttaacacatggtaaccaggaacttggaaatttacttagaaataacaacaacaaaaacctactggatgctgggaatgaaaagtgagtcacagactataaattgtagttttaaattaaaatgaataccattaatgtggtgctatcaatgtacagaggttggtaaacttaaaacacagcaacaacctatttcctatctatcttttgagaactgagaaccaagaattaaaaacacttttgtacatctcaaatgtggctaaatctattgttcaatgtaccttattcaaatgcttctgatctcaaatcctttttttttttttttttttttttaagatggagtcttgccctgtcgcccaggctggagtacaatggtgcaatcttggctcattgtaacctctgcctcccgggttcaaatgattctcctgcctcagcctcccgagtagctgggattacaggtgcccgccaccacacccagctaatttttgtatttttagtagagacggggtttcacaatgttggccaggctggtctcgaactcct

SEQ ID NO: 93770 - DNA, 13001 bp, Homo sapiens
  misc_feature (1)...(13001): n = A,T,C or G
tgttattgtttgtttggtaagaacacaacatgagattatcctcttccatttagaagtatgcaataccatattgttaaacctatgtactatgttgtacagcagatatctagtactttctcatcttgtgtaatagaaacttcatacccattgaaaaataatttcccatttccccctccccccatcccgtagcaatcaccattctaatctctgcttgtatgggtttgaccattttagatacttcatataactggattcatatagtatttgtccttctgagactggcttatttcacttagcataatgtcctctaggttcacatatgttatcaaaaatggcaggatttccttgtattttttaaggctgaataatattccattgtatgtttatatcacactttctgtatccattcatctgtcgatggacatttgggttgtttccatatttcggctattatgaataatgctgcaatgaacatagggtagggaacacatttaaaccatagccccttccagctctcaatctataggatccatagctcctctccaacaggaaaatcatgcactgatatccacctgcattacacataatctcatacattaatggaaaaaattatgcctcgagtcctctagaatcttagattttcatattcaaaattcaggcttttgcagtcaaatcttcttccgccaaatagtaaagaggctcaagagcccattctgaacctcaaacttgagaagtggtttctatttgttttctctgctgtaatattccttccagaggaaattgatacctctagtctagtttgaatggtgagagtatacaagagattaaaaggaacgggaattttttcaaatggttaatatattaaaatgttgtaccctattcctcaactgtgagtgtttaccaaaggattttgtctttgtgtggctgtgcatacatgcagtttggcaggaatacagatcatatgcacagtctggcccccatcagcctgttcttttttctatttgtcagcaatatctggttatatgttcatcagaaatattttgtttccatcattattatagtggcttggattcagagccactagatccatagaatatgcagataaaaagtagaatcagcctattcaacacatttcagtagtagccaagaaaattcaggcaccgagcaggaaaaacaaaaatggaaaagatttatgtgcttaagaattaataattgggtatcactctttgaaccaaaaaagaatgcaagaaatactttatcagtagcaaagctcattagttcttttaataccaattgtaatgtcccaaatccctcctgtctttccaaaaatgttttattatatttgataattttttcattgaaatgaactgaaataactctgaaagaaacttctatacagcttggagcagatgagagtttgggtaagctcaaagatgagagtttgggtaagcagatgagagtttgggtaagccttggagcagatgagagtttgggtaagctcagtgagaatttatatctgtgtcaagctaccccggcttctaattcttttcctaatttatatataactttgattgaatattgccattttctatcaaccgcagttaagtgagatcttaacagaagccatttcaacctgaaactttaaaaaagttcagatgttagtgtttcaatgttcaataatttttatagactcctactgtctctggtttaaatatgagtcaaagaaagagaaagtccaacgaaacccaagtgattcatggaaacctaagattaacttgttgtccagctcatttccagggtcacattgcaggtagatgataaaccatcttactttaaaaatctgcatagaggtagattctataatttttttaaattgcttactctaagaatctatgttctttgtgcttttttttgttttttaaaaaaatcttttaagattataaaaatatttattttttaaatgaacataatatagaaaatattaaagaggaactctccctctccatccccatgatactgcgattagcctggtgctaatcaccaaatacaagcagagtttgagcacttgagtcctcaggtgactcagatgtccctgggacatatctgttcaatcccaagggccaccctccagcactctatgtgtatggagattggaagggaactgtcctgaaggagtgcccatgagaagtttgacctaattctgccagctacctatatggtgtatggtactggcccgttccattactatctgagtcctatgagggtattgggaaatgtgattaaatatcgtaaaagtaatttcactacactgtttacacactggggccaaggcaactaccttaagaccctctctcacattatgacaaaactaagagagggattctttcctggggtcagaggtgctcaagtgcctctgtgctgagcctgatggcacagaagtccggccttactgcccactgggaacagacgtgctggtgagcacattttagaacttcccagctccaggactgggggatttatttggagcatgttttgtaaagagctgtggttccatataacataggaaagaggtaggaccagagaaataagtgtttttactaatagtgtaaaccccttagtatctataggcaggtgagggctatgaaaactcatattaaataaccataactttttatgattcaataattttatttcctagggtgttttgtatactgtatttttcattatttaatgaacaatttatttcatttaatattcttcaaaacatccttttgttttgtactagcttctagatatcccatcttgatttggaaggtctcccccattcctagattgtacacatagtctgttcgatttttcctattttatttttatgatcaaacttctttactcattttgaatatatatatatatgtataaattttcaaagaaaggcctaattttaatttcctccagacagtcaattggggtagcatcatttattaaataacccaacctttgcccagtgagttaaaataccactttgtcatatattaagggctgcatagtatgttatagataccataatttatttaagaaaggcagcatatgtgatagttaagatgtaagatgtagattctagagtcaatggcatgggcttgccatttattagctatgtgatctggagtaggtttcttattttagctcagcaattttttatttatttttattgtataagacaaaaggtttgactaagaaatacattttgaaatgaatatttttttatttcaatagtttttggggtacagatggtttttggttacatggatatgtactttagtggtgattcctgagattttagtgcacctgtaacatgagcagtgtacactgcacctgatatgtaatattttatccctcatccccctcccaaacttcccccaagtccccaaagtccagtatatcactcttatgcctttgtatcctcatagtttagctcccacttctaagggagaacatatgatatttggttttccattcctgagttatttcacttagaataatggcctctagccccatccaagttgctgcaaaagacattcttttattcctttttattgctgagtagtattctatggtgtatatataccacattttctttagccactcattggtcaaaggccacttaggttggttccatatctttgcaattgtgaaatgtgttgctataaacatgcatgcgcatgtgtacttttcttataatgactcttttcctttaggtagacacccagtagtgagattgctggttcgaatggtagatctacttttagttctttaaggactctccatactgttttccatagtggttgtactgatttacattcctagcaacagtgtaaaaagtgtgccctttttaccacatccatgacagtatctattgttttttgactttttatggccattcttgcaggagtaaggtggtatttcattgtggttttaattttcatttccctgatgattagcgttattgagcattttttcaggtttgttggctatttgtaaatcttcttttgagaattgtctatttatgtcatttgcccgcttttagatgggattttttttatgctgatttgtttgagtttctcatagagtgtggatactagtcctttgtcagatgcatagtttgcagatattttctccactgtgttggttgtctgtttactctgctgattatttcttttgctgtgcagagcttcttagtttaattaggtcctgttttgttgttgttgtttttgttgcatttgcttttggggtcttagtcattaattctttgcctaagccaatgtccagagagcttttctgatgttatcttctagaatttttatggtttcaggtcttagatttaactaagtctttgatccttctcgagttgatttttgcatgaggtgaaagattgggatccagtttcattcttctacatgtggcttgccagttttcccagcaccatttattaaatagggtgtcctttcyccactttatgttattgtatgctttgtcgaagatcagttggctgcaagtatttgtctttatttctaggtcatctatttggttctattggtctacatgcctatttttatgccagtatcaaagctcagctatttgtttgctttgtgaccacgggcaagttacttatccctctgtgcctcagtagcctcatctgtaaaatggggataaaatattttgttatttccattagttgatatgttctgttgtggtaacaattcaattccctatgctcagtgcttaacacatcaaaggtttatttcttgctctagtcactgtccaatgtgggccaggtggctctctttggtggctcttctccatgtgatgattttgggatctgggttgcttcaaacatgtggttcctaaattgccatggaagagaagacagagctgaagtgtcactctgagtgatctttggacttaggtctataaatggcatatgttacttttgcctgtatttattgactaaagtcacataatttccaactgaactgctagggaacctgggaaagacagtcttcttttattcccagggtgaggaaatgttttgattaacacaaagtgcagtctctgccataactatttgccttccagaaaggttatactgatttacattctcacctttagtaaatgagactacttacttctattcactattgcctatagcagttgctatatttcttactttactttttatgagttgtataaactgagaaaaatgacaaattcaatttttttatttaattttattaattttaaaattaaaattagccacttacacttatttgtcttgttttataaatttcctatccattgagcataataacagctgagttaattaagcagcttgatagactggggggaaaggactagattttgaatgagaatatttagctttgagtaccagatctatcacttatggcctgcattatttggtcctccttaaattcagttatttaaatgtgaaagagggaaaataatatatatttcacaggacaatatagaagttagtaaaatatatgtaaactatacatatttttaatatatatcatttatctatgttcttataaaacttcatacattcctttattgagtcatatattcagttttcgatgatctcttctatctgtttcttccactagaccatgagctttttgaatgggtgcatttgtgtttgtattcctggagcctactacaatttctaacatacagtaaactttagatgattgtttcttgaatgaatgaatgaatgaataaacaaattgatgatattggatccattttagactttacaggcttaaaaaaaaaaaccctgctatatatttgtttattaaatcttcacaacaatccttggcacgagcttggtagataccatgagcttctgaaacaaaatgctagagagcctcaaatattttataccctctgttctttgctgggtatatccattgctgtttaccaacagataaaagggggccsccgcattggccagtgggacaggaaaaacatcaagaagggggagaagaacacaattgtcacctcctacaacaggaacttcacgggccgcaatgacacaaaccccaagaccatgccttcaatcatctccccagagattgtcacagccctggccattgcaagaaccctaagttcaacccagagaccgactgccttatgggcaaggatggcaagaagttcaagctggaggctccagacgcaatatgagcttccccaagcgcagtttgacccagggcaggacacctaccagcaccccccaaaggacagcagcaggcagcatgtggatgtgagctccaccagccagcacctgcagctcgtggagccttttgacaagtgggatggcaaggacctggaggacctgcagatcctcatcaaagtcaaagggaagtgtcccactgaccacatctcggctgctggcccctggctcaagttccacgggcacttggagtacatctccaacaacttgctcattggtgccatgaacattgaaaacagcaaggccaactccgtgcacaatgccctcacccaggagtttggccccatccctgacactgcccgctactacaagaaacatggcatcaggtgggtggtgattagggatgagaactaccgcgaggactcgcacggggagcacacagcactggagcatcacctcctcaggggccgggccatcatcaccaagagctttgccaggatccacgagaccagggcctgcagggcctgctgaccctgaccttcgctgacccagcccattacaataagattcaccctgtggacaagctgaccattcagggcctgaagaacgtctcgcctggcaagtccctgaagtgcatcatcaagcaccccaacgggacccaagagaccatcctcctgaaccgcaccttcaaggagacgcagattgagtggttccacaccggcagtgccctcaacagaatgaaggagctgcaggagtgagggcagttcctcccacccaccccccaccacccactccctatgcagtgctggcatcatgttcaagttcaggtccacatgcactatcagaggatccaatccagccagccatggcttcttattccaagatggtgtgaccagacatgcttcctgttccccgcttagcccactgggtggctgtggttgggggggtttcttaaaatagctttttagcctctgccttcctatttttagtttggttcagatcttaggcagctccatgcaactgcatttatttttgatgacaagactcccatctaaagtttttctcctgcctgattatttgattggtgactgaaggattctagagaaacttttgttcttgaaaggaaaacaagaatccaaaatcagtgaccaaaaaaggagggcccaacctttaaaccatgaagtcagtaccacatccttgttctcagctcctagataatgctctccacctgtataacttcaccagcgtttactctcagaatgccttctgtgcccttagcccccttctaagagttcctgtccatagattcttacttaagaaagtgacgtagtcaattcctttaacttctatggccatgtgttttactgcatatctctaccacccacctatgttttggtctagcagagagaccatacccaaaggcaatgaatctctgagctgaccattagtccagaaagaggccatatacttcagctttgtccaacaggtatgacagcagttaaccaaaacttatcaaactcttacactttgggaattgggggtttgaaatacagaatttggcagagagtaaattataccaaagcagaaagacaatgagaatgctgtacacaattgtcaaagtcaaatgcttgctgtccaaaatatcactacaacagcctgtggataagacaaagctgagtgtattgtttacctactaagaaagaacatcaacaaagccttattaacagtcaggatactgattgacatttcaaagtctggtttaaggtaggttcttttgatgatggagaggagtttaattaggatgagagcagggttatgataaaataatttaggattgttgcagacagctaggtgagaattttaagagaacaaggtttaggatgcattctatagaagagttcatggatctttggggaagttacgggaaccagcaataatattatttgaaatttttatcttcctgggaaagaattgcatttaatagtaaagttatattgatgaagacagccagctgcatagacaattttgattctcatcacaaagcaaaagaagcaaataagtaaacagaagcataaggtagaaaaacactgtccagagaagaaaaacagaggatctgaaacacaccgataggggagggcccggtgaccaacctgaacagcagaaaggatgtttttttctctctgatctagcctttcttgctctagacaatctggatcatcatgctatccagtcagtaacttgtacactgttctcatgttgagcaaaaagagtaaaccaatccaaacagagtattccatactaagctttgggatcacaagtttaaattctcacttacagttccattcaacaactttggagatggagggaatcccatttggatatgagagaaaaaattaccaagtcaagaaatcatgaattctgccggaatgtttaaaacttcagggcatcaggcagggagtaaaagctcattatgcaacaaatatcagatctcacagctcgcttcacatacgtactaccctgtgaactgaaacatgttcatattggaagtgcatttgtttccagttacaaaaatgtgctggttatgatggatttgggaaatatgcttgttcttctgcatatccactctgtggtgtaactcttcttccctcttgttatctgacttctgcttccacttgggatatctatcactcttgttatctaccacaagctcccaaaattccatcattcaagagttagtcctttttgttttgattaatagcaacagtctgagtggtggatgatgtgcaaagaagagccactcatgagggacagactatagcttctcacacacacaagcggcatgggccatagagtagaaaaaccattaggtctgttttgtgccagaaatctttgtgatgagtaagttcttcctcatatttctaaacttggagctttttcccccttagagcctacatctttcacgaagatataacatttgctgaattaaaaagtcacaccaaattgtcattgaaataaaaatacgtatgcaactatcattctgttcaatagcctataaattacataatgtataggaaaaagaatataaagcccctgtttatttcttttggacacaccaaaaagaaatttgtctgcaatcgttgtatttaccaaagtgttgtagtgttgcctggaacaatcaatagaaggttacttttccttgagtatcacaaggtagtgcaatcccagctctgcgaataactggttctgtgaccttagacaagctacttaacatattatttgttcacttgccaaataaatatttcttaggatttaactatttgccaggctctgtgctgaaaactggataaaatggcaggtaaaatacaatcctcaccctccatggctttatagtataataatatcttcagctgaaaaataaggcaataacttctacttcagaagttatgaaattttatttttaatttttgtgggtacatagtaggtataaatatttatggggtatatgagtcttttatataggcatgcaatgtgaaataacatcatggagaatgaggtatctgtctccccaagcatttatcctttgagtaacaaacaatccaattacactctttaagttattttaaaatatgcaactaagttattattgactatagtcaccctattgtcctatcaaatagtaggtgttatccattctttctatttttttggggtacctattaacaattcccacctcccccagtcctcccactacccttcctagcctctggtaactatccttcaactctctatgtcaatgagttcaattgttttgatttttatatctccaaaataaatgagaacacctaatatttgcctttctgtgcctggcttatttcacttaacataatgacctccagttccatctgtgttgtaaggttatgagatttacatagattattatatgtgaaaagtgcctgattctgtgaaagctctgtggtcaatatttatttactgttatttctcttctttttcttccttagcacagtgtcaagcataattcactctgatatagtgctaaacctaacttgtacatgtcagaagttatatacaggcagagaaggtaaaaatgctacacatgcctgtcaggtagtcatgctgcttccagaggccaaattcactgtttgggttttttaaaggtttggtggcaggctggttaaaaaagagtctgctattttgaaaaaaataactatcttaatttggattctcctagaagcagaacctgagacaaagattaaagtacaaatagtttcactgggaggtgatcccaggaaatctccgtagaggagtgggaagggagatagggaaggaaaggcagtgaataaaggctgtgttaccaagcaagtcctgttgttggcaactagggttcagttctctggggagcatttggagacggtggagaatccacaactcagagttgcttccactgaggggtgaggaggttggggtatttgtccaggcacctgccaaccttcgttggctgaaagctactcccagggcatcactcctaggtattttcatcctgcccaaggctggcactgggggaacagcccattccctggccagaaaatctccagaaaggtgtaagtgctggaggtaaagaagatgatgaggactgggcatggtagctcatgtctgcagtcccagcactttgggaggccaagatgggtggatggcctgagatcaggagttcaagaccagcctgatcagcatggtgaaaccccgtctctactaaaaatataaaaattagccagatgtggtggtgtgtgcctgtaatcccagctactcggaggctgaggcagggagaatcacttgaacctgggagacggaggttgcagtgagccaagattgtgccactgtactccagactgagcaacagagtgagactgagtctcagaacaaaacaatccatcannnnnnnnnnnnnnnnnnnnccatcgatagggaaggggaggaggaggaaggaggaggagaggagaaggggaggaagaaggggggaagaagaggaggaggaagaggacgagaaaggggaaggggaaggggaggaggaggaggaaggtgaggaagaagaggagaaagaggacaaggaggaggaaccagaaggggaaggggaggaagaggaggaggaggaagaggaggagaagaaaaagaagcatcttctgcaatgttcaaaacgttttgacttgccactgaatgattgtgttgactggaggtgttttcattcttattagaagtcaaataagatcatataataccacagaccttgatgtaagtaattctctattgcctgaaagatatttccattccttagcctgacagtccagttcttccatgagctagctctatactacctgtctctctccactccttgataagaccccttttgcaagcacgcaagagccccagatgcatattcctaccccaagaattatattcattctctttctcctgctcagaatgtcccctgccttgaccagttgcccctcttcaaggcccacatcaagctctaagcctttcgttaagcatcttgaccacattcctggccttaacctacccattcctggagcttcttgtctgcatcactcattgaggaccttgtactccttgccctccatggtttatcatcaagtgaacaatcctgtctctccaagtggaccacaaatcctattctcatgagtagggagactgcatgttccttctcgaaatagccacatcctttttattttcacgctttcaatagtcaagtgcttaacaaatgttgagttgttacagtgacctgtgttgctcatatctaactatatattaggcagtcatacctctttaagtgcaatgaagtctccctgaagtataatccaggtttctgagaaccagaaagcttaactgattcaacaattaccttgaactttaaaaggaattactaaaaagtgttttaaggaatcctacttacttcattgtttggcagcttctgcatatcaggtccctttgcatttattggcatttattgctgtaacatgaagcagcatggtgtcatgattaggagtatgatttcaggcaccaaatagatgtgggttaagagcatgggcacactgatagttgtgaccttgagcaagggaaatagcctctctatgcctcagtatgttcacttgtgaaatggtgatatggtttgactgtgtccccacccaaatcttattttgaattgtgactcccacaattcccatgtgttgtaagaggaacttggtgggaggtaattgaatcatggggggatctttcccatgctgttcttgtgatagtgagtaagtctcaagaaatctgatggttttaaaaaggggagtttccctgcacaagctctttttctcttgtctgccaccacatgagatgtgcctttcaccttctgccatgattgtgaggcctcctcagctatgtggaactgtaagtccattaaatctctttcttttgtaaattgcccagtttcaggtatgtcattatcagcagcatgagaacagactaataaaaatggggatagcattatcacatccataagttttcatgtaaagcatttagctcaggctgtaataatagaaaccactcattacatgttgactatcattataagatagatcaattttatattataatatgtacccaaaattaaatttagatttggatatacattagcaaaaatttcagttaattgtactctctcctattaaggagtaca

SEQ ID NO: 93771 - DNA, 45155 bp, Homo sapiens
  misc_feature (1)...(45155): n = A,T,C or G
atttctctgatggctaattacgatgactatcttcttttttcttttttttttttttttttttttttggaggcagagtctcactctatcttccaggctggagtgcggtggcgtgatcttggctcactgcaacctccgcctcccgggttcaagcaattctcctgcctcagcctctgaagtagctgagattgcaggtgcctgccaccatgcccggctaatttttgtatttttagtagagacggggtttctccatgttggccaggcttgtctcaaactcctgacctccagtgatccacctgcctcggcctcccaaagtgttgggatttacaggcgtgagccacagcgcctggcctcttttcaagtgtttattagccatctggatatcttttttggagaaatgtctaccagatcttttgcccacatatttttcattttttaagagattaaattttttagagcagttttaggttcacataaattaagtgaaaagtacagacaattcccatatactctcagcccccatccatgcacagcctctcctactaactaaaatcaatgtacgtatattgacacgtcattatcacccaaagtccatagtttacatcaaggtccactcttggtgttgtacattctatgggttttgacaggtatataatgacatgaatccaccatagtagtatcatagagtagtttcactgccctaaaaattctctgtgcgccaccaattcatctgtccttcccctcttccctgacaaccactgatcttttcaccatctctgcagttttgcttttaccagaatgttatacaggtggaagactacagtctgcagccttttcagattggtttatttcacttagtaatatgcatttaggtttcctccatgagcaaaatagctcatttatttatagtgctgaatagctttccattgtctggatgtatcacagtttatccgttcacctactgaaggacatcttggttgctttgaagttttaacaattatgaataaagctgctataaacattcatgtgcagtctcctttgcccattttaaaattcggttgtctttttgagttgtggtcattttttatatatcctagatacaagaccctcatcagatacatgatttgcaaacattttctcccattctttgggttgcctttctttctttttttttttttgagaaggagtctcactctgtcgcccaggctggaatgtagtggtgcaatctcggctcactgcaacctctgcctcctgggttcaagcgattctcctgcttcagcctcctgagtagctgggattacaggtgcgcgctaccacgcccggctaatttcttctgtatttttagtagagacggggtttcaccatgttggtcaggctggtctcgaactcctgatctcgtgatccgcccacctcagcctcgcaaagtgccgggattgcaggcgtgagccaccatgcccggccttctttcactttcttgatggtatcctttgaagcataagtttttcattttgacgtccagtttatatatttttgttggtggcgcttgtgcttttgatgtcatattaaagaaatatttgcctaatccaaagtcatgaaaatttatacctatgttttcttttaagaattccatagttttaggctttaagtttaagaattccgtagttttgtaaagatgccatctctacaaaaaatacaaaaattagcttggtatggtggcgtgtacctgtagtcccagctactcgggaggctgaggcaggaggatcacttgagcccaggaggtcgagactgcagtgagcggtgatcacaccactgcactccagcctgggcaagagagtgagactctgcaaaaaaaaaaaaaaaaagaaagaaaaaagaaaaggaaagaaaagaaaagaaaaaaaagaaaagaaaacaagaaaagaaaaagaaaagaaaaaagagaagaaaaaaagaaaaaaagaaaagaaaaagagttttatagttttagctcttgcatttaggtctttgatcaattttaaattaacgtttgcatacggtgtgatgtctttatctttttacagatatatgcaggctaaataatttagaggtgaatatataacatctgtaatttactttaaaatactttagataaaaacagataaagcaaacatgggaaaattttgacagctacaaaatctaggtggtgggtatatcggtgttcactctattttcatctcggtttttggatttttctttaaacaacagaagtaaaaggtaaagttctagaaataaaaatcagaaaaattacttgattctgagtgaaaatgttattaatagagaattaaagttgaatctattttaacttatttttaaagtacattgcttataaatgttagcatttcataataagttataaattatttgccacacccctaataaaaacatacaagaaaaaggttatgtcagagtgtcttggcattgctcttaggaactagtgttctagaacttcttgttctaatacagcaactatcagccacatgtggctgatgagcacttcagatatggcaagtccaaattaagatgtgctgtaagcgtaaaatctatattggattttgaaggcttgacacaaaaagatgcaaagtagctcattaatatgttttatgttgattacatgttggaatgataatattttggatattggattaaagtgtattattaaaattaccttcacttgttttttatattcttttaaaatacagctactaaagtgtaaattacatatgtggcttgcattatatttctttttaaaaagtttaaaattttttcatagaaacatataggaaacaatcattacatttcttttggatggtaccattctagagagaaaaggactggactagaagatccacattctaattcctttgctgctttcaactagccatgtgacttggggaaatttcttccgtttctcagccctaaaatagtcagggataaattcactcagcaaatacttagacttcttactatatacaaagaacttggctagatgatgtgggaaatagaagacgtgaaactgttcataaattcaaatcattgttttaccgttaatctctatccatgagtcaatgaagatagaaatcaacaatagaaaatatctcatcattttaattttttccactaacattttatcttaagataatgtatattttataaacggtctgagacccagatcacatatgcacagagtatatgttctttttctcttctaagtcttgggtctttgaacaagtgttccatttttccagaggctccccaacttcaaatgttgttcaagaagtgcactgtggtagacagttggtggacagtactcatgccctccagttgtcccataccatgttgacagctggtcttggccatgtaacttgctttggtcaatgagacattagcaagcaagttaaaaacagaggtttgataagcacttgctcattgagacttatcttcttggaacactccttggaaccttgcagccatgccgtaaggaagcccaaacaaccatgaagaaaggcccacatggaggagagaagggccaggggttctttcaaactagtgattctcaacctgtggtgattttgctccttgtaggacatttggcaatgtctggggacacttttggttgtcacagtggtggataggtgctactggcatctagtgggtagaggcgagggaggctgctaaacaatctgcaatgcacaggacagtcccacaacaaagaattacccagcctaaatatcagctgtgctgaggttcagaaacctgctctagaccaatgtttcccacaacctggctcctatggatcaaggataaaggcatttgggagagaaagtkttcacacttaaataaaattatctgtagctgctcatttacaagtgacagctttctgaacagtctgtgactcatgatgatttttcaatgattcccattagtattctcatcaaccccaatggcacatttcaccttgtttacatttagcatttaagcagagtaactcatcaaactattgaaccaacaatcattgtattagttgccccaactgagatattgtttctccttggtgctatcaagtccatggtttgtcacaattcaatccgagcttccaaatctgcagccatttacccacccaaagaccaggggctttaacttttactgttttatagtccatcagctttggttctgtgttaccaaagaaccacagccccatcatgctaagaggatgacactttccctttgagaagagcatctatatatttagaagaaaccattattagtcaattttatctatgagagaaatattaagaatataaaaattatagtaatttgctgatagtaaattttattagaagagtttaaatataactacattagcagactcaataaaaattttaaacatagtgggtcaagtataaatctcattgctatggtaattagctgtgaaatacatagataataaaccattgcagataggggtttttgtttgttttctcacataatagggcacatatgcatctctaggcggaatgaaaaagggccagaaatgctgctaaaattgtcagtttgaataactttttgataggctggcagatacaaaagtttacaagaaacactcgatgtgccaagtaatctccttgcaaagtacaaggacccagatgaaaaatcccaatgatgcgaatcatccctgtaatctcccaaatcccattatgaagtctgattagagtaggctacaacccaattgcaagtgggctttgctgttgatggagagccaattcgtggcaaacattagtaaaaccaagccatttatctacccggttgaatcagcctttgttgaggagtgtgaaactgtgaccagcatcaccaaccagccctctatagacagggactgctttcctttctcctacacttggtttgtgccctgaagttggctctggtactgcattggcatcttgagaaaacctttttgctggtttctagcaggaaagagaggaaggaggccctgactccagggatgtggagggactgagctggactgtctagggagatctgtgttcctgggatcaggcccttgagcacccaacaggcagaaggttgtgaagtgccccaaggaccatcacatctaccgaaaaatggtgaatctgggggacttggtttgatccagtgagccaccaagagcaatacttcccctcagcctgtgatgaggactcacatagtggttggattttttaaggacacatggtgcaggggcaactctgtagttcaggggtcatcaagtttgaactatgagggaccacatggccaatatttacattttgcagaccaagcaagaaaagggaagatattacgtaggaacttacataacaagagagaaaaaattgtcacaatgtttttattgatataatccaaaatacggtaatatttgagtacaattatttgcaactcacatctattaatgagagaaaaggaattcttttgcgggggggatatttctcttaattggagttcaaaggcggtgtctgctatcatcacataaagtgcaaatgttcatgtatgaaaaccatgcttagctctctggtacaaacacagggagctctcgcgatctggcccataggctgtagtttgcagacccttgctatagctgaacaccagtcgcccacactgggtttgcggtgttccggggtgggaagtcgctccgggctgcgaagcacctcgagggatccccccggcccgaactctccctctgtgcccagctaaccgcggttcattggctctccccgcgaggcaggtctggaagatcaagaatgaagctcggagctctctcgcggagcaaggacaccttcgggcttcaggaccacccagggcgtccaaaactgctgccagggctgtgcccccgccccccggcactttccagctccccctccacgcccgctcttcctccctctctgccccctctagctcctcctccggctcctccccctccgctcctccccttccctacatctagccgccgcgctttcccgctcccgcagcagcagcctcccgcgtcgctgtcgctgttgcctccgccacctcctccgccgccgcgcgcccctcggagttccgcgccccaccatgcccaacatcgtgctgttcagcggcagctcgcatcaggacctrtcccagcgcgtggccgaccgcctgggcctggagctgggcaaggtggtcacgaagaagttcagcaaccaggagaccaggtgggggccgcgccggcggccgggctagggagagcgctgggcacgcggctgcggggccgggttgggggccggcgcctgcccgggccacctccgcggacgccgcgctcccccttccggggcgggacggtggcaacgcggcctccgcgcccccgcgcccgcgcctgcgaagaaaccgaggcggggcgccgcgcgtcccgatgcgcgccycggctgtgcccccggttgcagggcctccggtcctgggaccgcggcgacccggcggtcccgagccgctcccggcctcccagcggtgccgcccggcctggcgtccccagcccggaagggagacgtctgggcggtcacagaccgtcggggagagagtgggcgcagcgggcgggaaccgcatcgggtcagcgcgcggtggagagacgtcctgggttggctggtcccagtttccgcgtccctacaaagctgaacctcagaccagtgcgtgcgactaaaggtttccccccgtccccaactctggttgcacgctgggtttacctggggacggtccgaacgctgcttcccccgacctgcccccaagggtttgatccaacgggcggaggatcagcgattttacaagcttccctggcttctcctgagcagccagggcgcagaccactgcgttatccagagggtgcagttgtgccaaggtttgaaagactgtgagaaccccaggacgcacgtgctgggctcccctctgctcccactactcttgctgctttaaagatgatggactttcagcttccttcttgttctaggactctgctgtgtccagcaacaacgccgtgattcgactgtaactttcacccatttctcaagtccaggagagcctcaggtggtggccatcctcggaagctgacctggggggctcctttgtctatctgcctgagtccacacagctccttgactcatttcaaattggtctcatttttcccccttcttcctccaatgtctagtaccgttaactgtccacagttactgataatttttatatctttggcaaaggttcaattttaccaacattttctagaaatggtgttggaacagttggacacccatatgccaaaaaatatgaacttccatccatacttttcaccatttgtaaaaattaactttgaagtggatcatagacctaattgtaaaatctagaactataaaatttctagcagaaaatcttgacttggggttaggcaaaaatttcttaaggaggagttatgttaatactgatggggaagatgctatattttggcaagtcagctttttaggatatgtgaatcttacgtgacttcttccaggtggcaaattccagttatggctcsgatgataatataagcgaagaaacattgtgaatgagtggcaggtggactttggctaaagaattccactctgcagtgtttaatgcagaagtctgagaggatggtctagggctctggagaaggatagagctaggtttgagtgttgcagtattttgccagtcttgttcaagtttcagtcgctgtaagaacacgagaagaagaatagtttttgttcagaaggtgtcgtcatataagtaaaggagaaatttgttgatgaagtaaattttgaaagcaaatatgttgcccttccaggtactcagtgcagcatgatcttttgctaaggagcatggttaatctagatcagttcactgctaagtcagtgttgagtttctcctaaaaataccacatgtgccactgggcaaaactcactcagacactgaagtatgattgtttatacatttggttcaaatataaagcagactcacttttattttgtttttggcattttataaccatcacttgataattagaaatcgtgggacctcaaaaaccactcagcatgaagtttgggaattgcctatatagctacattttatgtttttaatgtatagagtataaaaggttcactgcctgacttttctcttttccatgaactgtacaagtacagagcttaatttttataaacagccctctctggaccagttactgtgctaggaatccagcttttagctgtgtaatcgtagagaggaaaaactgaagggcaaaatgaagacaaaattgattcagttcatgtaagggccccttcttgaatctgtcactgaactaggatcagaaatctggtttgctgtctcctggccatcaatcctcccattttgcgttttttatatgctactttactgaacatagagccttccaattttaccttcttatccctaaatcatttcagatatgcagggagaggtccgctccagcttcactatagaccatggaaattccatgatgacatcttaggacagcaggtgtctagatgtctctgttgtaacattttactatggtcagttaacctgctggcagaatctttagctatactgtgagacaaggttatgcaaagttatacaaggttatcggttaccatgtaataaataaagagcttaatggcttaaaacagtaattgttgatttggcttacaaatctgcaatttgggaagggctcagtgaagaaagcttgtttttgccgcgtatggtcacagctgaggctggtcacagctgaggcggctaactggggctggagggttcttgaagatggctcacatgactgaagttgttactagcttttgcctgggagcttggttaggaacctcagctcctcttcttgtaggcctctccatggggctgcttgagcttccttacagcatggaagctgggttctaagagcacatgttccaaaagacaggacattgaagccaccagtccattaaggactgggcttgcaagttggtgtatcataatttctgtcatatgctgttgggcaagtacagagccctctcagattcaagggcgggagactagaccctgctccttgatgggaaatgtgttaagagtctgtggctatcttttagttaccatgcccgtttattgttgagtcagtgacgctcttcagcgtttttatttgggggtcaataaagatcctctggcagaatggcaaatggatgctgccttctagccacaattttttaaagacctagaataaaggtagtcatgatcatctttttgagtagaagcaggactagctttaggggaaaagttgccatggtgatgatattctctgtcctcccctggactgctagtcatatgagaactgaggttcctgagkaaaaacaggccaaagaatctaatcttgtgggataaacgtcataagaccaggagttggcaaagtttttctgcaaagggccaaatcgtaaatattttaggcagtgctagcacatgtagtctctgttgctgcggtatcttacagttctgtaagttacggtaatgtctgtcacaggttagcagggctgtattctcttctgaggctctaggggagaatctgttcccgtgccttttccggtttccagaggcagcccacattccttcactattggcctcttcaccttcaatgtcagcaacaaaatgttgctctgaccctgcttctgctgtctccctcttgcatttttaagggccccatgattacaatgggccaatttaaataatccaggataatttccccatgttaaggtcagctgatgagcaacctgaatgctatctgcaaatttacttcccctttgccatataaactcacatattcaaaggattaggatgtagacatctttagggggccattattctgcctaccacgccattcttaactcacaggccatagaaaaacagcctatgtgctgtgttttgtcaacctctcagctatataatactgtacttgatttctgctgtagttcattttgtgctgctataacagaataccagagactggctaatttataaacaatagaaatttgtttctcacaggtctggaggctgggaagtccaatactgaggggctggcatctggcaagggctttcttgctgcatcatcccatggcagaagggtggaagggcaagagagcatatttgagagagagcaatagagggccaaatttgctaatataataaacccattctcaagataatgagcacactctagcaatgatgacgttaatccgtttgtgaggacagagcccttatgacctaatcacctcttaaaggtctcacctgtcaatactcctatactggggattaagctttcaacacatgaactttagggaacacatttaaaccatagcaatttccaaattaagtttatgtcatagttgatgtagtgttcacaaagcagttagatttagctccttagatcttcaaataggagggagcacatagaactctttctatccccctcatcctgtgaggttggcatattttcatccatagtagaaggcgtgcaagaagatgtgtgaatgttatcaaaactaattttcacaacatgtcaacttgaaaaactttatttttattttccttttctttaaaattttttttagagacggggtcttgctatgttgcccaggctggactagaactcctgggctcaaacaatccccttgcctcagtctcccaagtagctgggactgtgggcatgagccaccatgcccagcctgtttttaaattttcattaggtataattggctctttttttttttttttttttttttctgagacagagtttcacttttgttgcccaggctggagtgcaatggtgcgatcccagctcactgcaagctcygcctcccgggttcaagtgattctcctgcctcagcctcccgagtagctgggattacaggcatgcaccaccacacctggctaattttgtattttttagtagagatggggtttctccatgttaggctggtctagaactccagacctcaggtgatcagcccaccttggcctctcaaagtgctgggattacaggcgtgagccaccgcgcccagccttaattggctcttttaagaaaacaatttcattgagtatctgatagcaggagaagrgagaaggataattattcatgttccttatttgtaattttaaaatatttcattttgggatgaataaatttacagacaattctgccataatgtgacatatgtattcctaaaaattaccacgctatgcaaaatcaggcaatccaaaaccacagggcttatgagaaaaatggggttagggacataacattcaaaaacttcctcagtgacccattaaaaaatcataggaatgttatatagattgagcatcccttatcagaaatgcctgggacaacaagtatttcagattttttttttttttttttttttttttgcattttggaatatttctattgtacttactggttggacattccaaatctccaaaaatccaaaatccacaatgctccaatgaccatttcctttgagcatgatgtcgacactcagaaagtttcggatttcagaatttcggattagggttcctatcaaaatggtaaaacactgacatgtattacatgctcaaaaaatactggctgggtgcaatggctcacgtctgtaatcccagcactttgggaggctgaggtgggcggatcacttgaggtcaggagttcaaaaccagcctggccaacatggcaaaacctccctccactaaaaatacaacaaattagccaggcgtggtggtgcatgcctgtaatccgagctactcgggaggctgaggcaggataatcacttgaacctgggtggcagaggtcggagtgagctgagatgtcaccactgccctccagcctgggcaacagagtgagactctgtctttaaaaaaaaaaaaaaaattacataaatattatgacagagatggaactttccattgaaaaatgcctgaggtttagggttctctgaaatgacatgaaaagttgtgacaccaaatgtgaatgagtgtggctcattgtcctcgaggtgtgtacatgtgtatgtttgtgtatttctaagtggctccattcagctgggtacactgcagttttctgcagtctcgggataagaggttgtgcataagaaaacaygaaattcatgctatgctcaaattgttccaaataatatcaatcattggaacaaatttgccttttcaaaacatagcagagctgaccatcttcttggtttggacgcagagctctgggaaggacatgcctgagcacacagcactattttctgtttcttcccaccaaaggaatatgccagggatgagctggctctccctctcatgttggacatccagaattctgtacctggaaatacagaaacttccagacatgcaattttcaaaaacttagctgctatttactctttctccagaagctacgcaaggatgccaaccagcaaaacaaggaagtataccaagaaagaggatacagaaaatggcaaatggagtgcaggagagggggcagggaatccccggatggcagctgtgcacaggcagagagataacccaggcctgccacccctgggagggatgcctgcaagacgatgaaatgcagatgggacttgaggcctctgatcttgggagattttgattgttagtgaagggtttagggtggaatctggattcaggattcagaaaacttagcagataaaaaggtaagagaatgacctccagggaaaataaaaagaaaagatgtgcataaaaagaaaatacaagcattcgtttaagttaattgcrtggcagagctctgagcagcatttgcgcagttaaaaacgtacagtcaatctttaatgtgaatattgatctatattgggatgatggcgagatgggaagtttacattgcaagtgatggaactgaatggaaatggagttcagtcctcatcttccatagtgagaagtcaatacactttgcctaaaatgaaaaatcaagacacagcaatacacacatagwagctagacttgaaggaaagtatccaaaaaccctatcaagagttgaaattggtggcctctgggcactttctctgttatacgtcttacagaatggtttgaattttttaagcaatatgactgtataactttaataaaaaactaaaactaaatgtagtattttgcagaaaagagttaacattagcaggcctgagacttaggcctgttcgcaaggttggcccttggctggcctctgggagcttasattttgcaagggtacccaccatttcccagtaaggatggctcactgcataaactcttaaacaattgataaacaatgtggttcatgctgaatgcctgtgagtctgacattttggtacgtgctaggcagagggtgcttatatgaccagcccacaatacaaaccctgggacttgagtctctaagcagcttccctggtagagagcccttcacacgtgttgtcacagctcactactggggcattaagctctacctctgactcccctcagggaggagtcttggaagcttgcaccctgtttcccccaacttcaccccatgcacctttttccctttgctgagtttgctctgtgtcctttctctgcaataaattacagccatgagtgcaactattaggctgagtcctataagtcatcctggtgatcatcaaacctaggggtggtctcagggacgcccaagatgcaaatatgcttcgatattaaccgatggcagttttcttttcctagcgtggagattggtgaaagcgtgagaggggaagatgtctacatcatccagagcggctgcggggaaattaacgacaacctgatggaactcctcatcatgatcaatgcctgcaagattgcgtcatcatccagagtaactgccgtgatcccgtgtttcccatacgcccgacaagataaaaaggacaaggtaggagaggtgtgtgccctagaaacctgctgtgggccactgtcaatgttgtttttcctcatttatccccttgattagaattatctggaaaatgttggctttttcctttgatgatcaagtaaatatgctttcttattttgtttgttgaagatttggctttgaacctaccctgacattaatattcaaagaaacaggtaatgcatatttttgcaggtattaaaataccattattgtccttgttataatgaaattattgtatgtctttgtggtggtggatagaactaaatacacacacatacatgcacaagagtacaagtcaaactagagcacatctgaatcagatcactggattgtatcaatttcagggtcctggctgtgatactgtgttatagtttcacaagacgttaccacagggaactaggtaaaaggttcacaggatctctgcgttgtttcatacaactgcatgtctatctacaattcccccgaaataaaaagtttaattaaaaaaaaaacccatgatctctttttaaccttttaaaaagaacagaaatagtatcattgaattatgtttttcacaacattagcatcagaggaggctctgtgagtctttagaaaaaaattgaagaaaatgtggttggtctttgcctttcagagcaacagagaaatcggaggttgagaagaactttgaaggagattgtattagttttctaagctgtcataagaaattacataaaccgcgtggcttaaaagagcagaaatttttccctcacagtttcggaggcccagaagtgtgaaatcaaggaatgggcaggggcacgctccctctgaaggctgtaagggaggctgcttcctcgcttcttccaacttctggtgtctccttgcattccttggctgtggctacatcactctggtccctgcctctctcttcacctggcctcttccctgtgtctcttctctgtttcttataaggacactgtcattggatttcaggcctaacctaatccagaatgaactcaacttaatctttaccttggttatatttgcaaagaccctatttccaaaatgaggtcacatgctgaagttgtgggtggacatgagttttggggggatattgtttgacctactacagtggtcaactcccagctgttgtgtgttccgtatcttatggatagatagatgttcagccaggctcagcgagaatcctgccagttttcaagacacactgctgttctgtgatttggtaactcagtgcaagaaaggttttccccaatatgctgctttttatctccataattcatttctgaaacaacacagatttctgaagcagcacacaagatcccctcatatttgaaaaaaaccctttataaatttgaattcatataccaaagtccccctgaattttaatcccagtctcctcaagacatggtttccattccctgtcttgaagatggccagtcagttaatttctcacctaaaatctaattagaagggtccacatactttatctgtaaatggctatatggtctgtgttgcaactattcaactctggttgtacttcaaaaagagcaatagacaatatgtaaatgaatgggtatggctgtgttccaataaaactttatttatggacactgaaatgtgaatttcatattattttcacatgccttgaaatactattttgaatttttttcaaccatttaaacatgtgaaagccattattagctcacaagcagtaccaaaacaagtggctggtggctggtggctagctggatttggcctataggctacagtttgccaacccctgtattagaccattgatagattgcgtgygcacgtgtgtgtgtgtgtgtgtgtgtgtgtgtgtgtatgtgtgtgtgtgtttatgatctaaacttgaccttgggcagccaaaaccttaggtcacatacactgctgtgaagctgtatcctcccactagctatttatacagacagctccttttattttaaacttgatttaaactgtatttttagctgttaaatttcaattttctaattttgtcccattggtataatctgttgtcttagctattcttcccatctgtgtgtttccacaggattgtttagcatctttctccttgtcatatcacatccatgtcatagaagagctaattttctgccattatttcttccttccttgtggtttagtaaattctcacattgtagctggttttttgttgtttgtttgtttgtttgtttttgagacggagtctcactctgtcacccaggctgaagtgcagtggcacgatctcagctcactgcaacctccgcctcccaggctcaagcaatcctcctacctcagcctcccgagtagctgggactacaggtgtgcaccaccacgcctggctaatttttgtatttttggtagagacgaggtttcaccatgctggccaggctggtctcgaactcctgacctcaagtgatctgcccgccttggcctcccaaagtgctgggattacaggcatgagctaccgcacctggcctgtagctgtatttttaatcaagctctttcactcacaatagattttatattttgtatttggccctaagatattgaatatattgtaacttctttagaaaattactccttttatcattgcacatgccctcctccactattacccgatttgtaaccccattttgttcattaagtgataaaatatcagaagctctacatttttgttagcacatatctgatttgcggtgacctctttttacaaagttgtattttcaaaatgttttcttatttgagttggagaaactagcactgttttttcccaatccttctattgtaggaggtgtgatgcagtccagcctccatcccctagttgccagtagtgctcccagccaccactaacaagagccctatggatttctggaactccagtggctataacttgtgttttgttttgttttgttttgttttgttttgtttgagatggagtttcgctcttgttgcccaagctggagtgcagtggtgccgtctcagctcactgcaacctctgcctcccaggtttaaggattctcctgcctcagcctctcaagtagctggraagcatgcgccacgacgcctggctaattttttgtatttttagtagagacagggtttcacygtgtgggccaggctggtctcgaactcctggcctcaagtgatctgcccgcctcagcctcccaaagtactgggattacaggcatgagmcatcgcgcccagccggctttaactgttttgtggaactgtgttgtctaactagctagtagcagctttcctgatgttagacagatgtgttttccattttgacccattgtgaaaacatatttcttttctttcttctaccctttctttaatcactttgctgtaagtgtgtttcttggtaataacattgtagctgcttttaattttttatcccagtcagacaattccatgactttctgagcttaactgctgatagaagagaggtctttcatcatcaaccacgcagaggcagggcggttggtaacatttgagagacagtgtgtgtagtggcttaggaagtcatgtggtttctcgttagagaacacagctaggaaagaaggaatcacggtggggtgtattcgtttcctagcactgttataacaaattaccacaaactgggtgacttaaaacaacagaaatatgttctcttaagtgctagaggccagaagtccaacatcaaggtgttggcagaggaatattccttttggaggctgcaggggaggctcctccttccttgcctcttctagctcctggtgactgccagccttgaggccacatcactctaatctctgctggaatcttcgcatggcctcctctttgtctccatcagatctctcgctcactctctcatttttaattttctttttagagacagggtctcgcttcgtcacccaggctgaagtgcggtggcacaatcttagctcactgcagcctcaaacttctgggctcaagtgatcctcccacctcagcctcccaggtagctgggactacaggtgcacaccaccacgcctggctaatattttttgctttttgtagaggcagtgtctcactatgttgcccaggctggtcttgawtasgaattctcctgggctcaagagatcctcctgccttggccttccaaagtgttaggattaaaagcattaccaccacacctggcatctctctttaaaggatacatgaggtagcatctagtgttcacctgaataatccaggataatctccccatctcaggatcctcaatgtcatcacatctgcagaaacctttccaaataaggtaacatttacaggttccanggattgggctctgatatttttggggccaccattcagctcacttnaggaggccttaaaggaagtcactgatgtgttaagagacgaatattttaaggacactttgagctttgagatagtacatatcatttatcatctaggccaggatgctttcaagattgaaagggagctctatggataactgtgttgggaaacaggtgtctgcctagactgtcctgggcaagtgacatagggccaccctctctatagcctctggaggtggccaagacacataagctgttctgacaccattatttctgacatgtctgtgtagtcagtgtgactcattatagtgaggagacaattttgttctttccccaaacttctgaaaggggaattcktaattcttaattttatctagtatttgaggtgtgcctttgctttatttttttaagacagagtctcgctctgtcacccaggctggagtacagtggcacaatcttggctcactgcaacctctgcctccggggttcaagcaattctcctgcctcagcctcccaagtagctaggattayaggtttgcgccaccacacctgrctaattttagtatttttagtagagacagggttttgctatgttggccaggctggtctcgaactcctgacttcaaatgatctgctcacctcggcctcccaaagtgctgggattacaggtgtgaaccaccgcgcctggcccacctttgcattttttaaatggctgataatacttttcctaactattccttccttaccttggatcacgtggcttggctttgtactgagaaactgtactttggtgaggggaactgggatttagtaagcacctaagagagatggccagagcctgtcagcatacttcatctcttagaatctcttagacaagtgctactgtttaccagtacaggtgaatgatgaggagaccaagcatgattggggtggggggtgagggttaggggaaatgcacttctacctttttgcttcatttaggaaggtataaagccatgtggcgttagattgtgatgagaagctgtgacctacacttgatctctcatcccagaaagaaaatgctcctgcacagccgcaggaggagctctgggcagccctccaagactttctgttgtgctgtttccttcccttagggctgtattacctatgacatctaatgacaatgaaattctgtgtaattgctcttcttggaatgccttgcaaagaagcccagaaaaaaaaaatctggaagcttttaaccagattcaaagctggttttgtttttttctgtaaaccttgctgctgctttttaagcaagccctgcacatatgtaacattttatttggggttttctttgtatgtacaagacaccagggacagattctgatggtgaaggaatggtttcataaattaggacacatccatacaatgtaatgttaacatagaaaaataatgatgatgtaatattaattgtaaaagacatggtgccaagtggtctgagctctggcactgagaatcaagtaggctcagatttgaattccagcccattatttactcagtttatcctttgtaaaagttacttaaactgtctgtatctttagtttccttatctgtaaattaagtacgacactagctactatttatgaagtacctaccatattatgatacatgagtgggcaaactttttctgaaaagagctggatgtcaaacattttgggctttgtgggccgttgggtatctattgcagcagctccactctgccattttagtgtgaaagcagccattagtcaatgtgtacatgaaggggtgcggctgtgttccagtaaaactttatgtgcactgaaatatgaacctcatataatcttcagatgtcacaaaatattgttcttcttttgattgtttttcaaccgtttaaagacgtaaaaaccattgttaactcacaggttatgcaaaaacaggctgtgggctaagtttggcccatggattctaatttgccggtccctgctatagaagacactcaataactgctggttcccttccctggtaaaaacagtaggttgggccgggcatggtggctcacacatgtaatcccagcactttgggaggccaaggcgggcggatcacctgaggtcaggagttcgagaagagcctggccaacatggtgaaaccccatctctactaaaaatacaaaaattagccaggcctggtggcgtgtgcctgtaatcccagctactcagggggctggggcaggagaattgcttgaacccaggaggcagaggttgtagtgcagtgagctgagatctcaccactgcactccagcctgggtgacagagcgrgactccgtctcaaaaggaaaaaaaaaaaaaaaggtagattgtgggcaagactgggaataattacttctgaggcgggtaaaggacttgtagtttggggatttcttttttcttttttcaaaatcattttcaagatcatgttctgttttcaataagattttctttttttccttttttgtagcagagaaattgagaacagtttttcctgatgtgaatttctacagtcttgtaatttttttaaaagcctgtcaattttacacttttcaaaaggtgatatttgatgccttgaataacatctggaatagcctgggactctgtcatgattgggctgacttgcaaaacatttgacttttatgcgtttttcactaagggagctgaatgttttatttttggctactgtaccttgacactacctttgtttcagtgctgtacttacttttctttgtataggctagcaagtcagttaactagtaaatcatttttcctgcaagattcagttgggtatgagccaaactctgagacacagaacagaaaccaaatttgtaaacaaggtgtgaagaagaaaatcagaaagcktgaatttaggaattaccctgtggtttggatcctagaagttaagaaacactggatgccactgaggagagatgagaagggaggattctttttgctggcatcttagtctgtgctactgtaacaaaataccacacactgggtaatttataaagaacagaaatattctttggtgctgggcacggtggctcacgcctgtaattccagcactttgggaggctgaggtgggcggatcacctgaggtcgggagttcgagaccagtctgaccaacatggagaaaccccttctctactaaaaatacaaaattagccggttgtggtggcgcatgcctgtaatcccagccactcgggaggtggaggttgcggtgagccgagatcacaccattgcactccagccagggcaacaagagcgaaactccatctcaaaaaaaaagaaatattcttygaacgtgtgtcctgggaggggggaaaaaaaggacaaaaatatattttctcatagtcctggagactggaagaccaagaccaagcactagcatttggtgtctggtacgggctgcgtcctccagagggaagaatgctgtgtccttacatgatataagacagaagggcaagtttgcaaaatgctgcctgaagcctcctttagaaggaccttaatcccgctctcaagggagcagccctcatggcctaatcaccttttaaaggccccacttcttaatcctatcacattggcaacacctgaattttggaggtgacctttcaacccgtagtaactgattcgacaattgtaggaaaagcacaaaattgattagtattgcaaatcaggttctattacaaagcagttgtagcaactgatttgctctttttattatcctggaactttgttacactaaataattctcacaattagtgaggctaatgagtaagccttggacatttagtgttaatagagattctgttagtaaatatttattgaagaactactgaatgcagagtgtggagctgtgttctgctgcgaaaattcgattttatcccaaaggcaacatggaatatagtacgggggagttaaatgatgaaaacatgagttatgatctataattagtggagaagattgaaaaaataaaaaaacaagaaaaatatattttcctataatctcacattccagaaacatctgttaactttttagagtgttttcctctcattcttttctttctgttttgaacatacatgcataccttttttttttttttttttttgagatggagtctcgctctgtcgcccaggctggagtgcagtagtgccatctcggctcactgcaacctctgtctccagggttcaagcaattctcctgcctcagcctcctaagtagttgggactacaggcgcccgccaccacgcctggctaattttttgtgtttttagtagagacagcgtttcaccatgttagccaggatggtctggatcttctgatctcgtgatccgcccacctcggcctcccaaagtgctgagattacaggcgtgagccaccgcgccccatatatacctatttttgataaaatatatatttctttttaaaaagtggtatattagggaaaacacaaataatctgttaacattttcaatgtaattccttcctgcatgtgtttttacatgaatatactgtgtgtgtgtgtgtgtgtgtgtgtgtaacaaggatcatttgttactattttgaatgaaatctttttttaagcttttattttcttttttgtggctgatatatagaaatactgttgtttacaacaaaatgctgaacgccacctaggtctaatcatgtgtctatataatttcttggatttctttgatgtgggcagttgtattgtccataatttatgatgtggaaaccaaagctatagaaaagttaggtaattttacaaagaacataatatcagtaaatgacactaagtatgaaattaaatagtaactattatcaatccccttacagtattcattctttgacctwgtttttttccatttgtaatagtgttagcgtccaactgtcagctcatgtccaaatgtcggctcatgaattcctctttaatagctggacttcttttagcctctggctgtgtgagggtctcttgacctcagtgatctcacatgtgccactctgtccttctagaacactattctcctcgcctttgctaaacttgccttaaaagtgatttcctcagagggaccgctaataatgatcttgtttaaactttatgcccttcctactactatcatctctctctctcggtaccttttatttctacacacttaccatgatttcagttacacagattgtgacattacatgtacatatgtttaactgtttgcttctttcatatttgttctctatacccagcgtcaagcacttagttttgcagtagtatatgtaaatagtaaatatttgctgaataagatggaatgaatatatcttttgctgtcacaacatgtataattttctttttgatgcttcgttgattgcatctatgatttatccttctcatgtacgtcttagtgggaggaatctaacagtatccatcttttcctgttataaaattaatgttcttacttgtagagtcgtgccccaatttctgcaaaacttgtggccaatatgctgtcggtggctggggcggatcacatcatcaccatggacctgcatgcttctcagatacaggtatccgtgttttccttctgcaaatggttaaatcaagtctgttaaattaaataatcttaggtaacattacttgtgtttgagtttatatatggctactctcttggatttttgtctttactaaacttgaaaatataatttgatattagtacttccagtctctatcaccaccttgccccccagtcarttttggaggagtggggatggctttttggtagtaagctctatatagttccatctcagcttatggaaaataattagaacggcagtcataatgtacactttttaacttcttcataacttattttctttgtctctaaaacaggccaaattatactgtgccactttgtgttatataatgaacgtgaagtatttgatttataataactacttaagagacaacaaaccttttccctcaccgtcctgcatagccattctattcctcagaatataggccatcataagacaatggaatatgtcccaagagacagattggactgaaatatgcccctataacatatctgtcttttgatttaattctgtttaaaattaacaaaagggagtctgttataaaagcttcttttgaacaaaaaatgcaaatgttatttaatgaaagcgattatcgtttaaaaaaacaaaasaaaacaaaacaaaacaaaaccctgcaacatgacactcacttctccctttagggattctttgatattcctgtggataatttgtatgcggagcccgcagtcctgcagtggattcgggaaaacattgccgagtggaagaactgtatcattgtttcacctgacgcagggggagccaaaaggtatcatgcaggctacaccttgcagatttctccatctgctgattggtttttccttttccgatgtattagataaggaagcatgctgtaaattacttaaagctttattttgctaatgagcaagtaagtagaccgcaggcttcacttccagagcagaaacccatcatctttgttaatatttcgtcattcaggaaagaagaaaatacagagacacacatacacaataggtatatattggtttatttgttttcagcaaagggtagatgtgtttgaggtttttttaagttatcgttttctgattataaaagtaatgagcctaattggaaaataagtcttttaattaacagcacttggaaatggtagccaaaatagaacaatttttttttaaaagaaatctctgtacatagaataccaagaaggaaatatctgagaccaagaaataaagcagaggcggaaagccatgtccaggtggcttgggggatgggcatcagatccagcaagagcctggtggcttgggttttaatactcacctggaaacccccataaagaagggagttaaagccaggcacggtgatgtatgcctgtaatcctagcaccttgggaagccgaggcgggagaatcacttgagcccaggtgctccaggctgcagagagctatgatcacaccactgcactccagcctgggtaacagagtgagaccctgactctaaaaaaaaaaaaaagaagaagaagaagaagagaagagggctgaaggccagatttctagccaaaagccagggggaaagcccatctttacctcggcctttggtttaggggaggaaatagtcacctatgagaagtcaaaccacgagcctgtgccacattcagatgtggagtggaatgcacacgaaaatgtgctccaggctgcagagcccctgcagagggagaatttcacaatcctagctgctcggtgagtgctccctgctcaacctgacccgatgcctgatccaaagttagaaaaccaagagaacacagtccacgcaggcccagcatgtgcagacaacagggcagcaggcagccaatacttggggataagataataattactggactatcaaataagtaagtttaaaaggaaactgaggtgaaggagagttaacaacaacctggtcgtaacagtacggcagtgatgaggcacccagtggtgtgagaacgtggtactaagtagcacctctgaagggcttcacagagatactcgaggcgttaacaagcaatcagggtacagggtgttcagaatcaaggatgagcacaataagagaatgctgcaagctgaggcttggtgacccaatgaccttgtagagctttgcagatgctatctgggaagaaaaaaagctgggaagggagttttattgtgtaggtagagacctccataagggagaagtaggagagacttctaccccccagtccagtgaggaagcaaggaagctctaaatgtgcactaatagaggagtgatgagagtgacaagtgatcagcctttggaatgtctgacatcaaaagcctgtccctcatttggcaccctcatctgcctgcagcccagctgaggacctaggatctaacacaaaagcttagaagtagcccagaaagttgtcttaacactcttgcagggaaacacaggccctgattcttagaagagccttgttcattctgctcaaagctgccttccaacggctgctggggttcccagcacagaagagaaggaacggaccatgcagctggagatcggcctctgccagcagcaggaagtggctgtggccagggaggagacacaaatatataaaagacgggagcagaaagttaacttgcaaagaccctaggtgggcagtcacggggtggagggcagcgctgtgtcacgtagcctattactgtacggtgtgtaatgttcacaaaaatgcccttggccaagaatcaaggttgaatgacgctgagagtcctctgcaaaagattgtgagcaacattttggagtcatatctactagaaatgcttgcagttgacttggaaacttctgcaagtcacatggaatctgcattcaaatgaggcaaatgcactggcccagtggaaggttagaggcaaagaatccagccaaaggggtacaggagcgagcgtcagakgtaactgggttataataacagctttgttacartgtaattcaaatacgtacaattggccgggtgtggtgactcacacttgtaaccccagcactttgggaggccaaggcaggtggatcgcttgaggtcaggagttcgagaccaacctggccaacagggtgaaaccccgtctctgctgaaaatacaaaaattagctgggcttggtggtgcacgccygtaattccagctattcaggaagctgaggcaggagaatcacttgaacctgggaggtggaggttgcagtgagccgagatcacgccactgcactccagcgtgggtgacagggcgagagtccgtctcaaaaaagaaaaagaaaataccaaaaaactccaaatacrtacagtttacccatttaaagtgtacagttcagcagtgttttrcatattcagagatttgtgcaaccatcactatctaattccagagcatttttatcaccccaaaaagaaaccctgtacccattagcagtcactccccatttacttccccccaccttatccctggcagccaggaatctactttctatctttatggggttatcttttggagactttgtatatcaattggtagtatagaacatggcctttgtgtctggcagatacctttgtaaaccagaaaatgttattttggcagctactcagcccaaagaatagtagattccacaaatttgtatgaccatctttctttcctcccccaaccttgtttttatatacatagtctaagaatatcatacatgctcttagcagaaattcagacagtacaaaagtgtcccatccctgttctttaaatgccaccgttatttccagtgtcagaattgtgttatttaagcgtatatctgcctatttatttcacgcaaatggcaatgcgatgtacacagttcttcactgtgcttttctgaaaaactcacttgctgtatcttaacaatgattccatagtcgtgttgtgcagctgtgcaatattcccttgtgtgcatgtaccacagctcctgtgaccagtcaggccccctcttccccatttgtaggtgccgttgtttgcactcttaaatgcagttgtgaagcaatatcgttgctttgacattttgtacacgtgtgctagtaggatacgttcctagaagtggaattgccgagtcaaaaggcatgagccattttaggtttgatgggcagtgccaaaatatggtcttttccaaaaaatataccagttgacattccatcatgtatggatgccagtgactttctacacagccttgctcacacagtgggttatcaggcagtttacttccagatcaggtaggtgatctatggcatcctcttcctgtgagctctggttgctgtgggtgagggtagtgccctcaccagggtatgttgattttccatgagatgggtctctattcaaatcttttgcctattgttctcttggctgggacgtttcttgtggattgtctacagttttgcatagacgagatcacagctgtttctcatgtgtgttgcaaatatttctccaagttttttcatttcttctcctattttgtatttttattctctgcaggactttaaaaaccttcttacgtagtcaggtttattttttcttcacattatggcttctgagtttatgtaggagtcatccttctcttaaaatttgkcttctcccatgattctgtatatttttttcttttttaatgtcccaagtttacttccatctgaaatttattttggaataaagaatgaaataagaatccagcccccccacccccgactctactgtctagtttttccaaaactatttattaaataatccacctctattgatttgawatggcatctttcatcatatacagagttccccatttcaaatagatagctatttgccaactcctacttttaaaaaaatgcagaataaagtaaacagaataaatggctggggttgagatgctgttttgttttgttgagacctcctttcaagcagtctgcactcaatcacccctgctccctctgccaggaaaatcaagctttttagggaagtacatttcagaatttttgtcacctcctttctcttttccaagtgtttctgctacacattattgtcatcctcatattctagcccccaactgacagtctcctcagaacagccttgcgggtaatacatgacatatgcagttgacattatctgtgacttctttgcttgatgcaaaaggtcatagttagcaaaataaaatactgtaaatttctgtctgaccaattggagcttgttgctttagaaaaagctttgaagcttgactcgttccgggtaaaactgaatgttgccacaggaggtcactcttgggtaggctttgtagcttggttgggttgaccacggaaagaaaattaaacctaagaaacctacctaccactgctgagatagcaagtgtcaacctaaaagtggtatgggaagagggtaaaactagataactcagatttaactttttttctgattacataatctttgaagatgctctataggaaatttggaaagtagaaagaagaaaatcttaacactttatatctcaaccagtgatgccactatgaataatttggtgtactatgtatctgtctctcctgggggagctgatatggcacatgcacccacagagaaaagattgtaaatatgtgcccagaagaaatccaaaactgtatgtatataattttcgttctgcctttttctgcctaagatttcagtgtggtatgttgtgtcaacatcatttgttaggagtatgtattaggtctccatgatatacaaggaaaagaagagttacctatagctttttcaggaaatcatagcgttctaacaacscaggaagctgtttgcaggggtattttctcttatcttcttcttctgacattaccattggataccttttagtggctagggctccccactcaagtgagatgtctgtgtcccccactgccaagaaccacagagctcaccttctttcccagtcccacttccatgcctaccctgctgtctgcttgtgagcaggctcgtgagaacaggcgccacctggcagagagatgaaaacaggttctgcttyaacttctccggtatagaacttccaccacaaagggcagtgcttcccagtgctgggctgtggattggtatcctgtcatgcccaaatctgcctagtcgttaccaaataagcagacggtaatgtatgtggacattttgtgcgaggtgttcatgtgtcttgggaaaacctgtctcatgttcccagaaagtagctttccttacctggagtttgagtggcttttatgacattggcatgtagataatagaactgtacgtgtttttttgtttgtttgttttttgagatggagtctcgctcagtcgcccaggctggagtgcaatggcgtgatcttggctcactgcaacctccacctcccgggatcaagcgattctcccgcctcagcctcccaagtagctggggttacaggcagccaccatcatgcccggctactttttgtatttttgtagagatggagtttcaccatgttggccaggctcatcttgaactcctaacctcaggtgatccacccacctcggcctcccaaagtgctgggattacagctgtgagccaccgtgcctggctgaactgtaggtgttttaaggtgatgatggagcaaaatttttgttggcctttaaattaatttttttaattaaatctttaagtaaggaaactgttgacagctagacaagtttacaaacaaagggtatctgctagggctactgtggttttggttgcatcctgaagaatgagtgttttaagggtaggatgagtgttctaagggtaggagaaacatggacctcaatatagtaatgattccctttgcttcaaggaygttgatgtcttattctcttatctcacagtctctgtgtttaactggaaagtttggtcccttttcttttatgataattgacatagttggatttatgaccaccaccttactatgtggtttttttgtttttgagacagagtcttgctctgttgcccaggctggagtgtagtggcgcgatcacagctcactgcagcccccgatctcccaggctcaagtaatcctgccaccttagcctcccaagtagctggaactaaaggcgcatgccaccatgcctggctaatttttgtattttttgtagagayggggttttactatgttgcccaggctggtctccaattcctgggctcaagtgatctgcctgcctcggcctcccaaaatgctgggattataggtgtgagccaccatgcttagctactatatgctttagtttttccttctccacaaagtagacattattattattttggttttgtacaatcaacatttgtttagatttgtccacatattgatcaatatctttgcttacctttctctgcccctgcccctcaccacatctcaatgtatctgtggtgattttccttttgcttaagttgcattctttaagtggttatatgttagaaataaattctcaggttgtatagtttggctgaaactatctttattttgctctccttctggaaaggcagttttgctgagtatagactcctagcctgagagttattttctcatatcacattgaagatatgactccataacttctggcttccaytggggaagttgaggacttggccatccttactaggtgacttgtctttattctttgtctcttttaagctttcttggtcttctatagttttgttaagattgtttgggaattcatttgttgggtttatgggatccgaggatcctcagatccaataaacccaacaaatcatcaggaaacagttgtcagaagacatcattggtcctgtgtttcctacggaaataaaaaacaataaatattgcactgaatgtttgtggtttggtgtccctgaataataaagaaggaacatatttgcaaaaagttgcatagggtttttttatgcagaattttgtcagaagacagtggtgctgccatgtttttctttgagtgcaaatgtacattgctaagatttttttaagatggcatgtgctttgaaaagaggatattgcatttttaagagtttaaaaatcttatgagtgagaaatattaaaaaatcttattttcccctctttacaagaaataaaagatgttcctcataaaaaaaaaaaaaaaaaaaaaaggaaatattagccgaataggttatacagagttaccatatgacccagcaattccactctgaggtatattccccaaagacttgaagacagggactcaaacagatacttatacaccagtgttcatagcggcagtattcagtatagccaaaaggtggaaccaacctgagtggccatgaacagatgaatggatgaacgcaatgcgctgtatccacccaatggaatgttattcagacttaaagagagatgaagtactcatctatgcagccgtgtggatggactatgaacagtttatgctaattgaaagaggccagacacaaaaatgcacgtattttatgattccatttatacaaaaagttcagaatagagacagaaaatagattcatgcttggcagggcctggggggaggggagaatagggagtgcctgcttaaggggtgtggggtttccttttgatatcatgaaatgttctggaactagacagagataatagttgtgcaatgttgtgaatgtacttgatgccattgaattaatacactttaaaatggctccaaggataaattctgtgttatgtatattttaccacaattgaaaagaaacactggctgggcacagtggctcatgtccgtaatcccagcactttgggaagctgaggtgggcggatcacctgaggtcaggagttcgagaccagcctggccaacatggagaaaccctgtctctactaaaaatacaaaattagccgggagtggtggtgcatgcctatcaccccagctactcaggaggccgaggcaggagaatcacttgaacccaggaggcagaggttgcagtgagccgagattgtgccattgcactccagcctggtcaacaagagtgaaactgtctcaaaaaaaaaaaaaaraaaagaaaagaaaagaaacactggttgtgttgtgaaaatcctcagaaatagggaggggagcctggagcacctaactgcccttcccactgccttctcagccccagagagtgtcccctctgtccttcatcagagcacgcgaggagctccattcctggtcgtcatctgaggatgacacaatgagtaggactaggactttaaaactagtgtgtggaggttatatcctccatgtactgcgtcttaagttgggccatgtgtgtattggtccccaaagcattttttcagctaaattgcataatgactgttattttaaaaactggaaaaggaaaatcttaatgttacattatacctgtggcattgtcttgaaataagtttcaccatttaaatccactcttcacaggaaaatctgaaatgccccaggctcaccagcaagcgaggcctgcccactttctcttcctgttggcagctcagctcctcctgagctagtgatttttttttttaaagagatgggatcttgctatgttgtccaggctgtattcgaactcagacgcaagccatccttctacctgcgactcctgagtagctgggcctacaggcacgatgccatgcctggcaccattgatgtctgagcatttgccttagatgagcagaggagctggactcacagtttaaagtctccttagaccttgaatgcaatgaagcccatcctgactagcctacatattagatggctgtattaaccaggacttttgtccccactatctgtgccacaaactgggcaaatagtagttcctaaataacttactttaagttgtacctgtcatggttttaaaatgctacccacaaatactaacaaactgaatatcaaattcttacccagtagttctatccagtggccagggtgccctgacggtcattcctagctgccccaattgcaaggtccgccrttagcacatttctccctgtggattgctaagtgcctgccccagaccatgcctgggctgatcaagagaggcctgattcttgcatcatctctcgggtgtggttgcctgctacattccyaaaatacaactttaaaggcgagatctctagttgactgtatgaacatgttcatttgtgcctttgccagggttacatcaattgcagacaggttgaatgtggaatttgctttgatccacaaagagaggaagaaggcgaatgaagtggaccggatggtcctggtgggcgacgtgaaggaccgtgtggccatcctcgtggatgacatggctgacacttgcggcaccatctgccatgctgcggacaagtackcagggcggtggggaaagcgttaggacttctcactaggaaagggaaacacatcagcttttagaaattgggctcttttttcctgattattgccggtcttggcagtggagttttagaccaaaggagattctaggcccttttatctttatacttctttctctggtagaaaagaaagcacgggccttttcgttttccagggtgagcttgtagtgtacctggaaaaaggtcaaagaaggtgcttccctttgcactgagcacgacaggaaagatggtttttcgggcttcttcaggccctagcttccttccatttggctttcgtgccagccttctcagccacatgggtgtctggaggatttgtagagctgctgcccagtatggaagcccccacccagccacacgtggccgtggagctcttggaatatggccagtctgacttgagatgtgctgagagtataaaaaggccactaggttttggagacttaatatgaaacaatgaatatatatctcatttacatatatgtttttatgttgattacacatcaaaacaatgatgtttggctatattggtttaaacaggtggttctcaaccaggagtgattttgctccctgggagacatgtggcaatgtctagagacattttttgttgtcacggctgaggggtgggttgtcgttagtgggtagaggccagggatgctgttgaattttcccataatgcgtaggacagcccccgtgacaaagaattatcctggctcaagtgccaaggttgatagtccccgatttaatggaatacaaagtgttttgctcatgcttgagtgatcctatcttaggttaataaatgtgagtgaaatttgttgcatttttcttttacggagcacactttgtgcttttaccattcatactaggggagagtattccaagaatatttgcatacccttaatttttatcttctgctgttctacaggctgctgtcagctggagccaccaaagtgtatgctatccttacccatgggatcttctctggaccagctatttccagaataaataatgccgcctttgaggctgttgtcgtcacaaacacaattccgcaagaggacaaaatgaaacactgcaccaagattcaggtactgtctatrcaccaaaggcagccaagcagccaggcacctactttagatccttaaaaatagcatcatgtcttgtgtgtgtgtggctccttgctaaggcacatgcttggcagaggcggcagcttctcatgacggcaggatataaatcatattagatccctgaaaaaggccaggaccagcagaggtcaacgttcgctatttagaaatagagagtgaagaaaatcacaatggaaaaacagtcagaaacgggttgtgctaaagctaaacttagaattatcatatgatccaataattccacccctaggtatatgccccccaaatttggaaacatattcaaacagaaacttgtacagacatgttcatagcagcactattcacaataaccaaaaggtagaaccacccaatggccatcaacggacaaacagatggccaaagtgtgctctgtcgctacgatggaatactattcagcctttaaagggaaagaaatcctgacacatgctacagcatggatgaaccttgaaaacatcgtgctaagtgaaaaaagccagatgcaaaaggaggaatattgtgtttccgcttctaggaggtacctgagattggaaaattcatagagacaaagtagaatggtgcctatcagggtctgggggtggggggggcagtggggcgttatctatcatttaatgactatatagtttttgtttgggatgatgaaaacagtttggaaataaacaatggtgatagtttcacacattaggaatgtaattaatgccaataaattgtatacttaaaaatggttaaaatggcaaatttgatgttatatatgtaaattttcaactgataagaacagacactatacttgatcttagccagatagataaatagatagatacatagatagatacatacacactcacacagtgaaaaaatgggggtgggagcagcaggctgagctgaggatcttcagagctttgctccttcccgtccctgctgattggatgccgacgggccagcagagagctggtaatcatatagatagcaattggcctgaaataagtcaaaagggtttgaggcccattttgcctctatgtcgctgtgaaccttggcaagtcatttcattgctccaaagcctcggctcccatcagcgtagcatgaaggtgcatcacagtgatctgcttcatgatttctgattcctcagagagaaaagcaatttgcttgacacaaagcagtaagtctggaaatggtcaggatagcgatgtcatatattttcatgcctgattagcagtagtttaggatgggagttggcacactatggctcgcaagtgaaatccagcctgtcatctgtttctgcaaatttttatcagagcacagccacgtccattcatatatgtattgcccgtggctgctttcacgctacaatgggcaagttgagtatttgtgacagagaccctctggcttccaargtcaaatatgttaactatttggtcctctatagtttgctgacccctgagttagatgatcacagttgtgctcttaaatgacgcagtcaccgccttttcagaaacagaaagaaaaaccttccgtataatgattaaacttaatttaaaacaacaaatgcccctggaaaaggatgtctctggttaacagtatccctgaaaagccttctgtctctgcattgaaaatctcccttccaggatcccatatgggtctggttcaacgggttgtaatttgaagacataccccaaagctgtctgtcctctcaaaagtgtcggaagttttgatagcaacacatcatgtatgctgcagaaattgtttctcagctttccagcttttcaatgtttaaagaactctaactaagatgtcctgcttcccttctccctttgtttttctcaytggcatttaggtcattgacatttccatgatcttggccgaagcaatccgaaggacacacaatggggaatccgtgtcctacctgttcagccatgtcccgctataaatccagaatgggaagtgtccagcaagcctactctgacttctgacttgtttttgttttctggatttttagctgtaggtattcagcaatgataggttaatcactggcaaaagcatcagatctttgtatatgctaagatttattgtttccccttctaaagctcaakatcatttctttccagtttttggggaaatggtggtggttatttggtctttaagtgaactgtcttaaatgagaaacgtttttgtcattttgacttttaacaggtacaggtgatctcttcctttgttctttcagtactttgaggcgacaactttcaagtatataatttcattgtggaagtcatagtttatatatttcgaggttgccaaaggtgacttcasattaaagccttctgtgtaaatatatactgataatgcctatggacatttgggtaaaaccctgtatagaattaattatccttttactttggagtgaaccttggaaaatttataattataataccatggattttgaattttccttttttttttttttttggataactcagtttcagataaaccatcttggttactgtgcttaatttggaccaaattttatttagcttaatatggacactgacacattttggggggtatacattagacatatcagagcagtgtatttctggatcattttttaaatgacctcttctaaaacataactgtcacttacctgaaatgctgcatcctaaaattccaaaattatattgagcaatcgccaaggcctaaagccaactgacttaaaggtaatcatttcagctaagattaaatttaaagcctaagaatgtatagagctagttttaaaataatgatctcagatttttaaaaaggatataggaacctgcattgtcattctctgaattaagaactgatggtttctatcattatttagccccacctttgtattttaaaatccttcagaatacatttatgaaccaatgcgactggacttagccacacacaatggaaattcagaccttgactatttggtgtttccagttcacaaaggtgatgaagactgtcttgggagcagcttaatcccaaaatttgtacatttcttgctgctcctggcgtggaaacttaagtgagaccaccaaatacattggtcctgtccaattctactgaatgggggtggacctggcatttatctggccaaaaacaggagccagagaaatatgaatataccaaagttgtttgtttagcctccaacttaaattacattagtcaacttatagatactcatatgatcacttttctttttagatactacatcaactagattcaggagtatatcatttgcagtgcttgtattggtttaaaatgtaagattttaagatcctctaacactgtactaaaacatttcaataaaatcattctgactgcgttcatagtttgtatgtatcattgtggagtaatatgttttgacggagtgatgtgttgcagtacctgaaaatgtttgctactttacgattataggccagcatacaaaattacagaaaagccagaagttaattgatgtcagctgttttccattttgaaggtgtttcttcctgaagaacttaccagcaatcgcctttcctcaaagcgtaacagctgtgccacataaggtgtccacgttgttaattccacatgtttcctataaaattaaagatggtacagtgtgttcacgcatcagagtagtgatgttcaatatccatctattggagcaaaccaaacttaaatgtaggctgcataaaacttgttcatattcattgatttcagaagcaccgaggaggattcctgtccccatagaacagcctgttcagtgatacttcaaactactctcgtgagcgcaaagtcaagtcataattacgttcccctggtgaagctcagctgtaaagtatgtgtaacactaagaatggcaacatggtgtcttgaagtcacagtgaaatatgaagaattacatccaggtccatctgagaaaaaaggtgatcacagtgtgagagaacatgatagaatgtactagaaaggagggaagtgaaggagaagtgaaagccaaagacacttcatcagctttacaattgcacttaataatgctgccacacctcttcagagacgtttcatttcctatggcatgtcctatctaatcccctagctgaactacaggggacagggaagtagtgaagggaaagatggagtactaaggcgtgcagaggttggaatcacgctggggataccaggaagggctcggtgatcaccattagacggttcacgtcggaattttccagaaccctatggtgtgttccagtgtggactgacgcaggacagcagagggcgtttggtacatgatgtgtttgagcaaggatgtgccagggaagatgggagttaggggctgaaacatactcagctatcctgtatctaaattgcgtgaaatcaacagggctcctccttctcattaccaatatttatcttcctgatttatctccctgtgccccaggaacacatccctccaccttttttctgcccctgctttccaagatcacatcctgggtggtttcctttattgcagtctttgagctctgtttcctattctgaaagcataatgcccaggaacacagacttcaccacttaccggagtttaaaaaccaacagcaacaacgaccttgggctggttgcttaacccctatgcctcagtttccttacatgtgagatggggataataaatgagacgttatgtgtaaagtgtttagaattgcttggtttgtacattaacttcagtttttagagtgagcctcctgaaactcccctagaaagaatgtaaggtatgaagaggcaagattttcatgcattttctaggtgttcatcctagaggggaacacactgccctcctgccattttagaagggctacattgtcttggcatgtgactgcctcagtgaagggtagcatttaggtgacaaatagttgcatgttaaaaaaaaaaaaaaaaaaaacttgattatgctgaaagtagtggttctaccagcatgtcccgtggttccagcgctggttttgcccaccacattaacatttttttcgcccgagggccagcactaccaagtagaatatgcatatgcttttaaggctattaacctgggtggccttccatcagtatttgtcagaggaaaagactgctgtaattatcatacagaagaaatgcttgacaaattatcggattccagcacagtgactcacttactcaaaataactgaaaacattggctgtcactgtgatgaccggaatgacagaggtacagagggcacgctatggggcagctaactggaaatacaagtacggctatgagattcctgtggacattctgtgtggaattgctgatactactcagaatgctacaatgaggtctcttggttgtatgattttcattggtatagatgaagaacaaggccctcaggtgtgaaagtatgatcctgcaggttactgctgtgatttaaagccactgcagcaggagttaaacaaactgagttaaccagcttccttgaaaaaaaaaagtgggccgggtgcggtggctcacgcctgtaatcccagcactttgggaggccgaggcgggtggatcaccaggtcaggagatcgagaccatcctggctaacacggtgaaacccagtctctactaaaagtacaaaaaattagccgggcgaggtggcgggcgcctgtagtcccaactactctggaggctgaggcaggagaatggcgtgagcccggggggcggagcctgcagtgagccgagatcgcgccactgcactccagcctgggcgacagagcgagactccgtctcagaaaaaaaaaaaaaaaaaaaagtgcaaaagaaatttgattggacatttgaacagacagtggaaactgcaattacatgcctgtctactgttctatcaattgatttcaaaccttcagaaatagaagttggagtagtgacagttgaaaatcctaaagtcgggattcttacagaagcagagattgatgcactcacattgttgttagtttaccaaatccatgatgccacttacctgtgtgtttggtaacaaaaaaaacaacattatggaggtccctggattgaaaaaggagcctctcccactcctcctactactgaattgattaggactctataaataaaagcaatgcttttggtatctcagcattttaggaggccaaggcaggtgcatcacctgagatcaggagtttgagaccagcctggccaacatagtgaaaccccatctctactaaaaaatacaaaaattagtcaggcatggtggcgcatgcctgtaatcccagccacttggaggctgaggcatgagaatcacttgaacctgggaggcggaggttgcagtgagccatgatcacaccactgcactccagcctgggcaacagagcaagactgtctcaaacaacaacaacagcaacaactttcagctgagtgccgtggtgcattcttgtaatcccagctacacagaaggctgaggcagtaggattgcttgagcccaggaatttgagactggcctgggcaacatagagaaaccccgtctcttaaaaacaacaacaatacttccagtgggctgtagaaacaacaggtaggaatgaatgtcatgtgattatagagatggtaatcaattgaggtcatttacaacaacctgatttcattgtagccctcattcaccatccatcccatcataaatacaaccaaaagtggtgcccaatataaatgggaagaacagtcttcactatcctaacagccgagttctgtggccaaaagaaaacctggctgaatgaattttacattttaagagagtgataaaaaaagagaataggaaagtgaaaaacataatgcagtggaaaatgccctaaattggaagtgtggcgatctagattctggttcctgatatgctgctagcaagctgggtgaccttgggaaaaatgtgtacaccactctgggtatgagcatctttctgcaaaaattagaggaaagatgattgcagaagtccccagcagttttaataggcaatgccatttatgctagatgtagttggaatagttctaactgaaggcacagatggttgctctcaatagggtgaccaacttgtcttggtttgcgtgggacttttctcgatttagccctgaaagacctatatcttaggaaacccctcagtcctgggcaaaccaggacgtttggtctcccgttccctcttctaaggtggatagttctgcatccccggcactaccttggtaaggaatcccacgagcatggctttgatcttgtgctggttgcaaaaacaagcaggctatatgatgagcccaacaatgtgcagggcacctgtggtatcacaggtcttttaaaatctgttcaactaactatagaagctcaagagctgtagtcacaaaatcagagagaaaaagcaggggcacctttagaaaacaccttcaagcctggcttgattgccagtcctttggcacagctacctttaacaccataagtggtcttcagagaccccagggaacagtccaggcagaaggcagagtgctctgaaggttacctgatgtacgttgtccttccgcacattgagagattcttaacatttgtgagggcatggccatctgtgtctgaggacgtatgatgctctgattttccctacacaaggagtgctaaatctagtattttcttgcatggaagctaagactgaccatgaattatggacatattttaagaactaaaactgaacacgtcactctttaaaatcatcctaatgattatttctgggcatattttgatgtacatttaccataggataagctcagtatgtgccattgacatttactcacccaaggaaccaaggagcgaccctaaatttcttttctttttcttcctttccttccttccttccttccttccttccttccttccttcctctctctctctctttctttgtctctctctttcctgttttttttgagacagaaggtctcactatattgctcaggctggtcttgaactcatagtatcaagcaatcctcctgcctcagcctccaagtagctggaactacaggtgtgcaccaccatgcctggtgcaaccctaaattcctttaagtctcagaaaaccttgtatttaggaccaaggctatggaacagaagaatcaaaagaaagataggcagagatccctctccacagcaatggtgatctgacctcgcattaatttctgcacctggatgcattcatagcattcaaagagcaattctttcttgaacaccgaccaagactcattccttgtcctaacaacagtcaggctcctctgaatcctctccttgaccagacctgtcttgggcttccctctctgtcattgtggaatttagtttgagcaagaatcctgtgaagtcagtttatcaaaaaaactcctgcccttggtatctgaccaccctcgatatcttatcacccaggcttgcctttagcaagaattctatttgagttgatctagcaagaatccctcctacccctgatgtttccttagtggttttccatccacggcccccaaccctgctcgttgcttacaaatccccacttgtccttgttggagtcagagctgagattaatctctctcccccactataagaccccattgcagtctgtggtccctaaacctatcacaaagacccccttgaatgaagtcttccttagtgtcttcaatgaatgtgatgaataacttttttttttaacaatacaaaattcacagaaaaagtcctatgaattaaaaagcactctggggaaaaccagttggcgcgagagttattttggaagaatcaataatcctccactgatgtgcattggtacagccataaacacactttcaacccttgcgttttggagaggttttattacatgtacataaattaggaactttaatacatcggagaaataccacttgcttctctgtattttgactcatgtgaacatcttggcttagacatatgtcaaacggaaaattcatatttttagtccttccacaggcaaaatgaaggagttggtcttgttcttcattcattcattcattcattcattcattcatacactcagcaatcccttatgaagcacctattagtataccatagtgttaggatgcggctgtcatataagtatgagataaataaaatacatgaataaggcttatgtaaatctagccttcagagttgacacaggtcgttttttgtttgtttggttggttggtgtttttttgagatggagtttcactcttgttgcccaggctggagtgcagtggcatgatctcagctcaccgcaacctctgcctcccgggttcaagcaagtctgctgccttagcctcccgagtagctgggattacaggcatgtgccaccacgcccggctaattttgtatttttagtagagatggggtttctccatgttggtcaggctggtctggaactcccaacctcaggtgacccgcctgcctcagcctcccaaagtgctgggattacaggcatgagccaccgcgcccagtgacacaggtagttttatgcacaatcatttgatgtcagcaacacagaagtatgatggcaccatgctgtaggcaggataatttatttggggtgtgtgaaacagtggggtgaccaggaaaaggctaggaatgtggcctgctgggttcaat

SEQ ID NO: 93772 - DNA, 73824 bp, Homo sapiens
aaaacgaacctaaggaaaagaacaacaaattaggctttgtgaaatggaaggaagaaaggaaagggaaaggaagggaggcctagttcataatgtgttatatgatttagatttttacacaagtaagatattaaagaattacaagttaaccatctaaatgtaatactttccaaataacttagaagtaacatagtctgatttattctaagatgtgctatcatttatcttgaaaaattttcagtagaaaaatgatcataatttactggatttttcctacagtaaatcatttatttttatttattcttattggctctattgaaaactgtgtccctttattaccttgttgaaaatctaaaccatcaatagaacagcaaagcatattttaatgaagttaaaacctgttgcaaccctaagcaagtagaagattgaaaataagactttaatctgtacaccaggcaattctctaaacctgtcactaaattttttgaatccacctatccaaaaggtcagcaaaagtaaaggcttcattgcacaagttgataccagtaytgtgccctttgccaagaatgcttgggaaaataaaggattccattgtttcaacagattgacctggcaacttagtccagaaatgttttctttagactmatttagcagaagagatgaataaagtcaaacaactgttttacggtagaagcacttcaaagtagtgcttgagagctctgaagtttgaatgatctagctttgaatcttgactccaccagctgtgagctcttagtaagtccatttaacttcttatgactcaatttttccatttgtaagttgggcatgagggcactcaaacatggcatactgctggctgtctcttaatactcattcttctcatctttcaaagcaacagaatcttagttcttagcaggacacacaggtgagtggaaaaaaatctcttttacaactaggtgtggccatctgagttttgggatatatgtggcaatggcatgtgctacttctgggaagtattcttaaagaaaggggtaggacttcctcttccttcttcctacagctagaatatggacatgaaggcagaagctccaacagtttcctctgtggatgaggtgaccttggaattggaagctatatgtgccagaggtattagacagaaagagattgagtctctgccaccgtatcatatcaaccccaaactgactcttctggatttcttgaataggcaagagaaataaaccattgaccgaagccattgttttgggatatttatttctctgtctgccaaacctaattctaattaataatactaccacaaagaaaggttttaagaattaaatgagattatgtgctagctacatagtaagtgtgcaatacatcatgcttattattactattatattattattaaacaaggataatattatggtctaactattcagaaaaataaaatatatctggaaagtcttacctttcagaccagtggcattaaagaactataagggtgcctatcaaagaatagagtttctcctgagaagcaatttttgatgtattagaataaattacctgcaataaagaaaagaggtcaaacagacctggaatagctcctaatccccatggtaaccacatattttcttacaccaagtgttgcctaatgttcttagtctgaaggactctgaattttaaaaagaaatttaaaatggaaaataaaggtatgcacacatgatgccccgtaaagtgaaaccatttgaatggtgaaagatctcctgatgataacctcaattaacaacaatagcactatgaacaaaagaaacaattttgtaaagggaaatacactctaaaaactcaaaacaaggaccttcactatctatcaacacacacacacatgcacacacacaatcacatacacacacatatatatgacttttatatcagaaattgtcaataatgatctataattccacaatatgtatcacagacactgatggagaattaaaaattaaggagcagccttcctctgcttccaaacacagactatgtccaaaatcatgtcaaaaatgtctctactagcgcaacccaatagtttttaaaagaatccatggacacataaaatctcagtagggccaagcttggtggctcacgcctgtaatcccaacactttgggagtccaggcaagtggatcacctgaggtcaggagttcaagacgagcctggccagcatggtgaaaccccatctctactaaaaatacaaaattagccaggtgtggtggcaggcgcctgtaatcccagctactcaggaagctaaggcaagagaattgcttaaacccgggaggcggaggttgctgtgagcccagatagtaccatatcgcactccagcctgggcaacacagtgagactccgtctccaaaaaaaaaaaaaaaaaaaatctcagtaggtttctagactatccctttactatggaaaatatttgtgccaccttttccataactttattgctgccagagcacatcttagattgctattttgctttccctaataagcataacatcaattctcttgcttgtatttacttttcttgttacttgtacctaaactaacagcttaggtatcttgaggtcctggcagaaaaggcaagaataaattttataattgattaactaaaaaattatcattttggacatccccagggcaaacaaaggagtagcaatggaatccaacagaggtaaaggataacaaccatagtccacctaatcagaattccttctttgaggttgagactgaaaaagagggtgggggcaatgtaggtatcagtcagtattttacagaaaaagaaatgtaatgctcagtgatgttaaataggttgtccaaggtcacacagcccaaccaggatttaactctaggtctctttacagctaaggttctttctagcaagccattcagccttcacagtgtactaacaacagagaggacaaaagcagaattttgcctttaatacttgcaataataatgcaataatcataaatgtacctgggaagttgctgaaaagatagaaaataactcagtattgaaaaatgcacattaggagatttatattcaaagaaaaggtaactcttgaagactgttttggaagtcagtatctttcagattttagaaaaaaaagcaggatacatatgccatatattatactttcagcaggatctgggtagcaccctcttaaccatattaatatcactgtagtaaagcatgtgcatattcacactaagtgagataaataaagactacaggccgggcacagtggctcacgcctgtaatcccaacactttgagaggccaaggcgggcagatcgcctgaagttcaagaccagcctggccaacatggtgaaaccccatctctactaaaatacaaaaattagctgggcatgatggtgggtgcctgtaatcccagctactcagaaggctgtggcgggagaatcactgaaacctgggaggcagaggttgcagtgagccgagatcacaccattgcactccagcctgggtgacaaaggcgaaactctgtctcaaaaaaaaaaagactacaaaggtgcatatcagttcagtacagtttcagtgctaaatgagttcaggtcaagtcaggtcaggttttgaattttgaaaacacttcctcttttcatagctttttggatttcataatttcaggtaagggatgtgaaactgtactatgtcctgtcttaccaggtgagggaaatactaatgataaactgactgattgatttaccagaactgactttccactaataagggtaaagacaccacatatgccaagtttgttccatatacttggcacaagcttatttcctgttttgtgactcaattacagcccattatgtgactcaattgaattaaaaagtaggacatgaaaatgaaatacaggtcagtctactaaaatccagaaaaggtattaagcaattcatgtgtgacagttctaattcaatgttaaaactatagttaacttcctactattacacttgacttgcaaataaaccaataagaaaattagaaagcaatatagaattttagctcctgaaattcaatcatcaatttatcaataaaaaccattctgttcagattaaagacatttgctaccaccatactttattttgacaaatggacttgaaatagacattcaacacattaaaattcagtagataataatttttaccctgtaactgtataaacctgtagactgatttaatgtatcatctacctataatttttcgaggagcctcaatgcctgaatccaacatattttaaaactacacataaatttgcgagaacataattatcaaacaaaaactaaccactggatctcttgcatattacacactgctgttgcattgatacttttctctcctctgtatgcatcctttttttaacttcagtcttcattgattctacaattgggaatattttcccattagacatttatgtgattcttatctttaaatgttgtgatatattgtccttggccttcaggagatctatcaattaacattgctaatgaataggaaaaatagtaaaacactaaaaatgaaaatagactgggtgtggtggctcatgcctgtaatcccagcactttgggagactgaggcgggcggatcacttgaggccaggagttcaagaccagcctggccaatgtggcaaaaccccatctgtatcaaaaatacaaaaattagccaggtgtgatggcacatgcctgtaatcccagctactcgggaggctgaggtaggagaatcacttgaaccagggaggcagacagaggttgcagtgagccaagatcatgccacttcactccagcctgggtgacagagtgagactctgtctcaaataaataaataaataaataaataaataaataaaatgaaaatagatatctgaaaaaaaagactttggcacaattgttcaccttataaatctgtggtttgtgtttattatttccttgtcaatatgattagtgtcagagttactgttctttttaattttttgccttgtaaacaggtggtaaagagatcatttattagaccatgtgctataggtagtgcactacatgaacaatcagtttatatacaccatggaatactatgcagccataaaaaagaatgagttcatgtcctttgcagggacatggatgaagctagaaaccatcatcctcagcaaactaacacaggaacaggaaaccaaacaccgcatggtctcactcataagtgggagttgaacaatgagaacacatggacacagggaggtgaacatcatatactggggcctgtcacggggtgggggaaaaggggagggagagcatgcggggcttaaaacctagatgaggggttgataggtgcaacaaaccaccatggtacatgtatacctatgtaacaaacctgagcattcagcacatgtagcccaaaacttaaagtaaaataaaagaaaaaaaaataaaactgagcaagaaaagaaaaaaacggcaaataattttttagtgttgcacagaaaataatatctggcttgtcgtattctagcataaagtgagtcaacatcattgtttaaaagtcagacagatttcaattcagcatttttctccccaatctaattatttcagaagctcaggtaggatcagaaagaggcagtatccttccatgtaggaacacaccaaaggagctaattacataaaaacagaaaatacataaacaacacatgtaaagagggtaaatgacagatggctaaatgccataactaagttttattatactaccattaaccaccaaaattatgcatttcctaaagtagcatagtttggaaacaaatagcatatattttagaaactgtccccttgaactgtataaattgcaaaataaacagatatattaccctttctctgcctcccctacagtaactcattaacagatagacttaagctcctgcactttctgaccctcccaggacttgagttgccttgtctggtatccttatgcagaatgaactgaaataatcatcaatctgaaaagctactcttaaacaggtaattctaacttaatctacttgtatattttatggaacacctagggacagactgttagaacaatgggaatcttataaaaatatattaatctaattctcttattttacaaatggaataattcatagagagttctgatctgttcaagggcacacactcatttagtggcagagcccagactagaacccaagtaatctgtctccctctccagtgctttttcccacaggctttgccagatactgtttcatgtcttggattacattggtagaaccttttgttaatacataggtgaatccttgtcttccagattaggctcttgaatttccttatcccaactctatatttatgttttctgattttatggaatgtcatattcctttttctccaaagtattttaagggctacaatatatggcaaattttaactgttgtttctgttacttatttgaatttagatgaattatttgtatagttataaagataagatgtccagaaaccatattcatgatgtaaatgagatcaccttgtatctgctaaaaacattctagttaaacagaagataaacaataaataagtagtccctgcaggagataatttcatcaggggaccctagttacaattcaggtgaaacagaccaaatgccagagctctttatcaccctcgccaagactgtatccatgacaagctttagtaagcaaagagagcaataggaagcactttctttttgaggtagaaaagggctctataagttgaatattccccaaattacattatttgtattagttaaaagaacacaatagtgtagcagccagaaaacaaatatttgctcataagtttttatcatttttttccaactggacctggggattcctattgctcatatgtttactcacagctgatactctttcaacaataggggagataccatattactgttttctaccatggaagattcagtgcaatgggttcattttaattaccatgtaaagtgactcagactttgaggtcgtgaaatgatcccctttataagactaaatcacttttttttttttttttttgagacagagtctcactctgtcaaccaggctggagtgcagcagcacgatctcagctaactgcaacctctgcctcccaggttcaagcgattctcctgccacagcctccggagtagctgggactacaggcatgtgccaccacgctgatctaatttttgtatttttagcagacatggggtttcaccttttttggccaggctggtctcaaactcctgacctcaagtgacctgcccacctcagcctcctaaagtgttgaaattacaggcacgagccatagtacccagccgaatcactcttttatttttttttacatcactcttacgagtcatcaaaaacaactataaagtaagtgtctaggatgtttatttcactattatgtactttctcaggcattatacacaatatgatgtctataaatgaaggcgggcagatcacttgaggtcaggagttcgagactagcctggccaacatggcaaaaccctgtctctactagaaaacacaaaaattagccaggcatgatggggcatgcctgtagtcccagctactcgggaggtttgaacccgggaggttgcagtgagccatgatcgtgccactgcactctagcctgggcaacagagtgagactccatctcaaaaataaataaataaataaataaataaaagaaattctgcaaggtggtaagttattgcagaaaaataaaaccagttccatgtcaatctactataagcccactcagatctaagacatcttatttgcctagagcaagcttatccatgcatgtggcccaggacactttcaatatggcccaacacaaattcataaactcttttaaaattataagactttttttgcgatttttttaagctcatcagctatcgttagtgttagtgtatttcatgtgtggcccagacaattcttctttcagtggggcccggagaagccaaaagattggacacccctggcctatagcactctgtgtctgaatttttaacagattgcctactcctagcataataatgttttattgtcattctcaagtttctaaggtatgactatataaacagtagaaataaattaaatattaaaaaggtagaattgtatcaataggcttttttttttctggagacagtcttgctctgtcgcccaggctggaatgcaatggtgccatcttggctcactgcaacctttgcctcccaggttcaagtgattctccccatgtctcagctttctaagtagctgggactacaggcccgcaccaccacacccagttaatttttgtgttttgagtagagatggagttttaccctcttgtccaggctggtctcaaactcctggcctcaaataatctgactgccttggcctcccaaattgctgggattacagacgtgagcccccatgcccagcactcaataggcttttaatctagcttataaagtgtaaagaatcctagaggatatattaatgacacatatttgtatgaaaaaattatttcatattgaagaccagtaccttctcaaaactgccacagcagatgaatttcttctaagaggacatcaatttgggcctttattataccttgagtttaataagtgagaacttcaaggtagtatatgtaaaagcattttgaaaaatatgtataattttaattcctatatgaatttattgttcaatatgtttcaagaaaaaagatgaagcaattcacagtttttaaaaatgtaaaaataaaattatccaaacagaagccttggatgagattctactgaatgactctgagcttcctggcagccaaagcaaaagagaaatgcaaagtgttatttcttttcttttcttttgactgacaagaaaaaacatacaagttcatgtgaaaaacctatcttctcacatgaaattgtatatattatctcattcaaagtttctattttaatcatttcctttttatatgttttagaattataaacattatatgtgaatgcgagatgtggcataccacaatggacaaatttttaaattgcagtttttgaagatacctcagaggcattcttcatataagcattttttatgaaaaaacttaagaaagtaaaattaattattgagtttaactcctaaattagtggagttgagcatgtcaccaagccttgttctaacttgattcagggatttagcttagacagactagagcagcatttctgaaagggtgtttagaagatgtcctgcatcaaatyattcaaggctgtttcaaaggtgaagatttctaagccccactctacaactactgaatcagaactctggtacagatttcaaaattctcaattgtaaataagttatcctggtgaattgtgtgtctgcagtgctagttattagtactctttcaggatcaaacccgctcttccatatttggccttgtgatgctgaagccggttgtgggtaacctccagtgtcatttttgccacctggcttccggttagattctgccaatgggggagctagagagagaacagacgggaggaaggaggtggaacacactccttcccgtttgcttgctattcttgtcagtatcacctagctgtggttcttcacgccagcagttctagctttttctagtagcagttggttccagtttccactatttccccatctcccagaacctagttcatgccactctctcagagcatcttctgaaatctgggttccagctccactggactctcctctgcgttctgaagcaccagtgccatccaggcagcttcctcacctcagaggyctggattccagcttccaccttctccaagcttgtagtttccaacaaccccaacctttcacctttccccccaggcctagtggtagcagctgctttctgcaattactttccctgtgtatttgttcctttttcccctgtcagtcctccaatatctatataactaaatttccctgtgtaaattatctcttaaaatagttggtgtggtttcttttttcctgactaaaccctgactgatacaaatgttaatatttgagttctagtgagttgggacattaaggagacaacgtatctctaagacagtctcttccaattgtcaattgtttaaaccytctttcggtaccagtatacaaaagagtggtgccaggagtttcaaccactatattttattgccttaagaaatttctaggccaggcgcagtggctcatgcctgtaatcccaacattttaggaggccaaggcgggcagatcacctgaagtcaggagttcaagaccagcctggccaacatggtgaaatcccgtctccactaaaaatacaaaaattagctgggcatggtggtggatgcctgtagtcccagctactcaggaggctgagtcaggggaatcacttgaaccagggaggcggaggttgcagtgaaccaagatctcaccactgcactccagcctgggtaacagagcaagactccacctcaaaataaataaataaataaaagaaatttccagaagctttgggttctagaatagctgataacaaagttgaaattctattatcaaaaatgaagaattcttacataatctttcccagaatcagagccaatccagttcaacagagaggaagaccacgtatgataaatccrcaagcagaacaaaaatatttttttaaaaagatttttaggccaggcgcagtggctcatgcctgtaatcccagtactttgggagaccgaggcaggcggatcgcaaggtaaggagatcgagaccatcctggccaccatggtgaaaccctgtctctactaaaaatacaaaaattagctggacgtggtggcgtgtgcctgtagtctcagctactccggaggctgcatttcttgaatctgggaggcagaggctgcagtgagtcgagatcacaccactgcactccaacctgcgacagagcaagactctatctcaaaaatgtatatatatatatatatatatattatatttatttatttattcttcttaagggcttccataggatgcattacttgcactatctacaggacaaaagaccaaatgttggatttatatgtaagggcatccatgatgttatgcacttcttcaaaatgatttcaagtttatctttctttattagggcactgcttccacatgagctcattgttgttccctgctgcaccttatatatgtatttctaccttcatgtcttgactcaggcagtttcttttatctgagagtccttattgaatatacaaatacctgagcagtcctcataatggatactcaacacatgttggaactggcttggattgcctttcttctacagtgagtcttcctcagaattagtctgctttgaagtgctatagcagttactttatgtgcacattttaaacagagcacatgttctcttctgaattgcttgtgtctatgttcaatctttcctcctagatttataaactctttaaagacatgccatatatcttacagattctcgtatcaccacagtaacccacagaccttgcatagaatattgaccaataagtgccgagtgaataaggacctaacaaatagtcatctactatttgatgggtctttcctttctcctcttcttatgttgtagatatctcaaaagcttttcaaaatgtagagggtataaataatatctaatgtgctttatactgtgtccacagtattataaaataatattttcacttttctagatctgcatgatacttcccatacattaactatttaagtttcggtgacaactcttccattttaaccaagaaaactgagactctgagaacttaagtaaccatgtccaaggtcacgtaatgagacagtgatgtttctggaattcgaaaagggctctttcacatacattgcatggtctcttgggaagttagagcttagacagtgacgataacagtgatgagctcacctgacagattgctctttttcctctgcagagacttgcttcaacaccaggaagaacatgaaagggtgactcataattcccagcagcagtgccagttcatgtgctgggattctgaccacaagyctaacaatcaggtcagggagtcagatttctgttggatttagaaaagcatctatgtgtttatgaaagaaacccactggatttttaatagttctgcagctcttggaggctctacatctaccctttctccccagccaagagcatggctatgggagaaggaaggcaggcagcaggcaggtaagtgtgacttcctcacttcccctaccttctcatcttaaagccatagagtggttgctgggtaacccactcctacatatattggttcataaagcctagtgagccactgaaattcttactgatctgtaaaatttcaaacacactagtaacacagacagccatggtgtagatgacttgagcacacatagtatattttctgctcccattgggctgtttgaagaatagcattggctgggcacagtggtgtgaacctgcagtcccagctactctggaggctgaggtgggagaatcgcttgagcccagcaattagaaatcagcctgggagacacagtgaatctctgtctttttttttttttaaggccgggtacagtggttcatgcctataatcctaatactttgggaggccaaggtggacagatcgcctgagcccaggtgttcaaggccagcctgggcaacatggtgaaacctcatctctacaaaaaatataacaaaacaaattagccagccatgaaaaactagccaggcatggcrgcatgcatggtggtgtgcgcctgtcatcccagctactcaggaggctgaagtgggaggattacctgagcacgggggaggtcaaggctgcagtgagccaagattgcaccactgtactccagcctgggsgacagagtgagaccctgtctcaaaaaaaagcaaggtttaatatcaactttggtggcaccctccacagagtatttatactatagaatatgttttataaaaatatttgggaggccgaggccggtggattacctgaggtcaggagttcaagaccagcctgactaacatggtgaaaccccatctctgctaaaaatacaaaaattagctgggcgtggtggcacatgcctgtaatcccagctacttgggaggctgaggcaagagaatcacttgaatctgggaggcagaggttacagtgagccgagattgcaccactgcactccagcctgggcaacaagagcgaaactccatctcaaaatatatatatgtgtgtatatatatatatgtatatatatgtgtgtrtatatatatatgtatatatatgtgtgtatatatatatatgtatatatatgtgtgtatatatatatatgtatatatatttgctaataactttacagaactttcatataatttagacaggtgtctaggttctctggagtctcagaaaaataatacctagtctttctctacataacatttgatacataaaatggtcttattgcaagacaaatatcagaacaaagatcaaactgcttaatttcctacatcaattcaagcagaaacttttcaattcaatctcaaacttttaggcaaaataattgtccagattactttgcttctctcactcctgctcctcctccttcacccctcccttgcctctcttgyctctttttctaacaacctagccttccttttctacctctctcgcttttaattctcacccctttctttccttttgtagaggaggggcttaaacttttaagaaattgctttgtttgctgtactctctcaaaagctwggtttgagcagccaaccctgtttgcataaaatgaaagttagaaaactaaaagttttgtgaaccaagggtggaggaaaaggttatgcattttatcacacagttcatcatcctatcagccaagaatgaggttccgtttttctgagtaatccctcacctacccacatcctatattggcaaaatacgtgcgtaagaggaattggcaggagctatcagagaactaaaaattatcaattaggtgtaaaaatatgtctgcagttaccagtaagttagtattttcactattaaagaaataggatattttgccattacaaatagttatgtaatttgtcttttcaccattatttaggtacctttatagagttatgagtaatatttcactttttgacaaaaagaaaattagaatcatgaagattaactgtttctcgagatagggcaaggataataacagtatagatttctgaaaatgagccgatagaaaatcaatccaaagaaactgacagaaggaagtcaaattggaaccatccaaaatgatataacaatgaaatgtgatcattaaaacagccatgaagttaatttacttaacacttttttttcatacactggagtcagcagattattccaaggtgaagaaaaggcatagatgtaaccttgtaagaggacagctgtgagacacagctacagacaaagccagcctgagaaaaagcacaaaggctgaatattaaatttatatgatggtactggaaggcagccaggagtggtttgccctgccttttattcccaaatctgtagttgggatggtaccataagatgctctaggtaaacatgaaggcttagacgcccagatgtaaatggctgcctcatacagtcacacaggctatttactgcacaactccagtggacgccgttcacataggctacaatgtgaaaaaagccccctgaatttgtgaacatggaggcccttctgtgctaaatcactakggtcatagggaataatagaaaaaaaggagaagataaaattgtattaaactatcataaagattttttcaaataaaacatatacatagaaaaatgatcagaaggaagtacatcaaaatgaaatttctagaggcatacctgaattcattttttcttattcctagtcttctgtattttaacattgaataaatcagcagttttaaaataaattaacatttaataaagtagtaccttaaaacatccaaattgatactttcttatagcttcaatgctataaactatcagagatgtaatgattagaatggtttccataccaatggaaaatcctttagaaaaatgagcactatttttctacatttgtttgcattttaacctagctttataatttcaactattcaactaaatataagaatgagctttgcttgtgaaaattctgatattataaatactagagaacttctatattgtgtgtccaaagatagatcaggtttcaagcacagttccctcagtctccaaagtcctctcagttctgcctgcctcttgagttggtgtccatcaagataactgcaagcaatgagggctacctgcttcctggttcacagccaatgggcagagactgtccacctctaaactaatcacagactaagaagaggatttggtttaattagtggggaatagatggaatgaagggcaaataccgatttgtgaggcctgtaacattttcagtctgggggttctctttaactaaaacaataaaaaatttattccaaaaatgaacatttatttggaaagaaaaaaacataacaaattataatttttaatgcaaaatgcctacatagacatcacaaaatccagaagagataatgtaatatttgtattaagttcctgacccatatctattatgcttttttttttttttttttttgtaaatgcagtggtgcctgccatcttagctcactgcagcctcaacctcctggactcaggcaatcttcctctctcatcctcctgagtagctgggactataggcacgagccaccatgcttgatcaatatttcatacttttttgtagggatggggttttaccatgttgcccaggctggtcttaactactggactcaagtgacccacctgtcttggcctcccaaagtgctgtgattacaggcatgaaccaccatgtccagcctcccataacacttttatctgcatgtttatggccacatacacttttttttttttttgagacagagtcttgctctatcacccaggctcactgcaaccttgcctcccgggttcaagcaattctctgcctcagcctcccgagtagctggaattacaggcatccaccaccatggctggttaatttttgtatttttagtagagacggggtttcaccatcttggtgaggctggtcttgaactcttgaccttgtgatacacccacctcggcctcccagagtgctgggattacaggcgtgagccaccacgcccggtcaaccacatactctttgattgcctcttcttatgacaactttataatagttaataaagaaaaaattagaaataacaattcaatctttcctctcacatatataattgaaattgttactgaaattttgaaaactttcttctagtgtcacaatttattatgagtgaagtcatacaaattttcaggaatattgtcaaattttggtaaatctctattaagttgttttttgatcttttcctataagattttccacagtttagcttctggattcatacctctcaaatcttgaatctcctctatgctcacatactaccagtaccagccacaggacctgctcatggctgcatacatcctatgtatgggtcagcacagcacagtggatggtaggactatttctggaagccttttctataccaaggcagctagctgtacatggaggtaggtgcaaaccaggtaaataaatgccattaaatccacaaaaaaaaaatctccccattcactatccccttattaaatctcaaaaatgtcctatgccactgtacagctttcaaccgaagagcaagtatgatggaggggaggaagttggagagtgaaacaaaaatcaatcatattataactatgagagttaaaatattttattgttacaaattttccaaaaacacatgagcatgttcaatcagtatctaggccccaaaagattgaattctatttgggaataagctaccaaaaaatatcgtctggaaaaaaaaatagtgcacaatatattttttgttacactgatcaaattatatctgctttttagctaatccattaataattaatgtattgcactaaggtattacatacccgatgtgagccttcatcctatggcatgggaaggaggggttagtcacagaaatatcaccagacactgcctttgaagagctactgacctgacagaggcatcaaaatctataagcattcattttctcctttaagagacttgatagattaaaagaaaacaataaggctgggcgaggtggctcatgcctatgatcccagcactttgggaggctgaggcaggtgggtcacttgaggtcacgagttcaatacaagcttggccaacatggttaaacctggtatctactaaaaatacaaaaattagccagatgtggtggcgcacacctgttttctcagctacttgggaggatgaggcatgagaatcacttgaacctgggaggcagaggttacagtgagccaagattatgacactgcacttcagcctgggccacagagcaagactgtttctcaaaaaagaaaacaataagatgaatatatcttgtcattaaaaatatcttaattttgtattacacagaataattacatgaaaaaataaaggctagaacagagctctttaaaaaatagtttggttggagattcacagtgagtttgctcaagaaataatgcttaccaaactatagtatgcrttgtttaatcttgaatacaaagctatttaacttttgcagcagttttatggctgagggactagagcacatgattaaatttacagataatagcaaattagaataaatggttattacttgggaggacaggattagaattctaaatgactttgtaaagctgcagaaggaggcatatagactaatgagcaatagcattgagaaatgtatggggaagtatacttaggattttttttaaagttacacaaacaaaatatagcaaattcctgaacaaacttttttaattaattaattaattaattaatttttttgaggtagggtctcactctgtcgtccaagctggagttcagtggtgtgatctcggctcattacaacctctgcctcctgggttcaagtgattctcgtgcctcagcctcccgagtagctggaataacaggtgcacaccaccatgcctggctaatctctgtatttttaggagagatggggtttcaccattttggcaggctagtctagaaattctggcctcaagtgatctgcccacsttgacctatcaaagtactgggattacaggcatgagccacagtgcccagccgaacaaacatttttttaatgtggaaactgccattcatcacaaattgaacacacatcagaatgtatggcaattacgtttaaaaaaaaagttttactttggacatggtttaacagtgtaactggaaggaaacagaaagcaatatgtttttctactacatctgatgccatgcaatctctctgggatccaggttcactctaagttaggagcaatggttctctgaggacatttgaatacagaactagtaaacctgatacatttctccactgagtgaaggtaataacacagaagccatcaccacacacacagagaaacacacacacacacacacacacacacacacacctctaaaactggggtctaagccaatgcagtacttacaaaacatttatgctgggtgcagtggctcaagtctataatcgcagctatgcaggaggctgaggctagagaattgcttgagcccaagagttagcccaggcaacgtagcaagacaccatgtctctaaaaaataataataaaattgtcaccaggcacgstggctcatgcytgtaaccccagcactttgggaggctgaggcaggtggatcacctgaggtcaggagttcgagaccagcctggccaacatggtaaaatttctttactaaagaatttctttagtaaagaatttcataaagaatttctttactaaagaatttagtaaagatttctgtactaaattctttactaaagaatttcaacatggtgaaatttctttactaaaaatacaaaaactagctgggtgtggtggcacacatctgtaatcccagctactctggaagctgaggcaggagaattgcttaaacccaggaggcagaggttgcagtgagccaagatcgcatcattgcactccagcctgggcaacaagagtgaaactccttcacaaaataataataataataattgtaagaatgttaacatataaacagtattttaggtaataaaatacatggggtgtggtccctgtggatgaagaaagatttagaaggattaaaaacacagtaataggacaggcacagtggctcagcctgtaattccagcattttgggaggccaaggagggcaaatcacttgaggccaggagtttgagactagcctggccaacatggtgaaaccccgtttctactaaaaatacaaaaaataagccaggcatagtggcatgcttgtaatcccagctactcaacttgggtgcctgaggcacgagaatcacttgaacagggaggcagaggttgcagtgacccgagattgcaccactgcactccagcctaggcaacagagcgagactctgtcttaaaagaaaaaaaaaagcaataatatgcatttccctccttaattaaatggtgaataaacttcatttattctataactaaaattagtggcatttgccagttgtacatatgtgtcatatgattctttcagggataatatgaggtatcgaatgttaataaatgtagaaatatttataaaaatcaatgtaatacttagagcaacatcataaacacatttatagtagttttgatgagttagtcacaaggattgtgcctttgtgatatcaaaggatcacaaagctgacagccttccggaagattatggctagttaaaaatcaatagctatatttaggctggccacgatggctcatgttaagtccagcacttttttattttttgagacagagtctcgctcttgtcaaccagrctgcaattctcctgcttcagcctcccgagtatctgggtttacaggcgtgcgccaccatgcacagctaatttctgtattttttgtagagacagtgtttcactgtgttggccagggtggcctggaactcgtgacatcaggtgatccacccacctcggcctcccaaagtactgggtttacaggcttgagccaccactcccggtctgtaatcccagcactttgggaggccgaggccggtgcatcacctgaggccaacagttccagaccagcctggccaacaagatgaaaccacgtctctaccaaaatacaaaaattagctgggcgtggtggcgggtgcctgcagtcccagctactcagaggctgaggcaggagaatcgctcgaacctgggaggcgtaggttgcagtgagctgaaatcctgccactgcactccagcctgagcaacaagagctagattctgtctcaaaaaaaaaggaaaaggaaaaagaaaaatcaatagctatatttaattttgacacaggtcattttatccctctgctttactggtatttgaaaaccaatcacaaaagtttaaggatatcccattaatttcccagacagagtgaattatataacaagattagattagattaaaacagtggtattcaaaaacatctgaactcaggaattttcgtggggaacaaatcaccacttatattttatccatataatttttatcctgttttaaaattgatgtatgactttataatatttttctactgtaacatttgtgtcagtcgcgataactgtgttttatccacaaggataataaatactctaaagaatttmtttatagtatttcctacttaatagaaaataagtatcactacaagaaaaagcagtcttaatttttatttattagaaaaggttttattatattatttatgtaaataatgataaatacaacatttaaactataacatatttgatagtcttagcagcatagtctttttgtaacataagggtccccctaaagcattccaatttaaaattttcctcaaagcaaaaagctctatgacttaattctgaggattgacacttcaactgggtaacatgtcaaatgaattagagaaagtgggaaaagagagaataagagtagtgatggggaattaaggttaaatagttttaaaattaaaattaaatatttgttaaattaaaattaaattaaatatttttagaaactaaagtgaaaggggcttccatggattcatgatgataaagtgaatgaattagaataatgttcttaaccattcttaagtttacaagtatttttaagagggtggggacagtagaagtatttcctggtcgaggcaaatgtggttcctggaccaatagcatcaacgtcccctgggaattgttagaatgcaaatcatcaggccctattccagacctagtgaaccagaaactgtgcagtggagccaggaatcctgatttaacaagctctacaggtgattctaaagcaggataaagaggaaaaaccatattagtaacacctgggagatttcaacaccaatgcccaggcccaggctcagatcaattaaatcagaatttctggaaacagggttttggcatcaatatggttctcaacgctcccagtagagaaccattgccttagagcgtaccttttcaccccagagaaaaaagccaactggctgagtgccaaaactaaccctcactcaatgaattagttgaattctgcatttgtttgttttacttctttttacaatgaaagtttttcctaaaagaagtgtgaaaccacaagctgagtacaatcagtcaaggttgattaattccacttaaaccattaacacccttgtcagcagatcagaaccctgaggaaatagggaccctacagtttaatttgtgtttacatggcaagggggaaggagggtgactatcctaacccgtagggcacaatgaggacacctcaaccrccaagaatctggcgaaagggccacggccstagtgagagagaagttggggagaatcctaccaatggaatacaggcaggcccagacaggagtttaaaagaacagaaaagaggatgtagtgtcacagacaaatttcacttgcatcagtcagagtttacctgaggccagtcttgtatagccaaatggagattagtaagaaagaaagataaattatctctgaaattattttgcaaaatagtgggaaaattttttaaatttgctgacattaaatgtacatgcaaatttttagcaaggttgtgcctaatcaccaccatgaaaacttctttggaatatgagccttggtgtttaccagtagggaaatgacaggttgttcaaaaggaaatgtttcccaagttctggttggaagctggcatcagagaaagagggaaatctagaactgttcttagtttctctagcaacaagatttcaaaaaattgtactgaaagttcagtgaacattgttacagggatttccattcttcataaaaagaataaacttgcaaaaactgagactgaatgatttagcaattgaattataaaagatcaatgttggatattctgtgttttaaaacataataaaaattagattagtttaatttgaattcgagacactaagtgataaagttacatgttcagtatttgaagctgtagctttgcataagcaataaataattaataggattttgaaacttggtccaagcatataaaatagtgcaaataccaagaaatagcatgcaaaaagaaaaaaagaagttgagattgcaaaagagattttcttattttttaagatagcatgaaaatgtgctttagtttttgcctacaatagttcaaaacatttagctgtcccagaatcacatggaaggcttgttaaaacacagactgatgggccccacctccagagttctgattccagaggtctgaagtccaagccaattttgcatttctaacaagttctttggtgatgctgatgatactaggtgtgggaaccgcattttgagaagtaataatatttatttatttatttatttttatttttgagatggagtctcactctgtcacccaggctgcagtgcagtggtgcaatctcagctcactgtaacctcctcctctttggttgaagcaattctcctgcctcagcttcccacatagctgggattacaggtgtgcgccaccatacccggctaatttgtgtttttttagtagagtagaggtttcaccatgttggcccatgctgatcttgaactcctgacctaaggtggtccacccaccttggcttcccaaagtactgggattacagtcatgagccaccgtgcctggcctgtaaagtactgatttagaataatgaataaattctaacctgtagaatttgtttaaaattacataacatgtaatattaacaaagagataaagagtaattcaataagtatacttgatctaccacctaacctgaaggattaaacattacaatgcagttaaaatcctctgtatctccctccaggattccatcccacttccaacctcaaccataggggtactcactatccttcatgtttaatcattattctttatggtttgcaaatcaacaaggaacaggaaatcwaaaagaaaataggcaaaggatggccaggtgtgtkggctcactcctgtaatcccagcactttgggaggctgaggcaggcagatcacgaggtcaggagttcaagaccatcctggccaacatggtgaaaccccgtctctactaaaatacaaaaaatattagccaggctgtgcctgtagtcccagctactcaggaggctgaggcaggggaattgcttgaacccgggagagggaggttgcagtgagctgagatcrtaccactgcactctagcctggcaacagagtgagactctgtctcaaaaaaaaaaaaattggcaaaggatatgaataggcaatcttcagaaaaaaactcaaaagttcagcaaatgtgtgaagatatgtttaaacttaataatcagaggtatacacatttttaaaaaataatacagtgacataaccctttagatccattaatggacaaacattggaaagttggataatgccaagtgttggagggtttgggggtgggrgtaataggaatgttcatgactgttggtggacactgatacagccatccagaagacaatctagagtttcttggtcaaatcaatatagctatgcaycatgcccctgcactttagctcctgggtatccatccctaagacattttgaacatccaaaaggagacaagtttgaggatgatgatggaatctggtgtgcatggttggagagtgaataaacaaaatgtggtagatgcacttactccttgaacaacctaccacccagccactagaaaaggcaggagcccagatgtatatagaatcatagatagatcttaaaatccagtccttaaaatccagatgtgtatagaatcatagatagatctgaaaatccaggcacaatgggtcacacctgtaatcccagcactttgggaggctgaggcaggcagattgcttgaggtcaggagtttgagacmagcctgatcaacatggtgaaaccccgtctytactgaaagtacaaaaattagccgggtgtggtggtgcatgcctgtaatcccagctactcaagaggctgaggcatgagaatcgcttgaacccaggaggcggaggttgcagtaagccaagattgctccactcactgcactccagcctgagtgacagatagagaccctgtatcacaaatgaaaaaagaaaagaaaaaagaaaaaagttagatgaaaatgagatttctatcacaataccatttatgtaagttaaaatgcatgcacacaaaacaggatgcatattaaacacatcagaatggttatgagggtggcggggagacgtagaaatagcaaataggaccccgtatctactaggaccaaaatggtgaaacgccatctctgctgaaaatacaaaaaaaaaaaaatagccggtcttggtggcggtcacctataatcccaactactcgggaggctgaggtaggagaatcactagaaccccgggggcggaggttgcagtgagccaagatcacgccagtgcactccagcctgggtgacagagcaagactctgtcaaaaaaaagaaaggagggkaggaagaaaggaagtaaggaaagaaggaaggaagggagggaaagaaagaaatcctcacagaatgaatagtgtgccctaaactaaggagtataattaactcaacctgagctctatatagtttaaaagaaatctgcatctcatcctagaagagagaaaacaatcaaagcaggttttcttcttccattactagtatcagtatctcccattgcctccctcttagcctccctcttagccaggtatcttagctagattcccattctctttggataattttgctaaggaaaggtttgggaggtcaaggcgggtggatcatgaggtcaggagttcaagagcagcctggccaacatagtgaaacccctctctactaaaaaaacaaaaaaatagccaggcatagtggcaggtgcctataattccagctactcaggaggctgagacaggaaaatcgcctgaaccccggaggcagaggttgcagtgagccaagatctcgccattgcamtccagcctgggcgaccttgtctcaagaaaaacaatttaagtctgaaaggaatctagcactaataaaggaatatcagattttaggactgatatttccaacctctttgcattcatctatcaccccttgattgatgaacttaccatatatttcaccaagcaattagaagcaatcagaagggcaagcccctactgtctccatccaactccattaaaaaagatgcatttattaatakatttaccatctcttcctactactgtgaaatgtcactactgccttctgaaagccaacctccttacacccttaatggcttcacccctgtttctctttcacatcatcaatatttccctctgtactatgtcatttccatccagcttacaaccatttcctggtgtctcccatctttttctgccattttaaaatatactggtaaatacacataacttttttacatagaatttcctccatgttttaaaaactctcatttggtggataaagaaactgtggtgtgtgtgtgtgtgtgtgtgtgtgtgtgtgtgtgtgtgtgtgtatacatacacaatggaatactactcagccataaaaaggaataaattaatggcattcacagcaacctggatgacattggagaatactagtctaagtgaagtaactcaggaatgggaaaccaaacatcgtatgttctcactcataagtgggagctaagctatgaggatgcaaaggcataggaatgacacaatggactttgggggactcagggggaaagggtgggaagagggtgagggatgaaagactacaaattgagtgcagtgtatactgctcgggtgatgggtgcaccaaaatctcacaaatcaccactaaggaaattactcatgtaaccaaacaccacctgttccccaataacctatggaaataaaaaaaaaaactctcctttgaactcaaaaactactaaatctgacttaataatctactgcctttccaagtcacagcaaaacttttcaagagtccaacctctccatattccttcttcccatgttgcctctctccaatctctcttcagttcagtttttgccccaagactcaatgatctaaccttattccatttaatttctccttggcgcttcacatagttgaccagttttctccttgactcagttttcactgacctgacactcgctggtttgtcttccttcaccgactgcttttttgaaatctcctttgccaacctctccgctgacctctacctattaaatccacacttcttcacaaatcctacatcctttccattgctctatatgcaaaatacatcccatattatcaccacctccacccctacctgattcatccaagccatgatcatgtctcctaaactactgctctagcctcttatgtcgtgttcctaacccttgcaaaccattctccataaaacagccagaagcatccttttatttttatcttcttgaacttgcaaactacaaatttagaatagtataatgagttccactacccatcacaacattaattaacatatggccaatcttttttcaactatatcccccactgcaccttctcctggctggattattttaaaacaaagctgtgacatcatttcattcacaaattagagtgctcctttgaagcataagccagtcatgtgctagggtgtctcatgtctcagtttgccagacttgtccctgttttaaaactgaaagttccttatcccaggaaacccctcagtcccaggcattctgtgatcattcagacgtcaactaaaatgaaccctcctcagggaagatctgaaaacttatttttctttctttcaattatatcatcctgcaggtttccttcttggcacctttcaaaagttgcaatagtcatattgaaatatttgggtcttgtttactgtctaatcctcccactaaagtgtaaattataagctctttatgaaaagggatattatctaacttattcaccattttgtcttgtactgagaacagtatctgacaggaagaataataattgttcattgaataaatgcatctatgtattcataaggcagagtgttgatgattgaatgtgaggaaggatatatcacatgaacatggaaagaaggttgtgacctacacactgtgcccattcatccaattggttccccagtcaagagcccaatatttgagaaataaaccctaatctttactgaaagamctggggcaaatcatgtaatgcctcctaagtcaagtgaaacttataatgacattctcctatctgcctctagcttaatttctagcaactttctacccagctcacagtgtaataagagtttcttttagatccccaaacaaagtagatttcattttactcttcgtgtttatttgtacacaaaagcattgatagtcccttgttattctgtttttaagagttgtttataaagtttttttacagatataaagaaatggagtagtccagagtttaatgaactttcagatttcaaccattcatttccttcaccacattgtaattctccgcccccaaccccgtatttcatgtagaggagtttccttttctgcctrtgagctggtatgccctaattctacttacaatkgtggggagtaaagactaccagacactgtgcctcagacagttgtccggagggctttaccacaaatcatcttagttttctaaacattctttgatgtaatttgagatatgaagaaaagatgcaagaaaaatataaagaattcctgcctattttcactcagattccctgaattttaacatcttgccaacatgtttcatcatcctctctctacctatgtatatacattatttctttctctatactgtttgcaaggaagttgcagacattatatctttaacactttagtgtcctaaaaccccagggtccaaaaacaggaatatatattctcttacataactgcagcacaattatcaaaatcaggcaattagcatcaatacaatagtcttagctcatctacactagctagaatttatctagttgtcgaagtaacatcctttatagtaaaataaaaacctgggtcacagactggctagagtggtcatgtcatgttttctttgatcttaatagtggatcagttattatttatcttctatatgaccttgacgttwctgattagtacaagccaattataccaagaatgtttctcagtttgggtttttctgatgtttcctcatgattagattcaggatacacgtttggcaggaatatctctgaagtgatgttattttcctctccacgtatcctatcaggaaatgcttgatgttaatttctcccattactgaagatattaactttggtcacttggtcatggtgatggctaccagatttctaaaataactacttttccctttacaattaatgtctccgaagagatactttaaagttatataaataccatattgcatatcaaactttcatgcactagttttatcatccactgatgattcgatcccaaattattaccatgataatttccaaatggtgatttctaattctgccatttcttcaacatgtaccaattggcattctactgtaaggaggtttcccttcttgctcaaatacttatttaaatatgtactcattgattctccttttattcagtgagttataatctgtttctatcttttcttattttgatactcaaatcgtcccagatttggggcaactggaagtctcttcaagcagattttggtgtccttttcatgtcttttccttctgcctttgagtacttccttaatctctggctcaagaaatctctgggcgtggaaatttcttaggctgggtgtggtggctcatgcctgtaatcccagcactttgggaggcggaggcagatggatcacctgaggtcaggagcttgagaccaggctggccaacagggtgaaagcttgtctctactaaaaatacaaaaaattagctgggcgtggtggcacatgcctgtaatcccagctacttgggaggctgaggcaggagaattgcttgaacctgggaggcagaggttgcagtgagccgagatcatgccattgcactccagcctgggcaacagagcaagactctgtctcaaaaaaaaaaaggaagaaagaaagaaatttccaatcttaccttgtacttttcctgccccarccctggaacaagtcatttctcaataaggcctgtttccttttagaggaaaacagtatttaggaaccaaaatctgaatattattagacgtgctcaaaattcaatccaatactctgagattcattctagctttcccatgttccatatttgtgtctacttgtctctagcaatgagaaacctggttctaagaagaaagaaaaaaaagaaaagaaagaaaaataaaaataaacctggttctgttattcaaaatatatttactcatttgcttaaaacaagaatatccagaaagtagtttcagagttttaaaaatattaaaaatagaactattatatgatccagcaatcccacttcagggtatatatccaaatatatgaaatcagtatgttgaagagacatctacackcccttgatccatgcagcatcattcacaatagccaacaaataaagaaaatgtagattttaaaatgtggataaagaaaaccatatacataacatgtatatacagtatatacacacacaggaatacaatttagccttaaaaaagaaggaaatactgtcctttgctatgacatgaatgcacctggaggacattttgctaagtgaaataaaacaggcacagaargacacatactctatgatctcacatgtgaaatctaacaaagtcaaaatcatagaagcagagagtagaatggtggttgccaggggctgaggcttggggaaaaatcaggagatgttgtttaaagagtacaacatttggccgggtgcggtggctcacgcatgtaatcccagcactttgggtagccaaggcaggtggatcacttgaggcaaggagttcgagaccagcctgaccaatatggtgaaaccctctctctactaaatacataaaaattagccgagcatggtggtgcatgcctgtaatcccagctacttgggaggctgaggcagaataaacgctcaaaccagggaggcagaggttgcagtgagctgagatcgtgccattgtactccagcctggccaatgagagcaaaactccatctcaaaaaaaaaaaatagagtacaacctttcagttaggatgactaagttctggagatctattacccagcatagtgactatagttaataataatgtgttacacacmtgaaaattttgaatagattagatcttaaattttctcatctcaaaaaaatatgtaaagtgatagatatgttaaatagctttatgtatttcgcaatgtgtagtgtatatatataaacatcacacagtacaccataaatatatttaatttttgtcaattactctttaaaccttaataaagttgataaaacattmttttttaaaaagttttggattatagtagtgatagatggttttcacttatttcccatcaaaagtttatttgagcattctcctttcacaggcaccattttggctctgccctactcagatataataagattaatcactctcaagagaatgcctttcaggagttcagaagtttacaggctagtaggggggaattttttttttttttttttttgagatggagtcttgttgtgtcactgagactggagtgcaatggtatgatctcagcacactgcaacctgcgcctcccaggttcaagtgattctcctgtctcagcctcccgagtagctgggactacaggcatgtgccaccatgcctagctaatttttgtatttttagtagagataggatttcaccatgttggccaggctggtcttgaactcctgacctcaagtgattaatctgcctcggcctcccaaagtgctgggattacaggcgtctgccacctcgcccggccaggggggaatttttttttttttttttttttttttaagatggagtcttgctctgtcgcccaggctggagtgcagtggtacgatcttggctcactgcgagctccgcctcccgggttcattccattctcctgcctcagcctcccgagtagctgggactacaggtgcccaccaccacgcctggctaattttttgtattttttttttcagtagagacggggtttcaccatgttagccaggatggtctcgatctcctgacctcatgatccacccccctcggcctcccaaagtgctgggattacaggcgtgagccactgcgcccggcccagggggggatttgttaatgctacacagaccccagatttagttctccacctttgttcttgcactttccaacacttatttatttaaaaaccacaaatttgatttaaggctttcttgcttaaaacccttaaagttccccattatctcaccatttcatattccctagtatggaatataaattctttcacaatcaggaacttgtttaattccctctagggattccctgtttcttttctgcccacatcccccatattccaaaaccyactactcatccacaactcagctccgaggtcataacctcttcatgaaagccttttttgaatcctaggtctcagttagatgaccctctctgatttcccttagcactttttattttccctactataacactttctgcattactgttatttatctgttataatctgaagccaggctttgaatccagattcaaattatttgttgtgtgacataacttttctgtacctcagtttcctcatctgcaatgtaaagaaaatcacaatatctacctcatgggtttgttgtgaggataaaatgaatttatacgtagaacaggcttagaacggcactaggcaagcactttaaactgtttgctactcacagcagtatttatatgtccttatgccacattcctacataggtgctctcagttttcttgtttgtctccatcgtagcagcctgtgagctatgtagagcctgtgaccatgtcctgtttttccttctattcctctctccaagcacagctcagggtaccagggtacatggtagaaattcagaaaaggtttattgagttaatgtaaacacaaccctgatttaatttttcaaggaaaatttgttctattttaattatttttatgtacagaaaactcaacagtgtacatttaacccagcttagttgcaagttcttgagcctttgccttttcgagcttgccaatgcaagccacagacttgggacccaggacattgcctccccagtgacggcggatctcattgtatctgtcattgtagtcagtcctgatagctcccactagcttagccaaagcgcctttgtcttctgagttaacctgtatgaaggcgacagtggtgcaggtcttcctgtggactagacgtcccagtcttgcctcccccttgataatgcagtaagggacccgcattttatgacacagggcaggcaagaagacaaccagctcgatgggatccacgtcgtgtgcaatcaccaccggctgagctttcttattctctagcaaggtggtgatggtgttaactcctgctcgaaggacaggtggtctcttagtggggatgccccctttgccagcagctttctttttggccagggccaacagcctctgtttcttctcttgcttagtctctgatctgtacttgtgggccagctgaagtagcagagcagctgtttggtggtccagggcctgggtgaactggttaatctcaggaggcactttcagccacttacagaggatggctctctgccgctgcaacctgatatagtgggggccatttcacaaagctggttaggtctcttttgggctgaatgtcctgtccaatgtcaaaattcttaggccgtttctcaaacaggggattcaccactttcttaacctcctgcttcttcacgacagcagggccggagccaccttctttcccttggccttctttcctttcggcaggaggagagagcctgatttaattatttttaaaggtgataaatgttgacaagatttgaagtttttttttttaaagaaaacctttatgtgatatatatacacaatggaatactaattatccatacaaaaatggaatcctgtcattggcagtaacacggatagaactggaggacattatgttaagtgaaagaaggcaggaacctaaagttaaacacagattgttctcactcatatgtggaagctaaaaaaaaaagttgatcttatagaagtaaaaagtagaacagggtatactagaggcttggaagggtagagggaagaggaaaatagggagagatttgttaaagaatacaaaattgcaactacataggaataaattatagtgttctgtagcattgtaagatgcctatagttaacaataatattcagtttcaaattgctagaaggaggatattgaatgttcacaacataaagaagtgataaatgtttgagatgaggaacacactaattactctgatctaattaatcactatatgttatacgtgtcatatcactatgtactccataatatgtgcaattattatgtgtcaacttgaaacgtttaaacagataaattttaaaagaaaaactttaaaactgagaaatgtgagccaaactagataatcctcagtgattggttttttaatctacataatagattcaaaacaaaatgcttcatgagcccctccctggattgcaattaatggcagtgtgaaaaaaagattatgtgattaatcagagataatgtaatcaaccagggcagtgtgcccgccctctctttctggagtataaaaggagttgtgagaggcttgggtcaccatttggtgagctgagggtgaagctacaaaggttgaagcgttcttcagacgactctacctgagggtgaagctacaaaaattgaagcgttcttcagacgactctacctgaagaaagaaccctgctacagagaggggtgagtaggccacaccaactttcatgataaagggcctgtaagagctcctcgagccttggttcgggtgcatatgtgattaggaggtttgttttttaacatttctatagtgatatttgtttttggttggttggttggttggtttttgaattgagacagggtctccctctgttgcccaggctggagtgcagtggcatgatctcagctcactgcaggcttcacctcctgggttcaagcaattctcccagacccagcctctgagtagctgggattataggcacccaccaccatgcccgtctaatttttgtgtttttagtaaagacagggatttcaccatgttggccaggccagtctcaaactactgacctcaggtgatccgcctgcctcggcctcccaaagtgtttggattacatggatgagccaccgtgcccagccccataatttttttcaaataacctttatttttgctttgagaatctaattgtatatacatgaccataattacctggacctcttagaaaatgttgataggttttttttatttatgaaagtattacaagccactgtgggtaatttgttgttgctgttgttttgagatggagtctccctctgttgcccaggctggagcacagttgctcaatctctgctcactgcaacctctgctttccaggttcaagtgattctcctgcctcagcctcccaaatagctgggactacaggggcgcgccaccacacctggctagtttttgtatttttagtagagacggagtttcaccatgtaggccaggctggtctcgaattcctgacctcaggtgatctgcctgtcttggcctcctaaagtgctgggattacaggcatgagccactgcacccagccgctgtgggtaatttgggcaacaacaacaaaaaatagaaaatagaaaataaaatgtccacaattcatactgattcacaaatagtcactatatgcattttcacctatttctttccaggcttttttcctatgtacaaatattttgtctcaaaactaggattctgtcatattaagttcattttttttaattatactttaagttctagggtacatgtgcacaatgtgcaggtttgttacatatgtatacatgtgccatgttggtgtgctgcacccattaacttgtcgtttacattagttatatctcctaatgctatccctcccccctccccctaccccacaacaggccccggtgtgtgatgttccccttcctgtgtccatgtgttctcattgttcaattcccaattcccacctatgaatgagaacatgtggtgtttggtttttgtccctgtgatagtttgctgagaatgatggtttccagcttcatccacgtccctacaaaggacatgaactcatcattttttatggctgcatagtattccatggtgtatatgtgccacattttcttaatccagtctatcactgatggacatttgggttggttccaagtctttgctattgtgagtagtgccacaataaacatacgtgtgcatgtgtctttatagcagcatgatttataatcctttgggtgtatacccagtaatgggatggctgggtcaaatggtatttctagttctagatccctgaggaatcgccacactgacttccacaatggttgaactagtttacagtcccaccaacagtgtaaaagtgttcctatttctccacatcctctccagcacctgttatttcaatgattggcattctaactggtgtgagatggtatctcattgtggtttttatttgcatttctctgatggccagtgatggtgagcattttttcatgtgtttttttggctgcataaatgtcttcttttgagaagtgtctgttcatgtcctttacccactttttgatggggttgtttgtttttttcttgtaaatttgtttgagttctttgtagattctagatattagccctttgtcagatgagtaggttgcaaaaattttctcccattctgtaggttgcctgttcactctgatggtagtttcttttactgtgcagaagctctttagtttaattagatcccatttgttaattttggcttttgttgccattgcttttggtgttttagacatgaagtccttgcccatgcctatgtcctgaatggtattgcctaggttttcttctaggatttttatggttttagttctaacatttaagtctttaatccatcttgaattaatttttgtataaggtgtaaggaagggatccagtttcagctttctacatatggctagccagttttcccaacaccatttattaaatagggaaacctttccccatttcttgtttttgtcaggtttgtcaaagatcagatgattgtagatgtgtggtattatttctgagggctctgttctgtatctctgttttggtaccagtaccgtgctgttttggtactgtagccttgtagtatagtttgaagtccgttcattatttttaacattgttttatgatcataaccttttttaatgaatattcttgggaactatgatgtaggtagttgcacgagagtcttcatacagatgtaccagcactgtatttaacttgtcaccagttgcaaagtagtagagagaatgtatatctgtgtatattgattatattcaaaccagtttttcctccaaagtatacaattcaaatttgaactacaaattttgcctcatcaaataagtcctcagtaattgtgtgatacagcttagtttaacgtaatctgttgatgatgtcaaagctctgcttttaacacaaggctgaaattttgtacccaaaaccatgcttcaggaccataaagtaacaggatgctgttagcgactcgggttcagatagaatctcctgtggtcactgaatgattttcacacacaattttggtctccatgactgtgtgttcagtagtgaaagccaaaggtcaatgtgcttcctccttataaataaccagttacatgggtggcctaaaaataagttcttcttggccaagacaggttaatgaaagccagtttggtatcctgtcatgcagtatagctattttagtgtctcagtgtagctaatttgtcagccttgcctggacattagcacatatttagatcttgatgttctaactaatgaatgacagctaaggaatgtgtagcttcctggtaaagaattgattgcattatcactgattaggttgggggaattggaatttagtatctttgtgtataggagcaggaaaggtaaattatgwtttaaaattcactgaaggattgtaggagaagagaaaggaagaggaaattgtggcaggaacataaccaaactaaacaaaaccattgcccagcctgggattataattgtaatggagtacaattaacgtatttgagtcaggttattcaaaaggttatggctacagtagtttaaaacagaaaatacgaaagaaaaatagcagggcatcaaagttagtgatatcagttggccttattttaagaggcttataaccacacctgaaaatttccaattaccagtctagaaatttccatagacattgactatatctgaggaggggaggagtaattcagtgctgtaatttaaatttaaaaacattcagaagactgaaagcacaaatattcaaagtaacagatggtagcctcctctcagaggcaataaraagactttacaatcctcaccagaagtgtatttagttataatttagttttgcagtttctttttaagtatattccattacagtaggaattttctctattcttgtcaagcttctkgtctctcttaaacctcaaagtatatgaaaagcattctattcatgttcttttatcataatactgggagtatcttgtccagaacttgaccagaaattcttatacactttcttctagactgtagtcccaaatccttagaagactgtttcaagggctttacctccactcccacattacaaccttccagcctgaattaggtatctcttctcagccttcccatagcacacaataaggaacacctattacataatttaggccgggcacggtggctcacacctgtaatcccagcactttgggaggccaaggtgggtagatcacttgaggtcaggagttcaagaccagcctggccaacatggtgaaacccatctctactaaaaatacaaaaattagacatggtggcatgtagtcccagctactggagaggctgaggcacaagagtcccttgaaccagggaggcagaggttgcagtgagctgaaatcgcaccactacactctagcctgggtgacagagtgaaagtctgtctcaaaaaaaaggaacaatttatcaagctgtattgtcactgtttacatatgggtcacttttggggacaatcttactcttatttatgtttgtatatccacctcttaggcaatgctggtgtatagtagattttcacagaaattatgttagaatcatacaaagagacaattgtgtttttagcagcaatgtcggaagttctgaagcacatggtgtggtttctgataacatgtggctgatatcagaacacagccaagcaaagcagcaattattccatgtattcctggaagactcatacctccatttcttttcatctttccactcccaaaacaattgttgttcatttctggtaatataagaatagtgctaactgaccctttcttcttcaaagaagatctagttggctcagcaaagaaaatgggttctgtagatctttagaggctgccccgagtagaggtacatgactctccagggcaaacatttccaacattagaggattgagtcagatttttagaatgaaacaaggaacttcggagagttccctggaaattagaatatttaataattcaatattgttgtcacagtcattagattagatctagactaataggaaggaaaatccttraaattgctgatggccaaaaagtatctccctttctccagtgtcttcagttatccatttgtataaatggcaggaggcctgggttaccagaagtattactactgccagtgtagctgctgctgcaatcatagttcttggcaccacaaaaaatctctgtgcctattgtagtagttatggaggattttgtctcactgcatgacatatcagctttgtattaccaaaggcatacatccactctgtctagcaatggtgagtcaacagaaagtatgcaattcacttctcaattacactctttttttttttttttttttgagacggagtctcgctctgtcacccagcctggagtgcaatggcgtgatcccggctcactgcaacttctgcctccctagttcaagcgattctcctgcctcagtctcccaagtagctggaattacaggtgtgtaccagaatacccagctaatttttgcatttttagtagagacagggtttcgctatgttggccaggctggcgaactcctggcctcaagtgatctgcctgcctcagcctcccaaagtcctgggattataggagtgagccaccgtacctggcctcaattaaactttaatattattcagcctttctttggtataacacaataaagacaatagaaatattttccctaaatttccaaaaaaattactccagttttcaagttcacattttgcaaatctaagaatctaatcaccctaatacaagaaaacagtttattttcttaattttaaaaaattttttactgtgatttatttattttgagacaggctcttgctttgttgcagtgccacaatcacagctcactgcagctcttcctccgaggctccagggtgcctcctgcctcagcctccagagtagctaggaayacaggtgtataacatcaaacttggtttttttttttcttgcctttttctttttttttctttttttgtagagacgaggtctcactatgttgcccaggctggtctcaagctcctgggctcaagtgatccttccatcttggcctgccaaagtgctgggattacaggcatgagccactatgctctgcctaataaaacaacttaacgatattatggcaaaattgccctaggtgtgccttgttaggtatttttctcagggcgtggtttctgtatgcctcataatgcataatgggaggatgataccacaggggaagttaagtctaaaattctctgagcaaaggctttgccaaaaagatcagcatgtcactatcgctttgggtgaatctgtactacatcaataatttattcctgagtcactgatactgcttgtcagttcttgttattcatttcaaagaataaaaagtatgattattctaaacagtaacgtaaaagtgagttgttaatcgacttttacaagaaatgcccaaatataacaagcagaaattagtaaacaatctgtagcacttaggtgatactatccaagataaacccatctattatcatcatcacttcttgatttcatcctctaatctcattgtctgctgccagatcctattcctcagggtttctgttgtctaccaaacactagcgcagtcatccaaacatcctgaaatcaagcatgaaacaattatagcatgaaatatgctagtttcttattaaatacttattatgtgccaagtactgtgttaagcacagggaaattaatagaacacagcctttgtcttggaattcttcaaagggtgtgagagagatagatgacatttaaaaaatgattatcatcatgggatgaatgctgcaatagaggtatttgcaaggtacaatggaagtacagggaatggaatacctgtgttgatgaggaagtcaggaaaatttaatttaaaaattaatattaggtgtgggcatggtggctcatgcctgtaatcccagaactttgggaggccaatgcaggtggatcacctgaggtcaggagtttgagaccagcctggccaacatggtgaaaccctgtctctactaaaaatacaaaaattatctggtgtagtgtgcgtgcctgtaatcccagctactcaggaggctgaggcatgagaactgctccatatatatatatatggaggttgcagtgagtcgagatcgcaccactacactccagcctgggctacagagtgaaactccatttcataaaaataaaaatataaattaatactaggttttaggggaagtagcaagagaaaattccaggtaaaaggaattgcagatacaaagccatggaggtctgagaaaatgtggcatctatgttagaaatcacagttggtttcaaacatctagaaagcataatggagtggagcacgaggtagggctataaggcagtcatgatcttgaagggtcttaaatatcttgcgaaagagtttggactttatctaaaagtcagtgtaggatcattggaggattttgagaaagaggatagcaagatcagatatgcattttttaaaatgatactgaacatatgcttttttttttttgagacggagtcttgctctgtcacccaggctggagtgcaggggtgcgatctcggctcactgcaacctccgcctcctgggttcaagcaattctcctgctgtgactacaggcacccaccaccatgcctgggtaatttttgtatttttagtagagacggggtttcaccatattggccaggctggtctcgaactcctgaccttgtgatccacccacctcggcctcccaaagtgctgggattacaggtgtgagccaccgtgcccggccacatatgcatttttaaaatgcagggtggattaaatgggacaagacaagtcattgaattaagttattgcaatacaactcagaaaatattgtggaaggaagtaaaagggggaaggagggagggatggaggagagaaagaagcagggaaggaaagaaggaacaaatgaacaaataaggcttttgacagtaaaaaattagaaggagggggacaatctctgagccactgctctccagactcaatagaatgtggtagccagtcagacagaaaagaagaaaagggaggagtctagtaagattgccatgtctgtggcttgagcacctgaaggacaaaggtttcagtcattgtctcatgataacagtaaaatgaacaggtctcatgggggaagagagattattggctcagcctaaaccatgttgaatatgaggtgcctcagttcatcccatggaaatataaatacatccagagctcagaagagaagactttactggaagcacatcttagggtcatctttgaatgtttggaagttgagaccaaagaagtcctctaagtaagtctgaaattgtaaagtgtataagaatgacagagaaagaataggaaatattctttaaaataccaacacctatagggcagggaggcagaggaagacaagccatcccaggggcccccataagagagtttcaagaaagaaataaagatatggaatgagttgcctcatctgtcaagtaggattgttgtaagagttagataatgctcctaaagtgtctattacaatgcctgcacatagtaagcactgaataaatgttgaagggtgattagctttaaacaggacatatcaaaggccataaggatggcttgactgtatggaggcgagaaggatagatcattttgctcactctgctccccttatcagtcaaaagaacactggagagatgaatcaatgatgttcaccatgtccattagcgggaaatcaacaagtttgacttcaccaaaatcagttcatatttacaaataacatgctaatgaggaaaaatatcttataaatactcccttgtaacaaagattattaaagctgttctacattaattaaaaggatcataatataatgatacttgtaaacagcaaggacttaagtggagttatttgggggaagtgatagtgtataaagctatttgacagtttcatttccatccttacttgtaaaaacagtaaatttacttttcacagtgaacactaaataaaagaaaaatggcttaaacgcagcaaaaaaaatcatttggtttaaaaaatgaatttcacggccaggtgcagtggctcacacctgtaatcccagcactttgggaggccgaggtgggcggatcatgaggtcaggagatggagaccatcctggccaacatggtgaaaccctgtctctactaaaaatacaaaaattagccaggcatggtggtgtatgcctgtaatcccagctactcaggaggctgaggcaggagaatcactggaacccaggaagcagaggttgcagtgagccaagatcgcgccactgcactccagcctgggtgacagaatgagactctgtctcaaaagaggaaaaaaaaaatgaatttcacagccaggcatggtcgttcatgcatataatactagcactttgggagtctgaggcaggtttgcccaggctggtttcgaactcctgggctcaaacaatcctcctgccttggcctcccaaagtgttggaattacaggggtgatccaccgtgcctggccagatggtgttttttcgtgacaacagcaacccaggatggacataacaggaatatataatattgtggaagatcacggaatggcctcattcatgaaagactaaggaaggtaccccacggtaatgcatttcataacatatctaaccaatttccatagttttcatcatttacaatagtgcctctcaataaaaatgaattacttgaaaagtgaaaagtaccagcctggcaaacatggggaaaccccgtctctactaaaaatacaaaaattagcgggatgtggtggcaagcgcctgtaatcccagctacttgggaggctgaggcaggagaatcacttgaacccaggcagcagaggttaaagtgagctgagatcacgccattgcactccagcctgggtgacaagagtaagactccgtctcaaaaaaaaaaaaaaaaaagaaagaaagaaaagaagtgaaaagtaaaaaacaaaacacaaagccttttttttttttttcttgagacagagtctcattctgttgggcgggctggaaggcagtgcacatgatctagactcactgcaacctctgcctcccgagttcaagtgattctcctgcctcagccaccctagctggcattacaggcgtgtaccaccatggcccactaatctgtgtattttttttaagtaaagatgggttttcgccatgttggccaggctggtctcgaactcctgacctcaggtgatctgcccacctcagcctcccaaartgctgggattacaggtgtgagccaccgcacccagccacaaagcctaatttttgaaattaagttcaatagaaataaagttaccctgtcaaatcgctgtaaaagtttttaaatgcttgctctcagtttctatgcttatctcctctcagaccagtaacagttcatagattggcaccagttcacagactacacttagagtagcattagtctggggaacaacrtctcttgaagtagccatcagaatgaaaaggaagggcagattttcagtaaagtattgcataatcatattttatgattcacttttactaaactcatggaaggatgaaatataagcccaaatgccagtgcctttgtaatggaataattcctttacaggatcagaacacgtaggaagccaaattaataattgaaagcttgtttgtttagcaaagaaccagagcataagaaagtaaataaccttaagggatatttcaaggccatgagtacagcctaacagagtgatggaagcagggactcttgcagttaagccactggaatttgaattccagctgcatcacataatacttgtatgaccctaagctttctgaggctgcatgtcctgatttttataatgggagtaatatcaatctggagagatttatgaaaggtttaatatagtgcttaatacccaacacatagtaagcactcaataaatgtcagtcaatgttattaatactatcctataataaggtatatttctacaacaaccagcacattcagtacagattcaatgcctcttccctagacagtgcctgataaacactgacaaccttcatatctttagacctttctattctgtgtacccagtcatcatcttccttctgttctcacaatcttcctctgggcagataaaataaaattgattttgtttccgcttacaatcacattccagggcacttacaatcacaacccaggtgacttaggttatacccaagtcaccttgggttttagatgtttccaaacgtttagaggtgatttcttggtttatagccacaaacatgatacataaacaactttaatttcccagggagcttctcactggttgggcattatattctcacatttgatggcaaacaaatacacattgaaagtaaattataatcagatcaactatccaagaacatggaatcagaacgaaagtgattataaagtttttgacagctgctgtcaggttaggataacctggtgcttctatctctgctgcagagagtacaataaggctacagacctatcggtgcaacctctttgagcatttatctgaaatgatttttccccaactgtaagagtatcatttttggaaaaaaaatacaaaatataggaagttataaataaaaaattgtttatcatcacatcacccagtgacacccataaagtatttaaatgtcagttattacctgttaacattttagtttatttctttctatttttatagcatttctttttatttaacattacaattatttatttatcttaaagacattaagatattttctttttctttttttttttttttgagacagagttttgctcttgtttcccaggctggagtgcaatggtgcggtctcagctcaccacaaccttcgcctcccgggttcaagtgattcttctgcctcagcctcccgagtagctgggattacaggcatgtgccaccacacccagctaattttgtatttttagtagagacagcgtttctccatgttggtcaggctggtctcgaactcccgacctcaagtgatccaactgtcttggcctcccaaagtgctgggattacaggcgtgagccaccttgactggcaagatacttttaatatccgaaaagtatttcattatatagatacttcaagtgatatcacccactatgagttgattttttaactaatttctatctcagagtctgagtattctaataaattcaacaaaacagtgcaaatatgtgtttagcacatggcttggaaaacaacaagagcacaataagttttagctattcttgctgttattgtaatctatcaagagtttaattgttctcttaatacctaaatatacaacttttaggagtcccgctgctatattctcaaaaccctcagaaatagtgtctttctctaagcatactttgagtgcctttatttattttaagtttctggtttattccctacaaacatattgctaatgaaaatgtgaaattatggaacttttcatcagtgtgcctatacattcagcaccatagcataaaacaggctcaaaaccatggycttatatctctgtttggcctttgacaatttttagaggcagtgtggcattttgtgatgtaaawcttctccattttatttccatatttctaatctctccacttttctctgcctccactgtcctgatcatagtcaacaccaacattgtcttccatttgacaaggcaggaaatctcaagtgtttcaccctgttaaaataattctactctagggccttctccaatccattctccacagaacagaaaaacaattytcttaaaacaaatttcctgatatgtggtgtgattcactgtcagcaaaataaatccaaatcctttccatggcctacaaggtcctacgtgatccagtccctgctagatgtccaggcttatttccttcccttgtattgctgcagtccctcaggtcttccaactccttgagtaccaaccaaactcccacctgaaattctgtgttgtcatttcctccaccaaaaatatctctcttcctccccctctttttgtgattcattctcatcatttagatctggatctcctgggagacaccacccctgacttcactgtctaaagtaagtcaccccagccattctgttgacctccttcacagcacagattataaatatattctatgcgtatttacttgttattttctctcttttctcacctgtatataaatttcattggggcagaaaacatgtttatgttattcataagatagcagagtgcctggcatatgctaggcatttaacacatatgtgttggggaaggagggaaggttgacagccacagctatggatgtaggtgaaaaccccaaggaaagtggaaagtgagtccaggaggccctaggacaaaactccagtgaacaccattgttaacgggattgagagactaagaaccctgcaaagaaaacttagaaaaactgggaataggatgccctaatagaattttatgtgggaaagtaatatgatagtatgcaaataaatagtggttgagtatttactatgtgcattaatatgtctgaggattaaagaaatacattataggacaactatatttaatggtggctcacgcctgtaatcccagcactttgggaggccaaggcaggcggatcatttgaggtcaggagttcgagaccagcctggccaacatgcagaaaccccatctctactaaaaatacaaaaattagccgggtgtggtggcaggtgcctggtaatcctagctgcttgggaggctgaggcaggagaatcacttgaacccgggagacggaggttgcagttaaccaagattgcaccattgcactccagcctgggtgacagagcgagactctgtctcaaaaaaaaaaaaaaagagagaaatttcaaaaggcttctatactcattttctcttatgttcagtatcttccagccatgaatggaactatagaaatacacgaagatagcaacgtttgttgaacatccctagttaaaaagcaactgtgttaggataagaaaaaagcatgactgttgtagcttttgttaaataaatgttattatgcttgcaggaaattgttcaacaacatttctccttatgtaaggcctgccccagtaatgctgcttaggtcactgtctgtctggattatctgcagcctaaatgccaactctgtaaattaaacctgtcaagtgacagctttgccatagcatgcatatccaacctttaaaatttatttatactccattccctttctctagccagattaaattctcctttcctaagctatttttgcctcagttcagactgtggcataattcaacatgttctaaacaatcacatggagactgtggccttcctgattttcaattcccaaatgatttttattcaggctatagaacagcaacagaaatttcaccaaatttgctaaaataagaagagtcttctcaaactagattcctccaggtaccagtaggcaaaacagtcatgagttatggatagattcataataagtcctttattcagtgccccaaggaaatggtgcctttcagcatgcaaatgaaaagtattctcttactaatcaatctgtccatcatttcttttttgtttttccttgagagagagggtctttggtctgttgccccagatggagtgcagtggcatgatcacagctcactgcagccctaacaactcctgggctcaagcaatcctcccacctcaacctccgagggagctacaactacaggaatgcaccatcatgcccagataatttttttttttttgtagagacagggtctgactgtgttgcccaggcggtatctgtcacatcttaatacacacactaagctcctacagaagtaaatactatattaagcggcagagttactaatgtgaatacacattctcatttgatttggagactacctagacaactttcaggtttatatttaaattgattacaattagacatgaaaaagggacagagaatgggcataatagagatcgattcaagagaattgtttcttaaaatagactttaaaaaaaaaagttgttcaaaactgccttaatcaattttacagagaaaatattacctcaaatggtttgatatgatgacttgataagatgttacttctgatccagcaggattcatttattaatataaatatttacatctgtagtaccctcctaggtgggtgactgtttctatatgtctgactcaacaaaacacagtagcccacaggcagctattggcctttggactttgtccttaggccagattccttaaaaggcttgttgtgacaagcttatttgctcattggaaatttctgtgtctaaatttcccacagaaattaggatgtagctctgctacagcattttgattattcatcaaaacttactcaaaagacttttgataaatctttaaatcaatgtcttaaggaagaaaattaagtcactttttaatatagagcatgttttagttttgaacaatatttaagcactgcaaattatatgttcatagagatttaagcataggcataccttggagatattgcaagttcagctccagaccaccacaataaaacaggtattacaataaaggaagccacatgcattttttggtttcccatttacactacattgttgtctgttaaatgtgcatagcactatgtctaaaaaatgtacatacctgttttgtcccactgaacccatagctggagttgccttaaaagcagcagcaggagaattcgtacaacagagtaccccaaaccatttgaagacagggctggtttgagatttcaaagaaagcagctctaaatgccagagtgatcagtccaaaacatttattaaaggaacttgcagggtgttgcaatgtattattgtgatggacagcaagagaaaagggatgttttacccacattagtctgtagccagggggtgaggggatggagtttacatgaaaatttaaggaattcggctcagggtcggggtcagtttctttccagtaaaccaagacattattatcagtgcctgggaatgttcaagctggtttgggttcaagccagctgaggaaaacctatggctacagctggctgggtcactgtgattttggtcaagacacagaaaggaagtggggaaaacgggtaccctagaataccttaatttaaaaatacttttgctaaaaaatgctaacagtcatctgagccttcagcaagtcataatctttgctgttggagaatcctgcctcagtgatgatggcagctgactgatcagggaggtagttgctgaaggttaaggtggctgtggcaatttcttgaaataagacaatggagtttgctgcattgatgactccacaaaaaatttctctgtagcaggcagtgctgtttgatagtattttacacacaagagaactcctttcaaagttgcaatcagtcctcttaaaactcacccactgctttatcagctaagtttatgtgatattctaaatcctttatcatttcaacaatgcttacggcatcttcaccagcagtagattctatctcaagaaaccactctcttttctccttcataagaagcaactcctcattcattcaagtttgatcataaaattgcagcgatttagtcaactcttcagactctgtttctaactccaattgtcttgctattttcaccatatttgtagtgatttcctccactgaagtcttgaacgccctcaaggtcatccatgagagttggagttaacttctttcaaactcctgttcatgctgatacttttacctcctctcatgaatgttcttaatggcatctagaatcctttccagaatgtttttggtttactttgcttagatccatcagaggaatcaccatctacagcaatttataaccttatgaaatgtacttgttaaatattaaaacctgaaagtcaaaattattccttgatccatgggttgcagaatggatgctgtgttagaaggcatgaaaacaatattactctccttgtacatctccatcagagcatttcagtgaccatgtgcattgtcaaggagcaatagtatttttaaataaatcacgttttatcagtaggtctcaacagtggacttaaaatatttagtgagccatgctaaacagatgtgctgtcaaccaggttttgttcttccacttatagagcacagcagagtagatttagcataatttttaagggtcctaggattttcagaatggtaaatgaacatctgcttcaacttaaagtcaccagccacatcagcccctaacaagagaactgcctgtccttcgaagctttgaagccaagcattgacttctatagctatgaaagtcttggacagcatcttcttccagtataagactgttttgtctacattgaaaatctgttatttagtgtagccaccttcatcaatgttcttggctaaatcttctcaataacttgctgcagcttctccatcagcacttactgcttcacctttcatttttatgttagggagagggcttctactcttaaacctcatgaatccacctctgctatcttcagacttttcttctacaacttcctcacctctctcagccttcataaaaatgaagagagttaaggccttgctctgaattaggctttgacttaagagaatgctgtggctggttttctatccagaactctaaaactttctccttatcaacaatgaggctgtttcactttcttatcattcctgtgttcactggagtggcacttttaacttccttcaagagcttttccttggcattcacaacttgactgttttgggtatgaggcctagttttcggcctatctctgctttcaacttgccttactcagcttaatcatttttagctttgatttaaagtgagagatgaatgactcttcctttcacttgaacactcagaggccactgtagggttattaattggcctaatttcagtattgctgtgtctcactgagggactggcccatcagcggagcagtcagaatatattcaacatttatcaaataagtttgccatcttaaatgggtacagtttgtggtggcccaaaacaattccaataacaatatcaaagatcactgttcacaaattgccataacaaatgcaataataatttaaaagtttgaaatattgggagaattaccaagatgtaacacagagacatgaaatgagcacatgctattggaaaaatggctctgatagacttgctcgacaaaaagctgtcacaaaccatcattttgttaaaaaaaaaaaacaatatttgcaaagcacaataaatgaaggtatgcctgtatactacatatttatttttaataatcatataagaaaattaattggatataaaataggctgttctaaaacagcaagagggaaataaactttaacaatgctgacagcagccatggcatacttgaatttttaggactcttgttaaatatgggtatgggaacttaccctctgcactagtatccagacacttactagattatggcccattggggtatttgcctctattacatatatttgctagactgtcattataccttgcaatctagtgtctttttctaggttgatattgtcacgtttaatctattatggcaatgatattactcttgctatgttaaatgtttttatcagacttccttgtagccccaaccaatctgagaagattgaaaatcaaggaatccttcactccttttgtaaacttggtaaaatggaatcaatgtttactagatctgctgttcttgtgaagatttctctgttcttcttcatcaagatttgccaatcttcctctgcactcttgccttctgcagtctttcctcttccataaaaatatcgcttataatattctttttttgaaatgaagtctcactctgtctcccaggctagagtgcagtgccatgatctcggctcactgcagcctctgcctcccagctttccagtgattctccttcttcagcctcccaagtaactgggattagaggtgcctgccaccatgcccagctaattttttgtatttttagtagagatgggtttcaccatgttgaccaggctggtcttgaactcctaactcctaatctcaggtgatccacccaccttggtctcccaaagtactgggattacaggcatgagcctgtatgccaccatgctcaacttccttataatattcttctagtcttatttcccaactgctggcttttatattttgaattgtcaatagaaagccctgcctatcgtgatgaggttaagracacatgttttgctgagagaagtaacttccagctgagaatcttgtttagcaggagagaaaatcctctattttagagcctctcctggagcttagagtaagcattggcttttagaggtgttttctccctttttgatgtctggaagcactattttcaagtctgttagagacccactttaaataagtacaggtgctaatgctctgagtgcaagtctgtaagggttagtgagtcctcaaatcacagaagtctcctgaccaatgctgggatgttctactgttctccaagaatctgcagcttaaaagtattaaactaaatacagcagacaccctcagcatagcagtgaaccacaatggcagctgacaagcaggaacatttaatggattggtcagcaagaccacacttatatcttgtttaaaatgtgtcctttcctttgggagactgaggcaggcagatctcttgaggtcaggagttcaaaactagcctagtcaacatggagttttctaaaagtacaaacaaattagccaggtgtggtggcaggtggctgtaatcccagctacttgggaggctgaggcaggagaattgctggaacccaggaggctgaggttgcagtgagcaaagattgcaccactgtgctccaacctgggcaaaagagcaagactccatctcaaataaatacataaaataaaatgcatcrtttctctcaacagcaaaagccttattttttcatcctttaaatatgttactttcatagtaggataagatggtaccttgtctgagaggctaagacccccaggccacttgagaatttgagagcttttagaacttgatgagcatagctgactggatacttcgtgtcagcactgcttgtggtaattacaggatctgtggatcacaaggctcacaacttgtatcacaagttctacaagaaaattggctaacacatatttggctctgttaatcatttgctgagtttatatcttgtcccaccaaatgtattttttgaaatgccattacatgaaaaagtttcactattccaattatctgtgtttaccaacttgtggagtaagagtggctgactgaatatgtgctttttaactacactattatatacattggccaagctttttatattaaccctacccatgaagtatcaccaatatttcccccagtgtgaaattgacatttgtcaaaagccttttgccatataaaagtttttagttcttatatatgaaatctgtccctttttttcgacatgagttccccagcctgcttagctttgcccctaccacccaagatttttaagctttctatattttcttagaatttaagattttaaagtctttacttttttaaatcatttatttgtaaagggacatatttctcaagtgtgctagttttccttgattttaatggattaaaatgtgtcgtaggtgagccattttcttccaaatgacgaagagtttttgttcctttgaaagtctggcccaggattttgtttgtttttgtttttttaaagttcttattttacttacagagttaagaaagttgaataactatacaaccagtctctaaatagaagttctaataaatcctaagatgttgcagggcactgaaagaggacaaaatttgatccctaaagccctctccaatctcatactcggtgaaaataacaaacaaaaggcttcagtgttagtggaaaactgagttcttaaaaagcaggtaaaggtcctgtttggtccttctccagagctgaggagaaagggttttcagattataaataacagaggtgcccttgtatggcacagaattgcgataagactttacttcttaggggcttaaataatgaagtcagtaaaagaggactgaaaacgaacayaaagaagagctttagctttgacgcaaagaattacatcagtgcttgacaaaaccgaggatycttaatttctaaaaacgctttctttaagcacttcctaacctttcattatctgagacaacatatyaagtgagcagcagtacaaaggatgcatgtgatttcgaaatgccacaattgagccaactgcagwtgcacgcgtacgtagtatagagaggtgtgatcaaaaaaagaatatagggagcatagggcttcgtctgcatcaaaagatactctccccatcttctatagccttaagttttgcgaaggtaagtttctccccgcttgaaagcgcccccagggacaagaattcatcttgaccaagcctaaggscgtggyatgcaaggtgttgagtcaccgggtacagcggtcttgcgacataaatattatttgatgacgaaggtactcggggcccaggtgccaaggtaaaccactggcaaagatgaccgyggttaaggcagtagaaagcaggctcgacactgagacgcggytccagccctagaaggattgcattttacgattcaggcaaacttcgagtctcctcatgtgacatgtgtgcactcctggaccgttttaattatgagaaacgtggtttgcagcatgattccttccagtcgataaatcggaatctctctcgctcccaccccttcttaacttcaggcttcctgcatcccggagcactcccggcagccccttccctcccccgccccggggatgctccgactcggcgcttagccattcatcaaccggttcacaccggcggcggccgccgcggagtgacgtccggagggggcgggcctccgcccccgcctgtcggctcctggcccgcggttccagrccgcgattggtggctggagggttgcacgtcgcgccggctataaaggggagggcttgtgacgcaagggcgcctcggcgcgtgtattggctccttcggctgcgggccggctcgsctacgcgctctgctccgagccgctcactgcatggtagagtctggtgcccccgccgccgcctgcatcgccgccaccgccgctccgccacgaccaccgccgcctcctgycctgcagccaccgccaccgcctgtgtcgccgccgcctcgggaccggctgtatgattaggccacaatcttcaatgagtaaacatattcctgtgagtagccgtcgcatcgtcgcctctcgggctgggaatccacgaccggccccccatccccgctgtcgcctttgttcggagcccggcgtctcctccaggttgccccgggttgcggttccggtgggtcccgggtgggagcgggcgggttatggccctgtggccggccgattgcggccggctgtgcggaggcagatgccgggcccctcggggctgcggggtggcggttggccgccggaggcaccggcttttgagtccctcccgagcccggagcgacgggggcggcgcggtccggcttctgcggcggccgggggcagtttcggcttccgcagcgggccgggtgggtggcacaaaagccgctttgtgaccgccgcctccgcccttggccctttggtctggcgcgacccgtccgggcatggcaggctccgcggcgtcccggggcctctttgttcgrccggaggagagtggctgcactgggagcgggagacgtggcccggggtggggcgagggctgcgcgtgtcactgcggagccggatacggggagggcgcggcggtggcgggttcgcctccagatccgggcgggcgtggggtaggccggacagccaggcacgggtggtaacgatctggttccagagcttctcggagctccggggtgggcgcgggacagccactgggtgcagctacactcttgtgctcgacggccgggacccgagcctcagacaaaatggcctcggcgcccgcgcctgactgaaggcgcggcgcgaacccgtgattgcggcgcggagagggggcgcagcgggcgtgctcgggcgcacacagccgcgtgcgcggggcggcggccctctggggcattccgcgagctgcacccctgcccgggccagagtggggttctgctaggtgagaacttcggccgtccgccccgccctcctcccaggctccacctggtaattcgagctgttccggatttatcgccccacctcgggctcgtgataatgggaacaagtctagtcttgtcctttctctgggccagtcgtcgagaaatggcctggttcggagcgtcttggaaactgacagggctactgttagttacactgacgcgaaggacttcccgtccgggcaccagcatacatttcccctgccaattttggaagggccctggatggcgccttttaatcggggactgtttagaactatccctgagctctgtggtgtaatatgttgttgcctcctgttggtttgtggcagcagtagccaaccagagacggaattctgagggttttttatcttctgtccgcggagccccctaccagtccacgagtattaagttatttacactacgattggaactgttgacctgcccgacatctagatcctgaggcagtgcttcctgttactcagtcagttgaaaactagaaaactaaatcattcccaagagtgagcagcattttacacatgctttcttaggtgccctaagacctaaatagatgtggaacagactatacaacgaattgtttgtgacaaaggagttacacacattaattggcttgactctgcagtataataatgatttaagcttctgcacagagattactctttcctcctctcccttcttgtatatgattgtgattataatgcaactgataggtgggagggaaaaaatccccattatggatagtttttcctgtgggtaggagattgggaatggaggagtgtcttgggcggaacagaaatctatcggtggccaccactgctttaacagacgagtccccccatccactaggtggctccactcagtaaaaataaccatttcaggaagggaattcttaatatagttctttctctgcttcctgatgaaagtgcttacttacatgaagggatatggccagactaggttgtagccgacaggagttttagctattaaatatggaaatagtggtgtgaaatactgcctcaaattagcttttaattgaaaaaaaggtaatacctagaaattagaatactgtgatgagtcattataaagcttttaaagatcattgtatgtcattgggaaagtgtcagaatacactttttattctacggaggttgtatttagaatttggggtgaaagtataatgaaattattttcagattactacaatctgtattcactgtaactgtgatggctttgtaatttagacacttaattttttaacccagctgaccaactaggtgaagtaacctctgagggcttgtttgaacaaacttgtgataatgaaagttaccttttttatgggaccttttgataaatgattgttaatgctagttgtatgttttrccagaaaagtagactgggtttttgacttgatgttttctgcagyaatcatcataagaattattcttcaaaatttagcaaagttctagaaactataactagcatgggactatttaaaggtgtaaaatggaaatgggagcagatcgtttgaattttaattttaagacttcaaatgcttaaatttaagcatggaaactaatggaaccttttgttaaaacactttggtaatgagagtacacatgaagtgcttgaggcagtgactatgaattactgcycttgttaacctgttattaatacttyccttagtgccctctttactcccgagtacacaagtaccttataaactatttggaagaagactgattattaacatcagtgtcttccatgtacatattttaaaaatatgctgtgactattggtttaatgtttgatattggcataaaaatggtttagttcttaagggggaacttagagaaaatataaatacatycatatttgtttatatttattggttacagtagttaccttgcttttgagacctgccacttccaccttcaacatccctttgtccgccttctctgagttggatttcagttttgagttgtatatgtgaaatttkggttttaaaatacaaaagaacattattaaaattatgaatattttctttacagttataaatgagagttgtttcctttttagattcataagcatacattcttatgatatttcacataacaagttgattttcagagactcattttcctcgtcttcagtttaatgggaatgataacagattgttaaggataaagtgagattctaaatataggacttaaatcagtctaagaaaaggatataaaagcataaagttggaaaagaacttagatgtttcagtttatgagttaagtaaattatgcaagactaataacttcagagttatctggagtttgtattaatgtgtaaaaatgtttttgttagttggaaaaatcaacataaagtgtatgtaattacaatgtaaagaaaacaactatcgaaagggataattattagaatcatataattatatattatatatagatagtatatatacagagaatataactagatagaatatatatgaatatatatatgaatttcacaaaaatgtaacaatgggtttggtttttttttctgaggaatcttggtaatagatcatggatttcagtttaatctatctgactgcttgttttatgctgattgatttaatctgtactcaccccttgagttttgcaattcaagtaaaagtcgatgaagcggctcaggccctgctttagaaaaatagttgtgtacttaaatagtgtaaaaccctaatgtatttcttttgaattggaaaataacttattctctctttctgtctttttcttttaaacagcaattctgtggtgttcttggtcacacatttatggagtttctgaagggcagtggagattactgccaggcacagcacgacctctatgcagacaagtgaactgtagaaactgattactgctccaccaagaagcccccataagagtggttatcctggacacagaagtgttgaattgaaatccacagagcattttacaagagttctgacctggatggggtaaacctcagtgcacttcttttctgttggcctcagtattactggattgaagaattgctgcttcttgttaggaggttcatttcacttaycattacttacaacttcatactcaaagcactgagaatttcaagtggagtatattgaagtagacttcagtttctttgsatcatttctgtattcaatttttttaattatttcataaccctattgagtgttttttaactaaattaacatggctcgaatgaaccgcccagctcctgtggaagtcacatacaagaacatgagatttcttattacacacaatccaaccaatgcgaccttaaacaaatttatagaggtaagatttgatatgttttagtagcttaaattgattgcaatataatagtgggacttatagctaacaaaataaaaactactttggaaaaaatgagrtgatatacctacaattccagttcccagaaataaatgtcaatgtyttctataggttagaggtatatttgtacattttgagaagggcatgtgcttgagttaatagttattgtacctgagtttgcttgaattggtatgtggacagtaaaacagtatagctcttacttatcttgtaagaaatttacatgggaaaggttgccatttatggattttttatatatctgcttaacctaatgactaatgccataaaccagttggtttttcttgaaccccatctgatgcttagaatccaattttyaactacaaattctgttccttcctaatggtagctatgtagccaaaactctacctgcctctttttactaggagaaaggaattgaatgctgaataatatatcgggatgtgcacatgttttattttataaatacctacagttgttaagaaatagcaaataggcctctcagaacataatggaaatacttttttttcctttttttgagatggagtctcgttctgtcacccaggctggagtgcagtggcatgatctcagcccactgcaacctctgcctcccgggttcaagcaattctcctgcctcagcctcccaagtagctgagactacaggcgtacgccaccttgcccagctaatttttgtatttttagatgtagtttcaccatattggccaggctggtctcgaactcctgacctcaggtgagccaccacgcctggctgggaaatacttkaatggtactttaatttttattactatatattatatatacactaatatatactatatagtgtatataatagtatattatattagtaatatgtaattagtaataatrcattttgaagcctgtagttttaaatggtatgtgggcttttttactgtagttaagacttcattcaatgtattttaaatcagtaaagtttaaggagtgagtataattgagtgaagtcagattacccgatkagttataaataatgcctttagttacattwacctttgtctgcattgctgctagccccttttggttaatgtttcatcccaatccggtattaccatgactgtaaacaacttcagtgtatgaagggggcacacaatttaaacaaaagaaggaaaacttttccagtttattaaaaatatgtatggtatttaatattcacttttctttttatattctagcattgtcacttaaamcaaaatttgcttttgtgttaaacataaatrgattctagcattctttaaatgatcttctgttaaccagcatacttactgatcagagatgatcagaatataaaatgttgagttatagtgatgtggttaaacattaagatttttttaatgtacgttttatccaggaacttaagaagtatggagttaccacaatagtaagagtatgtgaagcaacttatgacactactcttgtggagaaagaaggtatccatgttcttgtaagtatttaacagttcttatgggtttatggtgctgtgctacaaaagtttattcaaatagtaaattcaaataaatatctatttaagtcataaatagacctcaaaaagctaaaaacaaatattatattattgtgcagaatcttaatttctaaatrraggtgaaaagctaagcaaggatttgaagttgtgaaacatttttgtaaagattgagcatttagtcacatttggtagacaacagggtttaataagatttgattaaacattaaaatgagaatgcttttgaaaacatttccatgttagaaatttagrattattrctacagtgtttatattaatgatctaaaatgtttaaatattcttctgacttaggattggccttttgatgatggtgcaccaccrtccaaccagattgttgatgactggttaagtcttgtgaaaattaagtttcgtgaagaacctggttgttgtattgctgttcattgcgttgcaggccttgggaggtaaatgaatttatcaatttgattctaggtaaaaatctattgataatgaaaatacagaaacttgaaaaattcttataattttttaatataaagtcaacatttgtcataggtattacttaaataggaagggtggtagataatacttctgagttggggaatgtttggagaaataaatttacaaagatctgattttgaaaaaactatttatcaaaattcttacctcaccagagctccagtacttgttgccctagcattaattgaaggtggaatgaaatacgaagatgcagtacaattcataagacagtaagtaatggattctcttttcatttgtactctctttcatttccttgttgagtgtcagtgagtttaatagtctaatagcccatttaatcattatgattattttttgagatagtattaaaaccaggaaatcaagatcttacattcttttttgcatttcatgcagttgctcatattactaagattctaatccaacaagagtttttgaattattgttttgctttaaatacttgattgaatatgttggttattttgtatttttattgaggtataattaagatacatttaaagatacaataaaatgcacaggtctccaaaggagaccagttgacaataacagccaaattaaccatccaatacaacacatagaatattttgagtgctgtagaacatgcctttgtggcttttgtagtcatcttccctgctaccagaggcaacttctgacttcactataaattagttttgtcttttcgtggacttacgtgtaaatggatttgtgagtcgactgttgtaaccaatactcaaacgaagatataaagaaaattaactttttatgattttttccatttacactgatgtgcctgttcatattcctttctgcatcaggtcacagcctaattaatcaaaagataaattkccacaagagaggtgatggttgtctataagacactaaatattactgtagggggcttttgccktgtttcatttttttttttttttcctcccagaaagcgkcgtggagcttttaacagcaagcaacttytgtatttggagaagtatcgtcctaaaatgcggctgcgtttcaaagattccaacggtcatagaaacaactgttgcattcaataaaattggggtgcctaatgctactggaagtggaacttgagatagggcctaatttgttatacatattagccaacatgttggcttagtaagtctaatgaagcttccataggagtattgaaaggcagttttaccaggcctcaagctagacagatttggcaacctctgtatttgggttacagtcaacctatttggatacttggcaaaagattcttgctgtcagcatataaaatgtgcttgtcatttgtatcaattgacctttccccaaatcatgcagtattgagttatgacttgttaaatctattcccatgccagaatcttatcaatacataagaaatttaggaagattaggtgccaaaatacccagcacaatacttgtatatttttagtaccatacagaagtaaaatcccaggaactatgaacactagaccttatgtggtttattccttcartcatttcaaacattgaaagtagggcctacatggttatttgsctgctcactttatgtttacatctcccacattcataccaatatacgtcaggtttgsttaaccattgatttttttttttttttaccaagtcttacagtgattattttacgtgtttccatgtatctcactttgtgctgtrttaaaaaaacctccattttgaaaatctacgttgtacagaagcacatgtctttaatgtcttcagacaaaaaagccttacattaatttaatgtttgcactctgaggtgcaacttaacagggagggcctgagaaaagaatgggagggggctattaattatttttagcaaaatgttgcctttgtcttgtgcaaacatgtagaatatgctctttaatttagtaaaatatttttttaaaaggtagagatgctttgttattgtaatcataaacttcctgaaattcttgtaatttttttcccatacttatcagaagtgtgtttaccaacttattyttgtttgaaagtgtgattttttttttccttcccaacctctcttgcaaaaaaagaaatgggtttctgctaatgaattgagcagacatctaatattttatatgccttttgagctgtgtaacttaatatttggatacttgacaatttgttttattatgtaattgataaaatggtgatgtgtattaatgttagttcaaccatatatttatactgtctggggatgtgtggttatagttctgtgggagaaataattttgtcagtgttcaccagcttgtaaaaacttagtgcgagagctgaaacatctaaataaataatgacatgcatttatcatcattgagattggtttgcttaaaattaacttattttgtagaagacaaaatgaattgcacttcacttaatgtgtgtcctcatctttttacaaataaatgaaggattataaatgatgtcagcattttagtaaacttwtagacaaaatttgttagggtcattcatgaaaactttaatactaaaagcactttccattatatactttttaaaggtctagataattttgaaccaatttattattgtgtactgaggagaaataatgtatagtagaggacagccttggtttgtaaagctcagytccactagttcatggttttgtgcaacttctgagcctcagttytctcctttgcaaattaataattacataccttyatagatttygaaattaatytaaatattagtatytggtacatgawggcttaatgttaagtttcctttaatgatccacaataatccctttgatcacgttaatctaaatctagatgtctttgtctaattttttttgaatagcagttataaatgtaaaggactcaaagtttaagtaaaaagtgatactccaccttgtgtttcaaagaatttagttccacctcttcataccagtttaacacttaatatatttcattggattttagacagggcaaaaggaagaacaggggcctctggaggcccttggttatttaaatcttggattatttgtgatagtaatcacaaatttttggctaatttttaacctgaggttttgttttttttttaaaggaaatgcagcctagtcttgagaacataattttatataatcarttactaaatgttaaactattaccacacagcccataaaacagcatttgcgtttattgagagagaggatgtgccatcatgattaatgaaaactatcttttgagtttgaaaagaaattaatttgcagtgtttggattgtatatatggtgctaaaaataaattaatttactttataaaccttatctgtacattatacgatgtgatgaaatttgctttttatccaaatattttgtatcttgtaaatatggctaattataggaatgcctataatacatcttagattccttatatctaataagagttcaaagagttatgagttgaagtcttgaatgcaggaaactatctgatagtgttctaaaatttggttacttgggtttggatacccttagtgggatgatgtaaatagaggctagctacctaggcttgtctatagcaaccataatgttgatgtaagtaatgcggttactgaatcataagaaaatgccatctctttttagttgaaggaaaactctggaagtaggtgccattggtcattctgcagtgcactgcaaccattgtttcccctagtgccctcttttccctagggcattgctctcctattcccacgccttaacacagctctatacctagaagcagccagcccaggcatgcagtcacatttaatcacatcccccttctagagtgcttcaaaatgatgtagtccctcaacttggctaaagaatctcaatctcttgaaatttatttttttaatgtcatattcatctggtaaatatctactgtttgccaggcatttaagaatatggcaaagaacataaaagatggtgtcaccagattttggtcaccaatgagtacccgacccgttgccatgattaagagagaatgctttctattggagtttcaggaaatataatttgagaatactttaaagggaagtggaagtataagtgaatgatatttttcttttacatgtaaacaatgaagttatttcaaagttaagttttaaacaaaatacatgaagtagtgtctgccatacatgttaatattytacattcttgcttccttaaattaatatgtttgtgtgtatatatgtgcctcacacctgaattgaaaattaaagactggtttaaaagtggtttaaaagtgacatttaatgtttctccattacgtttggggtaaccagcctaagtggaatcttggaaggaaagtaagggaaaaacttgtatttgccttcaatgaattaaaccagtgatatgtgttaacgtatgaatgaaaggattgatggtgattttataattatatatattgccgcagtaaccagttaataaattgatagctaccatttattaatgattttattttcaggtagtttttataatttgattcccttccaacagtcttgtcccaattttacagtaagggatttgagcctccagataggggactagctaataagtggtagaagtcagggattcagacctgtgtttgagctggtccactacaccacacagttatgtaaataaatatgcatgactttttttgttttttgttttgagatggagttttgctgttgcccaagctgcagtgcaatggcctgatcttggctcaccgcaacctccacctcctgggtttaagtgattctcctgcctcagcctcccaagtagctgggattacaggcatgcgctaccacacttggccaattttgtatttttaatacaggaattttgtatttttaggagaaacctagctgtgacagaaggcaaaaagggatttagagtgtctcacggtgattaaaagcttgactaagaaatcatacatgtcacttaactcagaaatgcatttctatcacatgctgaaaggccagaactacacagaattaatcacctccacctcagggtttaaaagagtacatccacagcagcgttttacataactgaaatgcccaacataaaggggttaaagtttccaggcagccaaaatagatgtcatgaaattcaggcactaaagttgagaagcacatgggtagcaattaagatacacttgtaagcctgataacgagacatttggaatcataaaaactaaatataaaaagtacagccacttgggacaagtcaatgctatgactaatagctttaagcttatacacctcaattgaccataaggaaatcggtatttcctacacagcacaaaacgattagctgcttacaaggattgacaatagtcatcaagaatataaaccattaagtttggttttgtgtatgtgtgtgtgtgtgtgtttagattagtactgcatttactttttttcttttttgagacaggatctcacttgtcacccaggctggagtgcagtggtacaatcttggctcactgcagcttcaaccacctgggttcaagcgatactcctacctcagcctcctgagtagctggggactacaggtgtgcaccgccacacctggctagcttttgtatttgtagtagaaaaggggttacgccatgttgcccaggctggtctcaaattcctgagctcaagtgatctgcctgccttggcctcccaaagcgctacaattacaggagtgagccactgcgctcggccaagtttggttttgtggggtttttgtttgtttgtttgtttgtttttaatagagatggggtttcaatgtgttagccagggtggtctcatttcctgacctcgtgatccacccgccttggcctcccaaagtgctgggattacaggcgtgagccaccgtgcccggccagttttgtggtttttaagccaagaaattttataatcaaatattttcaagggatattcttagatatattagagaaatggtctcatgaataagtttggcaaacactgggctaacttagacattatttactgcaatattagagcctttaatatgctggtgtgaatttttaatctttccaagagaacaatattgtatttatccattgtatcaatcagtgtcccggaagaagacagattgttcactcacagtggataattaaacatttaatagagaaacaagaaaaaaagaatttcaggccaatatacctgacgaacattgatgtaaaaatcctcagtaaaatactggcaaactgaatccagcagcacatcaaaaagcttatcctcaaaaaaaaaaaagtttatcctccacgatctagttggctttatccctgggacacaaggctggtttaacatatgcaaatcaataaatgtattataatgcatcacataaagagaactaaagacaaaaaccacatgattatctcaatagatgcagaaaaggcctttgataaaattcaatatcccatcatattaaaaactctcaataaactaggtattaatggaacagacctcaaaatagtaagagccatttatgcctactcctagccaatatcataccgaatgggcaaaaaccagaaccattccctttgaaaaccggcacaagacaaggatggcctctctcaccactcctattcaacatagcattggaagttctggccagggcaatgaggcaagagaaagaaataaagggtaatcaaataggaagagagcaaatcaaactgtctctctttgcagatgacatgatcctatatctagaaaaccccatcatctcagcccaaaagtttcttaagctgacaagcaacttcagcaaagtctcaggatacaaagtcaatgtgcaaaaagcacaagcattcccatacagtaacaatagacaagctgagagccaaatcatgagtgatctcccattcacaactgctacaaagagaataaaataactaggaaaacaactaacaagggatgtgaaggacttcttcaaggagaactacaaaccactgctcaaagaaatcagaggacacaagcaaatgggaaaacattccatcctcgtggataggaagaatcaatatcgtgaaaatggccatactgccccaagtaatttatagattcaatgctattctcattaaactgccactgatattcttcatagaaatagaaaaaactactttaaaattcatatggaaccaaaaacaagagcttctaaagccaagacaaccctaagcaaaatgaagaaagctggaggcatcacactacctgacttcaaactatactacaaggctaccaaaacagcatggtactggtacaaaaacagacacacagactaatggaacagaatagacatctcagaaataagaccgcacatctacaaccctctgatctttgacaaacctggcaaaagtagtggggaaaggattccctatttaataaatggcattgggaaaactggctagccatatgcagaaaattgaaactagaccccttccttacacctttttcaaaacttaagtcaaggtggattaaaaacttaagtgtaaaacccaaaactataagaaccccagaagaaaatataggcaatactattcaggacataggcacaggcaaatatttcataatgaaaatgtcaaaagcgattgtaacaaaagcaaacattgacaaatggaatctaattaaagagtttcttcacagcaaaagaaactatcatcagagtgaacaaagaacctacagaatgggaggaaatttttgcagtctatccatctgacaaaggtctaatatccagaatctacaaggaacttaaacacatttacaagaaaaaacacaaccccatcaaaaagtgggcaagggacatgaatggacactctcaaaagatgacatttatgcagctgacaaacatgaaaaagtgctcatcatcacttgtcattagagaaatgcaaatcaaaaccacaaagagataccatctcacaccagtcagaatgacaattattaaaaagtcaagaaacaacagctgctggcaaagctgtggagaaataggaacacttttacactgttggtgggaatgtaaattagttcattgtggaagacagtgtggcaattcctcaaagacctagaaccagaaataccatttgacccagcaatctcattactgggtgtatacccaaaggaacagaaatcattctattacaaagatatatgcatgcatatgttcattgcagcactattcacaatggcaaagacatggtaccaacccaaatgcccatcaacgatagactggataaagaaaatgtggtacatatacaccatgggatactatgcagccataaaaaggaataagctcatgtcctttgtagggacatggatgaagctggaagccattattctcagcaaactaacacaagaacagaaaaccaaacactgcatcttctcataagtgggtgggaactaaacaatgagagcacgtggacacagggaggggaacagcacaccctggggcctgttgggggatggggggaaggagtgtatcaggataaatagctaatgcatgctgggcttaatatctaggtgatgagttaataggcagcaaaccaccatggcacgtttacctatgtaacaaacctgcacattcggcacatgtatcccagaactttataaaaaggaaaaaagcatttatttatttatttatttatttatttatttatttatttattgagatggagtctcgctctgtcatcaggctggagtgcagtggcactatctcagctcactgcaacctctgcctcctgggtttaagtgattctcctgcctcagcctcccgggtcgctgggattacaggcatgtgccaccacacccagcaaattttgttttttagtagagacggggtttcaccattttggtcaggcttgctcaaactcctgacctcaggtgatccacccgcctcggcctcccaaaatgctgggattataggtgtgagccaccgcgcccggcaactaagaagcatttaataaagggaagccaacaggaatgttgtgatacagttgccacctcccagcctaaagaggcaagagagggggaccagttactgggactgaagagaagagctaaatggataggacttcctcaaagaagctgtgaccttagttggaagatacagccaactaacagcaatccaggtggagaccgataaaagaccgagaaatattcagcctcatttccgcatcccctttgatgtcctactagtctctcttttcccctctctccccaggcagagggcaaatgaacctgtcatctatacagatcagccttttggggacagagcagaacagagaatagcgtgtgggaaacagaaaacatcctgtaccactgcagatgccttttttttcagatgactgcttgggattagtgttctacagaacacactgggaaaagttgacattattcattttttaaagatatccaaactgacacatacatatacacacatgttctgtttttttagaggtggcaatacacacaatttttggaagtgataatataatggaggtatctacagtaatatgaaatagctcattcattcaatttcaatttaattattttattttattttattttattttattttattttattttattttatatttttttgagatggagtctcgctctgtcacctaggccgaagtgcagtggttgtgatcatggctcactgcaacctctgcctcctgggttcaagcaactctcctgcctcagcctcctgagtagctgggactacaggcatatgccaccacgccaactaatttttatgtttttttttttttagtagaaatgaggtttccccatgttggccatgctggtcttgaactcctgatctcaggtgatcctcccgcgttggcctcccaaactgctgggattacttttaaagagtttctgcacagcaaaagaaactatcatcagagtgaacaaacaacctacagaatgggaggaaatttttgcagtctatccgtctgacaaaggtctaatatccagaatctacaaggaacttaaacacatttacaagaaaaaacacaaccccttcaaaaggtgggcaaggtacatgaacagacactctcaaaagatgacatttggccagcagcggtggctcatgcctgtaatcccagcactttgggaggccgaggccggtggatcacgaggtcaggagatggagaccatcctggctaacaccgtgaaacctccgtctctactaaaaatacaaaaaattagccaggcgtggtggtgggcgccctagtcccagctactcaggaggctgaggcaggagaatgccgtgaacatgggaggcggaggttgcagtgagccaagatcacaccactgcactccagcctgggagacagagcaagactccgtctcaaaaaaaaagagatgacatttacgcagccaccgtgcctggccattactttccaatcatgaaaaaaaaaataaagattttatagtgaaatgataaaaagaattgcc

SEQ ID NO: 93773 - DNA, 13016 bp, Homo sapiens
ctacacacatggctgcaaatagcctgcaccttgccaagtgtcaccggaacttttcagtacttatatttcttgacttctctggcagctgccattgttgacaatttcttccctgatattctctcttcctttgacttcttcctctggtctctctgaccatcttgttataccatgggtgggcctgatgccagtgaagaggtagtaagaaaagaaaacacatcaacatgtgcctatggcacagcaaggaataaagtggccttcagtgcctttacttagactcttgagggctttccctacctgaaaaacagtgaattgaagatcagatttgagaatggcttcactcacccttgaactttggttacaactccatgaggaggcagaagaacctccagagtgtactcattcgcttttattattctcatttcctgtgcctgttctgattacttgcaggtttcacagaaagctgaaatgaaagcaacctcgaacttgtccaactggtcattcttgccaggctttcaacccagactagcccattctgggctgtccgggcccaccatgcctcttcgatcttctcactggactccttgtcccccggcatcccctgctcagctcttagtacatctcccacaagcccttcaaactgcacacatgcaaaattaaatttattgtcttcttccacagtctgatcctcctctcatattctcctttttgctcaactgtatgtccattaacgtagctaaacaagctggaaagccaaaaccccaagtttcttcaaatgcatatttgaagatactttaaggatatggaagaatcatgctggctctttgaaagaccaattttattattgacttgaaggtgtggtatgtgtttatagtcctcgtagggctgttgaatatgtcttaaatcagcttttccttctccatccacaccatgaccttggttcttacttacattgcctttttcccgaactactacaacaatctctcatccagtctctctcattcacattctcataaatgctgccaaagtaatcttttgtttcaagtatttgtaaatacttttttcttttttatagaagtcatatatgtttactgtagacatttcagaaaaatccttaatagtacaaaaacacaattactagtagcattgtattatatatacttctagccattttctatgaataggcatacatcttyatattaaaaagattatattatgcatactcttatatgctctacttttaaattttttgagacagggtctttctctgtcacccaggctagagtgcagacacacaataatggctcactgcagccttgacctcccagtctcaagctatcctccgacctcagcatcccgaggagcaggactacagcgcacagtatcatgcccagctaatttttgtattttttgtagggacagggttttgccatgttgcccaggctggcctcgaacttctaatctgcctaaagttctaggattacaggcatgagccaccacacacagcctgccctacttttaaaaattataattaaaaattagtcttgggaacaatttttctgtatcagtaacactcattatcatttttataatgaaaatagcgtgggcacggtgtctcacacctgtaatcccagcactttgggaggccaagacgggcagatcacctgaggtcaggagttggagaccagcctggccaacgtggtgaaagccgatctctactaaaaatacaaaaattggctgggcacggtggctcacgcctgtaatcccagaactttgggaggccgaggcgggcggatcacctgaggtcagaagttggagatcagcctggccaacatggtgaaaatccgtctctactaaaaatacaaaaattagctgggcattgtggtgggtgcctgtaattccagctattcaggaggctgaggcaggagaatcgcttgaacctgggaggcagaggttgcaatgagctgagatcgtgccaccggactctagcctgggcaacagagactccgtctcaaaaaaaaccaaaaataaaaacaatacaaaaattagccaggtgtgacggcaggcacctataatccccagttactcagaagactgaggcaggagaattgcttggagccgggaggcggaggttgcagtgagccgagatcacaccactgcactccagcctaggtgacagagtcagactccgtctcaaaaacaaaaaacaaaaaaaagaaagaaagaaaacaggagattttatccaatggaaatagcatcatttgtttaaccaaccccctactacctttctatatttcctaatattaaaaaaatattggccaagcgtggtggctcatgcctgtaatcccagcactttgggaggcctaggcgggtggatcacgaggtcaggaaatcaagaccatcctggccaacatggtgaaaaaccctgtctctactaaaaatacaaaaattagctgggtgtggtggcgtgcgcctgtagtcccagctactcaggaggctgaggcaggagaatcacttgaacctgggagacagaggttgcagtgagctgagattgcaccactgtactccagcctggtgacagagcgagactccgtctcaaaaaaaaaaagccaaggaggctacatatttaagactctaaacctgttgccaaatactctcccagaaaggtcttatccaatacttctaccagtagaatgatcattttaatgtacaagccagattgtgactcaaagactgggagaactgttgcaggttcaagaacagaaaagcaggccaggcatgatggctcacacatgtaatctcagcaattcgggaggcccaggcaggaaaattgcctgaggccaggagtttgagaccagcctggacaaaacagggagacacctgtccctgcaaaaataaaaataaacagccaggggtggtagtcccagctactctggaggctgaggtgagggtattgcttgagcccaccaggaagtgaaggctacagtgagccataaacacaccactgcactccagcctgggtaacagagcaagaccccatctcaaaaaaaaaagaaaaaagaggccaggtgcggtggctaacgcttgtaatcctagcactttgggaggccgaggaaggtggatcacttgaggccaggagtttaaaaccagccatagccaacatggtgaaaccccgtctctactaaaaatgcaaaaaaattagccgggcatggtggcaggcacctgtaatcccagctacctgggaggctgaggcaggagaatcacttgaacacgggagatggaggttgcagtaagccaacattgcaccactgcactccagcctgggtgacagagcaagactccaactcaaaaaaaaaaaaaaaaaaagaaaagaaaaaagaaagagagagagaacagaagagcagagaaggcccagaaacaagactgtcatagtaatctaggccatagtgcctccaagcacagtatggcccattagtcttctggatgaaccaagaagagatttttaaatccaagttctttaattcttacagcaaatgccagcccaaggactttcatttttacatatgacttaagtccttaatagcttcctttgttcattattaactgtaattaaaattttatattcacaaaaaacgtgcagtagtgccaagtattgaaaactttgctcttcacagaaagtttggcaatgaygcaaatttcttactgcacatgtgaaaacacaggttgctggagtttccacaattttcaaggatttttttttttagtatgttaaagtgtaatgttgtttttctatctttaaatttttttattttttatattttttagagattgggtcttgctctgtcacccaggctggagtgcagtggtgaaatcatagctcactgcaccttgaactcctgggctcaagtgttccgccatctcagcctcccaagtagctaggactataggcacttgccagcatgccagacttgtttttctatttttaatcattttgttcattaaacatgctatgatgttgccatttttggttgttattttgttcctctttcatttttaatttcaccaaattactccccaccagaagtgaaatgaatttagggtaggtatatcttggggtcttttgacccaattaagtgagcatgttcaagaactgatggtctagatgcctccaaatctccccaccctgagtctaggtttgtttcctagatttactacattggctaactcctaaggagagctggtaagttactgactataagatgatcagatgtttcaagggaggaacaagaatagagcaactaaaagcaattttttcttttttttttttttttgagacaaagtctcactcttctcccctgaggctgaagtgcaatggcgcgatcctggctcactgcaacctctgcctcctgggttcaagcaattctcctgcctcagcctcccaagtagctgggattacaggcgcctgccaccacacctggctagtttttgtatttttagtagagatggggttttaccatgttggccaggctagtctcgaactccttacctcaggtgatccgcccaggctagtctcgaactccttacctcaggtgatccgcccacctcgccctcccaaagtgctgggattataggcatgagccaccgtgcccagccaactaaaagcaattttgaggaaagatgacagggaggctcaaagactcactcccctcccaactctgttgctttttttgtttctttgtttttgagacagggtattgctctgctgcccaggcaggagtgcagtggcgtgatcatggctcactgcaacctcaatctttcggatttaggcgagagattcagcctccaaagttgctgggaccacaggcatgcaccaccatgcctggctggtgagtaggcatacatctatgtataattttttaaatgataattttttttaatttgtagagacagggcaactttcagtttttcaaacactgatcttacattacagaagaatatatgcaggactctgttaaatatcagcagggctacgaggtctgagctaccgatgagcctaatctaagcataaacaaggctgtgttgagaactacattaacactgctctgtgctcggcccaagctactcagccactgacctgcagattcatactctttattagaatatgaaagactagcagaaaagaggagacagatcttcctatataagttactatccaaggaaatggagacatctgtacaattgattctggtgacaggttcaaagcttcttattttcccatctagccctaggaagtcatgcttttaaaatgtatgggatttaccttgacaaacaaagcttacaaaaggatgtggaaatctgatttccaccagcccaacttgcacttcgacagggattctgtaatgttaccagcctgagaaagaactgatctactgagtaatacatttccattcccttatggaggaagagaagagaaaattggctaaatcagtacaacttgattttgctcacatttctactgccaaragtagcatggttactcaccaacaggcactagaaacacccacacactcacagacatgtactgccaggcatttgttaggctacaacctaatgagcttgccattttcaatcatctaggctcctcattattcagtagcaccaaaattgggttcaccgcaacagtagaattttatgtgcagtactaagtcagctatgaatcacaaatagttacatttcatccaagacaaagctccaaaaccttttctctgcacattctctgtggtaggtgaaatgacatctatgagagtccctggcagaccacagtaagggtagcagagaatatgcaatgactaaggaagagagaaaacaagaaagagacaaagagtgaaaagaagagtggaaagaaaagggagaaagactaaaagtaatcaaacatttaaaaagacaaatgtgcctccagaatccgcgaaccccagtcagcgtcgcatccccagcccgccaccatggctgcctacaaattggtgttgatccagcatggcgagagcatgtggaatccggagaaccgcttcagcagctggtacaacaccgacctgagcccagcgggccataaggaggcgaagtgtggcaggcaggtgctgtgagaagccggctgagtttgacatctgcttcacctcagtgcagaagagagtgatccagaccctctggacagtgctagatgccaytgatcagacgtggctgccagtagtgaggattggtgcctcaatgagcagcactctgggggtctgatcggtctcaataaagcagaaactgctgcaaagcatggtgaggcccaggtgaagatctggaggcactcctatgatgtcccaccacctctaatggagcccgaccatcctttctacaacatcagtaaggatcgcaggtttgcaaacctcactgaagatcagctaccctcctgtgagagtctgaaggacactattgccaaggctctgcccttttggaatgaagaaatagttccccagatcaaggaggggaagcaggtactaattgcagcccatggcaacagccccccgggcattgtcaagcatctggagggcctctctgaagaggctatcatggagctgaacctgcccactggtattcccgttgtctatgaattggacaagaacttgaaacccatacagttcctgggggatgaagagaccatgcgtaaagccatggaagctgtggctgcccagggtaaggccaagaagtaaaggccagcgggcaggctactgtccccaggagcaccctccctgcccatcgcgtccccctgcccctccctcctgcacatgtcacactgaccacatctgtaggcatcttgagctgtagctgcagatgggcaccagtggctcccattttcattttagccattttgtctcctgcacccactcccttcatacaatctagtcagaacagcacttctagggcaaggcttctcagcccaagctgtggaaagctcctcttgtccaacagagtttaaaggtagtgacctgggttttcacaagtgctttgtttactaaggatttgtggggaggaaccatgccaagccatgaccaatgaagcaagacagcctgttaagccactgcctgggggctctattcattccagtggaagatgaatataacctctatggtgatgtgacaactgtttcttccctgaccccagagaagctggctccagaaggttgggatcaatcctgaatttagtttatgtgttacatttattttatttttttaaaaaggtatagtatawataaawaatacaaaacaataatccttctgggatttctcgtggcagttgaaatagtcccacatgtggtcatcagaaaataagccattcctcataccaacatggaataagctccttgacctctgagggttagaagtacttcctgctgtgtgttttggaatccctcccccaccttgtttcgtgacaatgaaatgcctcttggtcttgtccaagtgtgtctctctctgactgatttctgaatcatgttctagttgcttggccctgacacatgggcccagtgttcatttgagcatagcagtactaaatcctttttcctgatctgtacaataaaggagtgatctgtaaaaaaaaaaagacaaatgtgaataatttcatttattatagtcctgagttgccataggttatatttattgagtgccatctactctatgtcagacactgtcctaaatgctttacgtgcacaatttaattcagtcaacacatattcactgcacaccttgtgtgtgccaggcacttttctaagcaaagaatatttttgtagagaacaaaacagatgaaaatctccttcttggagcttacatttcagtagggaaggtcttatttaatcatcacaacaaagaaaagagataggaaaggcaaggagagagggaaaggatatgtatggacagaaaaagataatttagggaggggaatgcaaaggagaagaaggttagagtaaagcatcatcttcagggctttgagatgctggatgaaatggataagtccctgtccatgcctcagactcttcaacatgatggctaggagggtcccagtacaatgggtttagtgaaaagtctgagttgtaactatgtttgaagaaatatgcttccacattatttcaaatgtagatggtaatttgaggtgctaacaaagtctttctgaatagactttctgaatagtctttctgttttaataaagagatcagacacatctgtaataagcagtgttcacttgcacatgtaactcttctttcttccagctactctggtgaaagggaaaaaaaatcagtggcctaatgatgagccagctagctggctgaatttctcaccagcaccaaccataatattaatagataccattaactgagaacttattatttgctacataacaaactaccccaaaacttagtagtttaccacagtgatttattatttcttgtcatcccgggggttggcaggtgagttctgggctcacctaggcttgctcatgtgactgtagtcagatggtgggctctgctaggatgctggctccctcatgcctcttttttcatgtggtctttcaacatgcaagagttcaggctgggcttctttacatagaggcaagagcagtccaagagaggaaaaaaggaggctcttgcaacctagacttggaattagccagtgacacatctgccacattctagggggtcaaagtaaatcataaacccagccgagataccaccttttctagaaagcaatagtggtacttataaccatgagaagaattgttgaaaaacctttgtaggcaatctacttcatttgccatgtgccagaaattttaccttatctcagtgaaacttcccagcaatttatgagatagtcaccattgtatccctattttccagtcaaagaaaatgttcctgaaaggctaaatatccttttgcaagttggtggaagatctaggaccaatcttaatcgcgttagagttccaattcacaagcatccctcaataagggatcccaattcacaagcatccctcaataaggtcagtagagttagagggattgaaccccatattccctcctccctgagggaagaagaagagcctggaacagtcatgtgctgcgtaacaaagttttagtgaatgcatggaccgcatatacaaaagtggtcccataagattataatactctatttttcctgtaccttttttatgtttagatacacatatacttaccattgtgttacaattgcctacagtatccaatacagtaacatactgtcaggtttgtagcctaggagcaacaggctgtatcaaacagcctaggtgttgtcaaattatacccccagttaacagacaaaatggattctctgtggctcaaaagtaaaaacagacccaaggggccatggaagggtgagggagcagtcaagctcttcgtgtccttagagaatgctgcaaaacctgtttttctgcaaccaagtcaaagaagagttcctggaaacaacggcagctgggaattccccagttgaccaccacaagaccacctcctgccaacagacaacctggaaccagccaattaagagagactggtgatttggggctttaaggccatctaatcgacactctgtttctgactcccctgattaccctcccctgtcctgcagtttttgcctttataatctctaactttccaccctgcttagagcccacttctgttttacacctgaagctgcatttccccaatctgcagattgttttttacagaaaataaaactctccccttttcctccacagatgttatggacattttttttttttttttttttgagatggagtctcactctgtcacccaggctgaagcacagtggcacgatctcagctcactgctgcctccacctcccagcttcaagtgattctcctgcctcagcctcctgagttgctgggattacaggcacgcatcactacgcctggctaatttttgtattattagtagagatagggtttcaccatgttgaccaggctggtctcaaactcctgacctcaggtgatccacccacctcggcctcccaaagtgctgggattactggcgtgagccaccatgcctggcctcatggtcttttgttaacagtgtgtagctggctatgggttcacacaatgacaaaatcacctaacagcacatttctcggatcatatccccttcttttagcaatgcatgtctgtagttaagagctctgcagctggggtcaggccaccttggtgtgcgtttgaatcttggctctaagtctcatcaactctgtgactttaggccagttagttagcctcaatttcatcacctgtataacacggctaataagaatatctacccccatagactattatgtgatatacaggtaaaactctgcctcaactgagtatgtgctctgtaaatgctgatttctgttgttgttccctgagtgtcctgattggtttaccatgaatcaagcagtactacagtcccaaggccacagtctctagggctgttgttgatgctgagcctatgtggctttatcatcattgtccctgctgatcttgctggtgattctgctttgcctttggcaccgtgttgctgctgcagtgaccactgctgagggatcctgtccctttctttgctcatttgttgcacttcctgcttcctgcagctgcccctttgtgcaggagacctgatggctatccatgtttacctacaacattctcccttgtcagtgctcttttcgttcctctgatatcacacagggaggagagaatggaagtttcccagattcaggacattcgctgtatttgactcctatactaactcaatttgtgttttctgtgctttgcaaaagcagtgtttcagcaggaggaaccactaggtggcaggggtgctgcattccccagctcatgaccttcttccagtaatctcagttataaggatacagttcctttccaaacgaatgagctgcttttaaatcaacttacttatcaacatgaaattcaaggagaagaataaatttcatatacattctcttgaaaatttactgtgatggcactaagtccaccaacaagctctcacaggggttatgttactaaagcggttttatagcccttggcttgaaagggcacgggaaaagtaaataagcctctgcttgcttagagcacagccaaagctgattgtatttccctctagttgttaacacctgacaggacaaaggtccttygggttaaaggttcatggactcctaggctattatttcattaataagattatattaatagatacatctcttatctctcaatgaggtcccaaaaggttttcttgggggagatggaatttcagtagtgtactgaatgaaaagcaggtgtaggggcatccttctttcaattacatccccacaggaatccaactggccaagtgggatcttcttttaacaaaatagattggggagtacaaggaagggaggagaggtaaaggccaggagtgccaatgaaacccttgtctcacagtgcgggggatcaagagatgctgtgcataactgacagaacaagaagatgtttaatactaatatatcccttacacttaaaaggtaaatttaatgtagaggaacaaactacattgggttgtagctataatggcagaagaaggaagggggcgacaggatggtggtaatgttaataggctaaacttcaagtaccataacaaagtccgcagataatagcaaaaattgaaaaagcaagaaatggcactacaaacgtgtcttttagagccatgaaggtaatcaccatagaaacgaaaagcagaagtggctaacagtccttgcctctctctgcaggagaggaagaaggtgggcaagggagtggctgtgctatctgactttctacccaggaccttgttttactttaagaataggcaaggaggccgggcgcggtggctcatgcctgtaatcccagcactttgggaggccgaggcgggtggatcacgaggttaggagatcgaaaccatcctggctaacacggtgaaacccggtctctactaaaaaacacaaaaaaaattagccggacatggtggcaggcgcctgtactcccagctactgaggaggctgaggcagaagaatggtgtgaacccgggaggcggagcttgcagtgagccgagattgcgccactgcactccagccggggtgacagagcgagactccatctcaaaaaaaaaaaaaaaaaaaagaataggcaaggataggaagacattaaggtaaaaaagatatccaggtttgtgggaacaagcaccactgagctcctcctcatttgtgtcactatatctgatatgaatcatcacacttaatcatatgcttgtttactcyttagtttaatataaccactacttccagttagaaagaaatgagtggcttcaatttctacatgtaatgttacctgtctcaaactggcattttctagcaagatccattttagtcaatattttccaaggaggtcatctggttctttctgatataaacgaacataccatttttctttgtaataaaccagaaccataaagagcatatgtgcccacttgtacttactttgtgacagtttagcctcgttcttggccatgcatctgtcagcaggacatggttactctaaaccagcaaatctgctaagtctgaccctcaaacttcctctcctttcttttcaaacccaaatctaaaacaccagcaatgacagcccatccttcaaaacaccccagaatttgacagttctcaccacacccacccctaatatcctagtttgagatatcatcatctctcacttggaccaatgaaatcacctagtaactgcttccattcctgctccctaacattgtccaggcagcagccagagtgattgtctgtttgttcgtttgttttggtcaggcacggtgataatttgtgagacactgacttctacgatgtatccatcccatctctcttccacctctatcctgc

SEQ ID NO: 93774 - DNA, 12578 bp, Homo sapiens
agtgctcatttaaaagatgggcaagccaaagcgcagagtgactagtgacctgcccaaggtcacaagaccttgaacaacagaaccaaaacttcaccctagatctcatgacttccccttcctatgctctttccaacatatccagacaaacatcttgggaatggatgctcagggttgaaaggttggaaaacaagggaactaactaggaaatttaaacttctgggactgaatccatctactttgaatgaatgggacaaatagccaaatagtacctcagtgtttgtgatctatgaatgacttccatccctctgtataaagtggacacacattgctgcctggctcttcatcccaaggggctcctatccaaacagcttatataaattgataccttcctaccaccttagccaatgttaggttgaaccctatgaagttgtcattttttatgggtcaaagaggtagaatattagcaatttcatatggttccacctgatacaccctcacatacgcagcaataagttgtgcacccgatggagaggaaaaggcactgggtgcggggagaggggctggtcagaggcctgagcctcagtgtccccaatatattcatagctctgaccccaggactggaagccactcactctttgacttctttggaggaaaagtccaggtagcgattgctgatccrcygaatctcaaaccagwccyvaaaacygttgttgycgcagyatttgaactcgatctgcagcatgtygatggtcttcytcatgaaacacctgccaggggtgtctgtgtcccrgyrgtacttcatgccgttcttgagcccttggcccagggtgttctccmgcgagccccgaagcagaaagcagcagagagccacaaggaagaggatgatgttgaagagracacagatagccaggtacggcttcagccagggcttccatctggcatacttggctgggtccagggcgtcgtagcagatcttcccagccagcgagttgaagacacaggatagcacccscatccctatcaatgagttgggcacaaaatggctctcagaattattcatcacatcgctcctcttycrgarttcaatcttcaggaacagtcctaggctgaagatgatgaygccagccaacacgragaaccagttcatgagccagagcccttgggccaacttgacccrcttcttctggtcaaacttgactttcagtagcgccrtgcttgccaagkgtagtccgggttgcttcccacagcacagctcccaccccaaaccttaacgagcccagaggcggagacttagggccttgggaaaagtgcagatggcccaagctgtagggagctgccctgggggctacccatgtcgagtcccactagcctgggatccccgtgaatgcagtagtggtggcaggggtctcggaatcacagcttgagcaggggatagtcctggtcctgggcgttgtttcttcagcgcccttcccagccaagaaggggcagcctgaacgctgcagattaaaagtgggatccacaagacattttgctaatctctttagccaggttcatcccattagataaagccatgcyactctcaaaacatggtcaaaagcagcctccaggtacatgctgaaccagaaagctctgggtacagcttggagaatcaggarcaaagggcaagactggccagaagaatgggctgtatctggatgtctggctcagaccgtgttgctccccaaaagcatatttccaggccaatctccttcaacatttaaaactttctgtaggacaaataaattgttatcctctctgagaaaagaaatgacagggccaggcacagtggatcacgcctataatcccagcactttgggagaccaagttgggtggatcacttgagcccaggagttcaagaccagcctgggctacataggaagaccccatctccacacacacacacacacacacaaaaaaaaaaaaaaaaaaaattagctgggtatggtggcatgcacctgtagttctcccagctactctggaggctgaggtggcaagatcacctgagcctggggagttcaaggctgcactgagccatgatcgtgccactgcactccagcctgggtgacagagtgaggccctgtctcaaattttaaaaagacaaagaaaagaagagaagaaggaaggaaagaaagaaagtgacagatcgtgagaaaacatttgcaacttgtaaaattaaaaagtaatatacagtggccaggcatggtggcttatgcctgtaatcccagtactttgggaggccaaggcaggtggatcgcttgagcccaggaggtggaggttgcactgaactgagatccccacattgcactccagcctgggtgacagtgagactctgtctggaaaaaaaaaaaaaagaattaatatgcaaaaatgttttaagtctcacaaattcacaataaacaaaaattcacaatcaaaagaccaataatcaactggaaaaataggcaaaaaccaggaacagacaattcataattaggaaacttgaaaagtccaataatctggaaaagatctcaacttgggtaataagcaggaaaatgcaaatccaaacaacaataaaataccaaacttggccgggcacagtggttcacacctgtaatcccagcagtttggaaggccaaggtgggtggatcacttgaggtcaggcattcaagaccagcctggccaacatggtgaaaccctgtctctactaaaaatacaaaaattgtctgggtatggtgacaggcacctgtaatcccagttacttgtgaggctgaggaaggagcatcaattgaacccgggaagtggaggttgcagtgagccaagattgcgccattgcactccagcctgggtgacaagagtgaaatgacgtctcaaaaaaagaaaaagaccaaactcgatccatcaaattgaatgtatgtcaaaattctgtcaccatacatcaacaaagagagtggaagtagaagtgtacactcttggtgaatctgtacatttattattattattaattaatggattatttcttacagtagttttaggtttacaaaaaaattgaacagaaaatacagggagttcccattattctccatctccccaaccagtttctcctctaattaatatcttgcattaatgtggtacatttgttacaattaatgaaccaatattgatgcactattattaactaaagtctatagtttacattaaggttcagtctttgtgcatataattctgtcacttttgccaaatgcataatgtcatgtattcatcattattgtatcatacagaatacttccactactctaataacctgccatgttctgcctattcattcctccttccctcactcctcagccctgggcaaccaccgtctagatctatagttttgccttatctagaatatcttacagttggaatcatacaacatgtagccttttcagactggcttctttcccttagcaatatatgtgattaatgattctctgtatcttttcacggcttaatagctcatttcttcttatcactgaataacgtttcatcacatggatgtaccacggtttattccttcacctatcagagaatatcctggttgattccagtttttgacaattatgaataaaactgctataaacatccacgtgcaggtttttgctgaaaaattttccattcatctgggtaaatatctaggagcacaatggctagattacatagtaagactatgtttaactttgtaagaaactgccaatctgtcttgcaaagtgactgtacaattttgcattcctaccagcaatttttacttcatgtccttgccaacatttgatattgtcagtgtttcagattttaaccactgtaataggtgtgtagctgcatcttgtttgaatttgcagtgccctaatgacatttgatcttttcatgtgtcatgtgcttatttgccatctgcatatcttctttggtgaagtgtctgttcagcacttttgcctgcttttatttctttttgagtcaggatctatctatgttgtccaggctggtctccaactactattctcaagcaatcctcccacctcagcctcctgagaagctgggattacaggtacctgccacaatgcccagcatgctcactttttaataatgttgtttgttttctttagagtgtaaagttttacagccctttggaagggcaatttagctatacctattacaattttcaaaaaaaaattttagcgacggagtcttgctgtgttgcctaggttagtctcaaactccttgggctcaagcaatccttctgcctcaacctcccaaattgctgagattacaggtgtgagccacctcacccaccctaaaatttaaaatgcattaaaattcccaaagatccaataatcttacttctcagaacagcctgtgcataagtacaagggcttttaagaacaaaccaaggccatgtgtggtggttcatgcctgtaattccagcactttgggaggccaaggcaagtggaccacttgaagtcaggagttcaagacaagcctggccaacatggtgaagccccatctctactaaaaatacaaaaaaaaaaaaaatagctgggcatggtggcaggcacctgtaaccccagctatactcccagaggctggctgaggcataagaaccacttgaacccaggaagcagaggttgcagtgagctgagatcacaccactgtactccagcctgggcgacagagcaagactccatctcaaaaaaaaaaaaaaagaacaaaccaatcttgtcatcaaattcctgtccacctaataccaaaaagggtttcatgattagaatatgaagcctgtgagctcttggtggcaagtgggtcaaaactctaatccagaatctcctttcttcccttatgtgcattgattcccctacactagactcactacccacacactcctcttcaaggtctccaaatcattatgtaaatcagaggaatagtctccacaggcagaggaggtgtaagaactaagcaacaagacatgagttttcccatccaacaatcaccttggaaaacaaagcacttattccattgctcagctcaagtctggactccaaatgggagtgatttcaaaagccaggtcctgagccatatggggaaacattcttgttatactatagtcacacagcattttgggtcaaaaacaatattacccaaagtgatcactcttctaacagccagtgttggcttataatagctttggattatgaaaggatttcaactctttatcatcaaggacattgaaaagaattgctgccacttttgaagttgtttccttttgttttgctttttccaaaagaggatgttcagacaaccagaggactcatacctcctacaaaaagtaaaataaaaattggaagacaattgtcctgcaggaaataggatgtagatgactgtgacgctatcacagagagcctcttagaagcacacgtgcagacaagagaaaatcagagggaagaagaggaagaaagatttaatgtagaaaccagaaacaaaaatttaaaaatagctctacaagggtaacccgattagtcaggcacctctttctcctcaaatgaccttgaggttgtaaatacgacgaggagggcggtgctgagcccatagcaagtctgtggatgccccctggtggccctaaatagaatggcttcaatggatggaaatttaacgtgctcgcatccccagcacgttaaattacccagaaaagtaagagaaaaagaacagacacatcagaaatgtctctggccaaacctttcaagtacgaatcaaggcaagatatggcgatgaacaagcagagaaaagtggactgcaaaggaagcagtaattaatctgtcagagaagggagggctccttcctgcttccggaccatgttggatgtgagtctagatgcgagacatctattatagagataatagaagaggttagcggaaccaaggatggttcacttttcttctttagaaataccattaatgctgatcgtcttcgccgccgcctgcgtgctcgccttcgcgcccggcccggcctcgccccggtcttcgcctccgcctcggccgcagagcttgccccctccccacccgcagacaatgtccgagtccaagaacggccccgagtatgcttcgtttttcgccgtcatggcagcctcggccgccatggtcttcagcgccccgcgcgctgcctatggcacggtcaagaccggtgccggcatcgcggccatgtctgtcatgcggccggagctgatcatgaagtccatcatcccggtggtcacggctggcatcatcgccatctatggcctggtggtgacagtcctcatcgccagctccccgaatgacgacatcagcctctacaggagctgcctccagctagcgccggcctgagcgtgggcctgagcggcctggcagccggctttgccatagacatcktgggggacgccggtgtgcgagccacggcccagcagccccgactattcatgggcatgatcctgatcctcatcttccccgaggtgctcggcctgtacggtctcgtcgttgccctcatcctctccacagagtagcccctctccgagcccaccagccaccgaatatgatgtaaaaaccacccctcctcattccagaacgaagagcctgacacacacgcacgggaccgcggcccccagtagttgatcttgtacatgcgcagcgcagcgtcctagtgccggttgtctgttgccctggccttgcccccaccccaccccccacgccgccccgtgccatggacatctgggtccactcatcgcccctccaggcccccggtgccccaccccctagagtgctctgtgtattcggatgacttagagttgtcatttctcttcactggatgtttatttataaagatctggcctgttcccgcgtctgcggagaggccctggtctcccagctgtctataaccttagctagagtgtggccttgtgggctcctgttgctgagacctcctggatggagctgccctcgccaccgggcccttggccctgcacggagctctgtccaataaagttctcggatttggggggaaaaaaaagaaatgaccattaatgctattataataacgaaattataccgtttttcttggccaggtgtggtggcccactcctgtaatcccagcactttgggaggccaaggtgggaggatcgcatgaggtcaggagttcgagatcagcctggccaacatggtgaaacctcgtctctacaaaaattacaaaaatcagccagtgtggtggcaggcgcctgtaatcccagctactcgggaggctgaagcacaagaattgcttgaatccaggcggtggaggttgcagtgagccaagatcatgccactgcaccccaacctggaaagaaagaaagagagagagagagaaggaagggagggagggagggagggaaagagagagagagagagaggctgggcgggatggctcacacctgtaatcccagcactttgggaggcggaggcgggcagatcacctgaggtcaggagttcgaggccagcctgaccaatatggtgaaaccctgtctatactaaaaatacaaaaaaattagctgggcatggtggcgcatgcccgtagtcccagctactcaggaggctgagatgggagaattgcttgaacccgggaggcggaggttgcaatcagccgagattacgccactgcactctagcctggggtgacagagcaagacactgtctcaaaacaaaaaaagaaagaaagaaaagcaagaaagcaagagagagagggagggagggagggaaagaaggaaggaaggaaggaaggaaggaaggaaggaaggaaggaaggaaggaaggaaggaaggaaagagaggggctgggcacgatggctcacgcctgtaatcctagcactttgggagaccaaggcggatagatcacctgaggtcaggagttcgagaccagcctggccaacatggtgaaaccctgtctctaccaaagatacaaaaaaactagctgggcatggtggtgcacacctgtagtctcggctactcaggagcctgagacaggagaattgcttgaacctgggaggtggaagttgcagtgagctgagattgcaccacagaactccagcctggggcgacaaagcaagactccatctcaaaaaaaaaaaaaacagaaagaaaagaaagagaaagagagaaagaaagaaagggaaagagggagggaaggaaggagaaagaaagagagagcgagagagaaagaaagaaagaaaaaggaaagaaagaaagaaaaataaaagaaagaaagaaaagaaaagaaagaagagaaaagaaaaagagaaaaggggccaggtgcagtggctcacacctgtaatcccagcactttgggaggccgaggtcggggggattacttgagctcaggagtttgagaccttcctgggcaacatggcaaaaccctctctctacaaaaaatacaaaattagacaggcatggtggcgaatgcctgtagtcccagctacttgggaagctgatatgggaggattgcttgagcctgggagatggaggttgcagttagctgagactttgccactgcactccagcctgagtgacagagcaagaccctgtctcaaaataaaaataaaaataaaaggaaaggaagagactagagctctccccaagccagtactgaggaaaggccatgtgaggacacagtgagaagacccatctgcaagccagggagagaggccttaccagaaaccaaccctgctggcaccttcatcttggactttagtctccagaactgtgagaaagtaaatgcctgttgctcgagctgcccagtctatggaattctgtcatagcagccagagctgactaatgcactctccctcccactcaagaggtcaccagtaatctgaacaccttagctttttctttttttttcttttccttttttttttttttttttttttttgagaccgagtttggctcttgttgcccaggctggagtgcaatggcgcgatctcggctcactgaaacctccacctcccaggttcaagcgattctcctgcctcagcctcctgagtagctgggattacaggtgtctgccaccatacccagctaattttttagtagagacagggtttcaccatgttggccaggatggtcttgaactcctgacctcaagtgatccgcccacctcagcctcccaaagtgctgggattacaggcgtgagccactgtgcccagccagctttttctttttcatataaaaatcattaagtgctttcctacaaacaaatttttgatgtttttgagatttacaacaattgtatgttactgtgtagatggtctccagggatctgcttctttttcagtcaacatgttttaagagacacacatgttacatgtagctatagttcattgtcatgtatagaatatacatagtatacattcttctgccaggagatatatgggtgatttctagagttaaactttcatgcatagagctctttcaacatttgtggctggatgcagtggctcacaactgtaatcacagcaatttaggaggccaaggcaggatcacttgagcccaggagttcaagaccagcctaggcaacatggtgaaactttgcctctacaaaaaatacaaaaattagcctcgcgtggtggtgtgcacctgtggtcccagctactcatgactgaggcatgaggatcgtttgagcctgggagattgaggctgctgtgagcagtgattgagccactgcactcaagcctggatgacagagtaagacctcatctcaaaacaacaacaacaaaaaacacatttgtgtgtatctttcattatgcagaagtttctctagggtataaccctaagaagttcgagaccagcctgagcaacacagtgagaccctgtttctataaaaacaaaacaaaaatacagaaataaaaaatataaatctaaaaaagttacattgtagtaagagaacataacatgtacaatatcaaatctagaaaaaaaatctttgagatttgctctgtgacctagtttgtggccagttgtcctgtggtcaatattccacatgtgtttgcgggggataaaagtgtgtcttatgtaataattgggtgcaatgatctttttttttttttttttttttgtagacagtctcactctgtcacccaggctagaattcagtagcatgcttggctcactacaacctctactacctaggttcaagcaattatcctgcccagtctcccgagtagctgggattacaggtgcccaactaatttttgtatttttattagacatgcggtttcatcatcttcggcaggctggtctcgaactcctgacctcaggtgatctgcccacctcggcctcccaaagcactaagattacaggcataagccattgcgccaggccaatgctctttttaaaatatatcactgtgttcttcaaatgtttctttttttcttttttttttttttgagacagagtttccctcttgttccccaggctggagtacagtggcacgatcttggctcactgcaacctccacctccaggattcaagcgattatcctgcctcagcctcccgagtagctggtattacagatgtgtgccaccatgcccggctaatttttgttttgttttgttttgagacagagtctcactctgtcaccaaggctggaatgcagtggcctgatcttggctcactgcaagctccacctcctgggttcacgccattctcctgcctcagcctcccaagtagctgggactacaggcacccgccaccacgactggctgattttttgtatttttagtagaaacaaggtttcaccgtgttagccaggatagcctcgatctcctgacctcatgatccacccgcctcggcctcccaaagtgctgggattacaggtgtgagccaccgtgcctggcctaatttttgtatttttagtagagacagggtttcacagtgttcgccaggctggtctggaactcctgacctaaagtgatccgatacctcagcctgccaaggtgctgaaattacagtgtgagccaccacgcccagctgagactattattccattgttttccagctctcattgtcatcattaagaagtcaggtggtaagcagtgactcacgcctgtaatcccagcacattgggaggtccagggaggtggatcacctgagatcaggagtttgagaccagcctggccaacatggtgaaaccctgtctctactaaaaatacaaaaattagctggcatggtggtgcacatctgtaatgccagctacttgggaggctgaggcaggagaatggcttgaacctgggaggcagaggttacagtgagcaaaaataaataaataaataaaataaaataacaaaaataaattttaaaagcttgatgggcactaccgccatcttggagatggctgtggtcactccacctgccaggaagtccttggcaaaggacacggcagcatctgtcatgttgaaaggaaaggggaggcaggctgcttcaggatgggactgggccgggaaccagctttgactccagggctgctgggcctttttggggtttttttggaagcttcatgacaacagtattccttcccccacggtacagtgcaggaccctctctttggaaggtcttaagacccacaatcagaaaggtagggagacattcgagtggaaggtgggcaggagaaggtcggaggcttgcccctgaggcccaacacacccaacattataacgaaagaccagaacaagggctgtgggagttatgagccaggaacgcggatgaaaaccaacaaatatcgtaacaccacagcgaggaacacagacattcagaccacagcatacttttacactgaagatgggctcagtagactccaccctttggaagcctcagattttggcttctgtctgccttcttgtctcctctctccagtgccgttaaaatgaaactcaaggttacaagagttcaagagacctcccagccccacaacaaagtcagttttagaattagttcacattggccgggcgcagtggctcacgcctgtaatcccagtgctttgggaggctgaggcggatggatcacctgaggtcaggagcttgagaccagcctgaccaacatggagaaaccccgtctctactaaaactacaaaattagccaggcacagtggcgcgtgcctgtaatcccagctactcaggaggctgaggcagaagaatcgcttgaacctgggaggcagaggttgcggtgagccaagatcgtggcattgcactccagcctgggcaacaagagcaaaactctgcctcaaaaaaaaaaaaaaaaaaagaattagctcacatctctggattaattttgatctccaccgggtgtggtggctcacacctgtaatcccagccctttgggaagtcaaggcaggtggatcacctgaggtcaggagttcgagaccagcctgaccaacatggtgaaaccccgtttctactaaaaatacaaaattagccgagcatgatggcgcatgcctgtagtcccagttactccagaggctgagataggagaatcgcttgaaccc

SEQ ID NO: 93775 - DNA, 41823 bp, Homo sapiens
  misc_feature (1)...(41823): n = A,T,C or G
tctctactaaaaatacaaaaattaaccaggcgtggtggcgagtgcctgtaatcccagctactccagaggctgaggcaggagaattgcttaaacttggcggggcagaggttgcagtcagctgagattgtgccactgcactccagcctgtgctagacagcacaggctgtctcgggtgtgggggaaagagacaaggtccaccaaaatcaaatatgggttcctgcagattatatggggcagaaagaaaatcaaacatgaaaatcagtgattaagagaaaatcttaaaagcaaccagagaaaaagacaaccctctataattaaaaataaaaaacctttgatgtcttatatgctaaaggctaagaatctccgaagaaatacagtgactcttttcttctaaatatgacttttccagtatacagttaccttgtttaccatgacttcctttatgctaaaaatatatttttgaatcttttccaatgtgatatagtttgactgtgccccgacccaaatatcaacttgaattttatctcccagaattcccacgtgttgtggtagggacccagtgagaggtaacccagtgggaggacccagtgggaggaatcatgggagccagtctttcccatgctattcccatgatagtgaataagtctcatgaaatctgatgggtttatcaggggttcccacctttccttcttcctcattttctcttgccaccgccatgtaagaagtgcctttcaacaaacctgcatgttctacacatgtatcccagaacttaaattaagaaaaaaaaaaaaaagaagtgcctttcaactcccacaatgtttctgaggcctccccagccatgtggaactgtaagtccaattaaacctctttttcttcccagtctctggtatgtctttatcagcagtgtgaaaatggactatgcatctcttactttattattattcccttggttttcaaaaatacgtacttaactggcttttcaaatgtatctaagtttgcttgtgagtataaaagtttccttcccccgtggatcccaggtataaaaaataacttgttaattgaagagttaagaactgaggtggatatatacaatggaatactgcctggaaataaaaaggaatgaatgcattatagagtagccaaaatgatagagacagaaagctgaatggtaggcgccaggggctgggggaagggggttacagtgagtcagtgtttaatgggtacagagttataggaatgcaagataaaatgagttctggagatggatggtggtggtgggtgcataacaatataaatgtactaaatacccctgggctgtatacttaaaaatgtctaggatgataaattttatgttatgtatattttaccacaataaagaaaatgaatatttttagaaaagggaatgaagtactgatacatgctacaacacggatgagccttgaaaacattacagtaactgcaagaaaccagacaccaaaggccacatattgtatgattccatttatatgaaatgttcagaataggcaaatctatacacagaaagtagattagtggttacctagggctggggagtgctggggcagaacaggaggtggctgttaatgggcacagggtttcttttggggtgatgaaaatgttctaaaattgactttgatgatggttgcacaactctgggaatatcctaaaagccaccgaattgtgcatgctaaatgggtgaatcatattgcataactgtatctttttttttttttttgagacagaatctcactctgtcacccagcttggagtgcagtggcacgatctcggctcactacaacctccaccttccagactcaagggattctcccgcctcagcctcctgagtagctgggaccactggcgcccgccaccacatccggctaatttttgtatttttagcagagacagggtttcaccatgtgggccaggctggtctcgaactcctgacctcaggtgatacacctgccttggcctcccaaagtgctgggattacaggcgtgagccaccgtgcctggccccaagaactatatcttaataattctgttattagaaaaaaacaaaaacaaaaaacttgccaggtatgatggctcaggagcacagtcccagctactgaagggctgaggcaggaggatggcttgggaccaggaattcaagaccaatctggtcaacacagcaaaaccctgtctctaaaaaaatatatatatttttaattagccaggcatggtggcatgcacctgtggtccttgctactaggaagctaaggcaggaggatggcttgagcccaggagtttgaggctacatgagcaatgaccctgccactacactccagcctggatgacagagtaagacctgtctctaaaaaataaaataaactgaagtggaacagtcacccagcttctgactagtgaatgatcctcccccttcttccttagtgccatttttaacaagtggcaaaggtcctattttaaaatatgccaagtgtgttgtcttatttcaacaacattccatctcaactgtccccatgtggtcttagttaagttacttaactgtgataatcatcaattctcttcatctatcacccacttcttcctctataaaaagagaacaacaggccgggtgcagtggctcacgcctgtaatcccagcactttgggaggccaaggcgggcagatcacttgaggccaggagttcaagaccagcctagccaacatgcaaaactctgactctactaaaaatacaaaaattagccaggtgtggtggcacgcacctgtaatcccagctattcgggaggctgaggcaggagaattgcttgaacccaggaggttacagtgagcagagattgaacccaggaggttacagtgagctgagattgcacaagtgcactccagcctgggtgacagagcgagagaccctatctcaaaaaaaaaaaaaaaaaaggggcaaaaagcattcttaggaaaaataaatgagctacaaaaagcctctagaataaaaatcataggtgctcattcagtgtttgtagacctaaaaaatgggtctatgcagaataatcaagcaatgaaaggtaggctgccccagaattgtaacattaaccgtggcaaattctctcaagtcacgcctccttgcatgacccctccagaaaggtgaagttttagatttacttttctccttagccacacatctccattcctgtagttatttcatactaacactttcatgttgaccctaaaattcaaattttaccttttatggaaggattaatattttacatatatctccattggacagatacctctatctgaattggaactttttttttttctcattctctttacctaatttcctgaggataatgaataaagatggatttcctgtcttcccttatcacaaattctctggtaccataaaactagagaaaaatctgctcaactgtctatatgcaacaccacctctagaaatccaggaactcaggcactcaggcaggctgggtttttatttatttttgtgctgttttttgtttgttttttgttttgagacagagtctcgctttgttgcccagggtggagtgcagtggcacaatcttggctcactgcaacctccgcctcctgggctcaagtgattctcctgcctcaacctcccaagtagctgggattacaggcaactaccagcacgcccaactaatttttgtatttttagtggagatgggatttcaccatgttggccaggctggtcttaaactcctgacctcaggtgatccacctgccttggcctcccaaagtgctgagattacaggtgtgagcccctgcgcccagcctaggcatgctgtttttattcaatgccttttacatacacaaagagcagctctaagcaaaaaaaagcggggagagtagatctgcaggtcctgatactgaaaattgttcaaaattttctaaattctattaatagtagaaaaagatagtagcaaattagtatagaatataatataatctgtaaaatatatttaaactaatttttgagcttatgactatgcacatatacacatgtacaaatttttaaaatctggaagtatatacagaacaccaatagcagtgggcctcactcaaagggagggattatggggtctatcactgcctaccttccacatttctgtactgtttgaaatttctgtagcaagaatgttttaattttataaccaggacaaaaatagctagaaggaataaaggagaaagttgggagaactacagctaaattgcagaattgtagctctaccatccccttaacctcctatacacatcaccatcacctatagggggccactctgctcaggaacaaaagggacctttctccacaaagaaaaaagacacaattctaatacgctcttctgccctctggagaattccagaataccagagccatgactgaggagaaaaaagaatcccccacaactcaccagagttgccagacattcccagatcacttcctccttccttttgttggactttctttactttctttttaacaggcccatcattttccaatggtctcttctttcttctgtcaatttctgtagcctatatcgggaaggttagaaaatgatgtgttatctctactctgagaaggcctgacgtatgtgaagcaatttaaaccttacaactgaatgacaaggttccttgccatccactcttcaaagaatcctctacttttagctctggaaaaccctatgggtgaactgtttttaacaccataaaagacaaggtagagtctgatagtcaggagcctcagcaactcaagccgtgtttagaattaattgaaaccaaggctgctaccggtcttgattcaatgagccttcagctttctctaattataaaacttgaatcaccctacttacatatgctaaataaaatacctctaagaaataaacagttatgtagcaaaggcacagaggggaaaagataggtaataaaagaacagtatcatttttgacatgttcattgcaatttaagtgtttcctgtttaaaaggtttatgttcatcactaaagatgtgacaagattatgaattttttcttggcagaaaacttgccaaaagcatacataagtccttcaccagctaccctttaaatggtgggtgcaaaattttggtgaattcatgaaaacgtagctcgtcctcaaaaaaaacagaagaggagtaatcattttaagggagaaatatatacgaaaggaacaagattttgaagcacccaagctgccacctacattaaaacacggtaggtggctaaacaccagtcttcaatgcccttccacagcctcaatctgaaaaatactgtgcaggtgacccaagtgaggggtcacccttgggcttttcctgtggcagtatctctggtttaaaaacaaacaaacgtacttattgcgttgaaggatggcaacaggaaggactccatgattagtcacatctataccatcctaagaaactttatccacccaaactgtatttcagactttataatctaaactacaaaaagagttcactggggaactgcacaatatgactgcttttaaccgtagtgatttcaaatattgagccatgctgttgcagtcttaaaaactggagacctaagggcagctttcttctagtcacccaatccagcacttttttaaaaaatcagtaaaactcttcgaccaccaaggaaaaaaaaaaaggatggaggttaaaagacgcaccccttgcccacaagccccctcatcagaatgggagtcaggagacctgagttcctgtctcaggcctgccattaaaaacctgcataacctttgcctatctcctcaaacggaagtactaaaacctcagcgcttcacccaatttgtagccccggctgggctcttcccaccttccccttcttcagcccgccccttcctcctccagccctatcatcgggcggagggtccacgcctccgcccgccttacccacaagccccgcccccccagccccgatggccctgcccagtcccagacagaacctactaygtgcggcggcagctggggcgggaaggcggscgctgsggscgctgcrgccgctgcagcgccagggtccacctggtcggctgcacctgtggaggaggaggtggatttcaggcttcccgtagactggaagaatcggctcaaaaccgcttgcctcgcaggggctgagctggaggcagcgaggccgcccgacgcaggcttccggcgagacatggcagggcaaggatggcagcccggcggcagggccyggcgaggagcgcgarcccgcggccgcagttcccaggcgtctgcgggcgcgagcacgccgcgaccctgcgtgcgccggggcgggggggcggggcctcgcctgcacaaatrgggacgagggggcggggcggccacaatttcgcgccaaacttgaccgcgcgttctgctgtaacgagcgggctcggaggtcctcccgctgctgtcatggttggttcgctaaactgcatcgtcgctgtgtcccagaacatgggcatcggcaagaacggggacctgccctggccaccgctcaggtatctgccgggccggggcgatgggacccaaacgggcgcaggctgcccacggtcggggtacctgggcgggacgcgccaggccgactcccggcgagaggatggggccagacttgcggtctgcgctggcaggaagggtgggcccgactggattccccttttctgctgcgcgggaggcccagttgctgatttctgcccggattctgctgcccggtgaggtctttgccctgcggcgccctcgcccagggcaaagtcccagccctggagaaaacacctcacccctacccacagcgctccgtttgtcaggtgccttagagctcgagcccaagggataatgtttcgagtaacgctgtttctctaacttgtaggaatgaattcagatatttccagagaatgaccacaacctcttcagtagaaggtaatgtgggattaagtagggtcttgcttgatgaagtttaccagtgcaaatgttagttaaatggaaagttttccgtgttaatctgggaccttttctcttattatggatctgtatgatctgtatgcagttcccaaggttcatttaccattattaaaaaatttttgtcttagaaattttatgtatgtcaacgcacgagcaaattatcaggcatggggcagaattggcarctgggtggaggcttcggtggaggtkagcactccgaaaggaaaacagagtaggcctttggaacagctgctggaagagataaggcctgaacaagggcagtggagaagagagggtaaaaattttttaaggttacatgaccctggattttggagatctsgaatttaaaggtsatgcaccagggatgaacgctcagattttcagtttgaaagctggcgtgacatgtaaaggagtggagaataatgtaccattgtaatgatgaggcgcctctaggacatctaggataatttcaggcgtggggatctaggtgaattgaactgttggagggaagggaataaccaaggaaaagaatgtgggggttgagagatgccccgtttaaaacctaagagacctggatatttatggttgtaagaggaggcatggcagaggaaatggaaacagtaagaaaggagcagatgctgcatctctttaatgggacagatacaaggcatttgggtttgacacttaggtcactggtagagatgatgacaagagcccgtagctaaagaattgataaaagccagtctcaaaaatcccaatatagtctggtaatgttaatgtttctttggttcagatagctgactctcaaagttattttcctaagaaactgaaccaaaagtggacgctatatgtaaaaagtttttatagaagtgttataagagtaggatagagacataattaaacatgttttaaggtaattgagtggaacattaagcacctatttttaaaagtatgatttaatatcaatctacaaagtacacaaatataatacaattgtatcagacagttgtgacagcactgattagaggctgaacattattctaagtctttaattcccacaacaaccctagaagcaggaactattgttatctctattttatagataaagtaaaccacaaggggttaacacgwtttgtcttgtggrtgacaaaatgcattcaacttgagcactttgactcagaatctttttttttttttttttttaagagggagtcttgctctgtcgcccaggctggagtgcagtggcgcgatctccgctcactgcaagctccgcctcccgggttcacaccattcttctgcctcagcctcctgagtagctgggactacagacgcctgccaccacacctggctaattttttgtatttttagtagagayggggtttcaccgtgttagccaggatggtctcgatctcctgacctcgtgatctgcccatcttggcctccccagaatctttactatgtcatacacaattgcaaatgattaaaactaaatattggatataaattggataatgccaaagggaaaaatagttagatttaggtaatgagtgataagtatgaattttggtaagacttttaagttcagttttttaaaggagatctctgccaaaccccaaaaacaaagagccctaacatcagcctaaccagatttcaaatttcatcttttggcggtatgcatttttaacagtcacccctcaactaacacatcatcctccctcaactcmcattctactaaccccatcaatgcaactccctgcccaccttactcaacatatacaccrctgctagccccataccccgaaccaaccaaaccccaaagacaccccatatggtttatgtagcttacttcctcaannnnnnnnnnnnnnnnnnnnnnnnnnnnnnnnnnnnnnnnnnnnnnnnnnnnnnnnnnnnnnnnnnnnnnnnnnnnnnnnnnnnnnnnnnnnnnnnnnnnnnnnnnnnnnnnnnnnnnnnnnnnnnnnnnnnnnnnnnnnnnnnnnnnnnnnnnnnnnnnnnnnnnnnnnnnnnnnnnnnnnnnnnnnnnnnnnnnnnnnnnnnnnnnnnnnnnnnnnnnnnnnnnnnnnnnnnnnnnnnnnnnnnnnnnnnnnnnnnnnnnnnnnnnnnnnnnnnnnnnnnnnnnnnnnnnnnnnnnnnnnnnnnnnnnnnnnnnnnnnnnnnnnnnnnnnnnnnnnnnnnnnnnnnnnnnnnnnnnnnnnnnnnnnnnnnnnnnnnnnnnnnnnnnnnnnnnnnnnnnnnnnnnnnnnnnnnnnnnnnnnnnnnnnnnnnnnnnnnnnnnnnnnnnnnnnnnnnnnnnnnnnnnnnnnnnnnnnnnnnnnnnnnnnnnnnnnnnnnnnnnnnnnnnnnnnnnnnnnnnnnnnnnnnnnnnnnnnnnnnnnnnnnnnnnnnnnnnnnnnnnnnnnnnnnnnnnnnnnnnnnnnnnnnnnnnnnnnnnnnnnnnnnnnnnnnnnnnnnnnnnnnnnnnnnnnnnnnnnnnnnnnnnnnnnnnnnnnnnnnnnnnnnnnnnnnnnnnnnnnnnnnnnnnnnnnnnnnnnnnnnnnnnnnnnnnnnnnnnnnnnnnnnnnnnnnnnnnnnnnnnnnnnnnnnnnnnnnnnnnnnnnnnnnnnnnnnnnnnnnnnnnnnnnnnnnnnnnnnnnnnnnnnnnnnnnnnnnnnnnnnnnnnnnnnnnnnnnnnnnnnnnnnnnnnnnnnnnnnnnnnnnnnnnnnnnnnnnnnnnnnnnnnnnnnnnnnnnnnnnnnnnnnnnnnnnnnnnnnnnnnnnnnnnnnnnnnnnnnnnnnnnnnnnnnnnnnnnnnnnnnnnnnnnnnnnnnnnnnnnnnnnnnnnnnnnnnnnnnnnnnnnnnnnnnnnnnnnnnnnnnnnnnnnnnnnnnnnnnnnnnnnnnnnnnnnnnnnnnnnnnnnnnnnnnnnnnnnnnnnnnnnnnnnnnnnnnnnnnnnnnnnnnnnnnnnnnnnnnnnnnnnnnnnnnnnnnnnnnnnnnnnnnnnnnnnnnnnnnnnnnnnnnnnnnnnnnnnnnnnnnnnnnnnnnnnnnnnnnnnnnnnnnnnnnnnnnnnnnnnnnnnnnnnnnnnnnnnnnnnnnnnnnnnnnnnnnnnnnnnnnnnnnnnnnnnnnnnnnnnnnnnnnnnnnnnnnnnnnnnnnnnnnnnnnnnnnnnnnnnnnnnnnnnnnnnnnnnnnnnnnnnnnnnnnnnnnnnnnnnnnnnnnnnnnnnnnnnnnnnnnnnnnnnnnnnnnnnnnnnnnnnnnnnnnnnnnnnnnnnnnnnnnnnnnnnnnnnnnnnnnnnnnnnnnnnnnnnnnnnnnnnnnnnnnnnnnnnnnnnnnnnnnnnnnnnnnnnnnnnnnnnnnnnnnnnnnnnnnnnnnnnnnnnnnnnnnnnnnnnnnnnnnnnnnnnnnnnnnnnnnnnnnnnnnnnnnnnnnnnnnnnnnnnnnnnnnnnnnnnnnnnnnnnnnnnnnnnnnnnnnnnnnnnnnnnnnnnnnnnnnnnnnnnnnnnnnnnnnnnnnnnnnnnnnnnnnnnnnnnnnnnnnnnnnnnnnnnnnnnnnnnnnnnnnnnnnnnnnnnnnnnnnnnnnnnnnnnnnnnnnnnnnnnnnnnnnnnnnnnnnnnnnnnnnnnnnnnnnnnnnnnnnnnnnnnnnnnnnnnnnnnnnnnnnnnnnnnnnnnnnnnnnnnnnnnnnnnnnnnnnnnnnnnnnnnnnnnnnnnnnnnnnnnnnnnnnnnnnnnnnnnnnnnnnnnnnnnnnnnnnnnnnnnnnnnnnnnnnnnnnnnnnnnnnnnnnnnnnnnnnnnnnnnnnnnnnnnnnnnnnnnnnnnnnnnnnnnnnnnnnnnnnnnnnnnnnnnnnnnnnnnnnnnnnnnnnnnnnnnnnnnnnnnnnnnnnnnnnnnnnnnnnnnnnnnnnnnnnnnnnnnnnnnnnnnnnnnnnnnnnnnnnnnnnnnnnnnnnnnnnnnnnnnnnnnnnnnnnnnnnnnnnnnnnnnnnnnnnnnnnnnnnnnnnnnnnnnnnnnnnnnnnnnnnnnnnnnnnnnnnnnnnnnnnnnnnnnnnnnnnnnnnnnnnnnnnnnnnnnnnnnnnnnnnnnnnnnnnnnnnnnnnnnnnnnnnnnnnnnnnnnnnnnnnnnnnnnnnnnnnnnnnnnnnnnnnnnnnnnnnnnnnnnnnnnnnnnnnnnnnnnnnnnnnnnnnnnnnnnnnnnnnnnnnnnnnnnnnnnnnnnnnnnnnnnnnnnnnnnnnnnnnnnnnnnnnnnnnnnnnnnnnnnnnnnnnnnnnnnnnnnnnnnnnnnnnnnnnnnnnnnnnnnnnnnnnnnnnnnnnnnnnnnnnnnnnnnnnnnnnnnnnnnnnnnnnnnnnnnnnnnnnnnnnnnnnnnnnnnnnnnnnnnnnnnnnnnnnnnnnnnnnnnnnnnnnnnnnnnnnnnnnnnnnnnnnnnnnnnnnnnnnnnnnnnnnnnnnnnnnnnnnnnnnnnnnnnnnnnnnnnnnnnnnnnnnnnnnnnnnnnnnnnnnnnnnnnnnnnnnnnnnnnnnnnnnnnnnnnnnnnnnnnnnnnnnnnnnnnnnnnnnnnnnnnnnnnnnnnnnnnnnnnnnnnnnnnnnnnnnnnnnnnnnnnnnnnnnnnnnnnnnnnnnnnnnnnnnnnnnnnnnnnnnnnnnnnnnnnnnnnnnnnnnnnnnnnnnnnnnnnnnnnnnnnnnnnnnnnnnnnnnnnnnnnnnnnnnnnnnnnnnnnnnnnnnnnnnnnnnnnnnnnnnnnnnnnnnnnnnnnnnnnnnnnnnnnnnnnnnnnnnnnnnnnnnnnnnnnnnnnnnnnnnnnnnnnnnnnnnnnnnnnnnnnnnnnnnnnnnnnnnnnnnnnnnnnnnnnnnnnnnnnnnnnnnnnnnnnnnnnnnnnnnnnnnnnnnnnnnnnnccctaaccgtgcaaaggtagcataatcacttgttccttaaatagggactgtatgaatggctccacgagggttcccctgtctcttactttcaaccagtgaaattgacctgcccgtgaagagacttttaagttcagttttttaaaggagatccactaaatgtcaggatgtccatcatatctatgcacatagataagtcctcaatgtcatctgtgagttcttggaaactgtgactttaagtgaaacaatgtakagcaaaaccaattttaccataggctactggatgtacacaagagttaagttcctagggcatattgctggtcacaaaaacatcaccaaacttctaaatgaaggccaaaaacacttctaatagaaaacactgaagtaaatatgagctatacatacatttaagaagaataatgtgcatgtctttgggatgtggaaggaaactggaatacctggagaaaccccatgcagacatgggaaaagcatgcagactccacacagacggtggccctggccaggaattgattatttttctcatcaacgttagaagaaaacgatgttattcaaggacatgttgtatataaatacatgaaaatatatgtatattcccaaaatatacttaggctttctttgtgattttataggtaaacagaatctggtgattatgggtaagaagacctggttctccattcctgagaagaatcgacctttaaagggtagaattaatttagttctcagcagagaactcaagtaagtaccttaacataaattcaccacaagaaaatcatgtctcatagtggagatcagtatatgataaratgaaattgtataaaaggagctattgatgaagctgcttaatatcacaaaggtgattatagaaaattaataagcagttatttatactacatgacaataacttattctactacctgagtaattgatttcatcaccttgaaaagttacattaaacattaaatagctcactgtggtatcagatttgcaagttatcttgaaccatcattcagtaggcccaaatataaattatacagtgtaatcaataacctgtagtttcacataaagtcaaaacaactattttttgggacttgctaaaattaagtgatgatcccctttctggacccaaccctaaatgcaatmaaatgtgaattttaggatgggctgaaatgggtcataatcttctactctgttattcctagttaaccacaayacccaataatattttgtacttaacattcattacccagtgtctgaaggtaaaacatttcaaagtattgaaatggttctagagatcctggagagaagcgggtatctccagttagcctctgctaagaattttcctgtcctccaacccagggttggagtcagtagttcatgaagcctggatatgccctggtgactggagagtgggaggggtaatcatattaagactgcccaggaagtcaactccaatggcttgggaggttgaggggtggccagaattggacctgtgttaatccattctcatgttsytataaagaactgcccaagactgggcaatttgtacaggaaagaggtttaattgactcacagttcctcatggctggggaggccacaggaaatttaaaatcatggtggaaggggaagcaaacgcatccttcttcacatggtggcaggaaggagaagtgccgagcaaagggggaaaggccccttataaaaccatcagatctcatgagaacttaactatcacgagaacatcatggggggaaccaccccccataattcatttatctccacctggtatcacccttgacatgtggggattattacaattcaaggtgagattttggcggagacacrgccaaaccatatcaggatctaaggggaaggtctgggatctggcatgttaatcattcttagtctaataatataatcaccaaaaagaatgcagtatcctagggcactactttcttgggaacagtagtcatagtattcttttcccatgtgtattggtgaagattcaaccaaagaagcagaaccagtagtagatagatacaggtatattaaagagttttattgcgaggaattggcttacacaattatgggggctgggtacgtgagtccaaaaatctgtaaaacgggccatcagaaaggacaagctggaattctccagcaggggctgaagtgstacaggtgaaatttcttcaggaaagcctcaactctactcttaaagcctttaaactgattgawtcagcccactcagattaaagtctgaccgggcacagtggctaacccctgcaatcccagcactttggaaggccaaggcaggtggatcacttgagctcaggagtttgagaccaaccgtgcaacataatgaaaccccgtctctacaaacaaattagccaggcgtggtggcatgtacctgtagtttccaggaggcagaggttgcagtgagccaagatagtaccactgcgctccagcctaggcaacagagtgagatcctgtctcaaaaaaatttaaaaaaaaaactgaattgtaatcacatctacaaaatgccttcaaagcaacacctagatacagtatctgaataaccaaggactatatcctagtcaagtttaacactatgggaaggaaagaactacacagctatataggctaaggggattcaggcttacatagattttctcccaagttcttcctagaatggcataggtaaaaaccgagaagaaagtgtatagaatatttgcattgattgcctctgggcgacggggcagatttgttgatgtgcatcttgctgcctgcttccatcttcatgctgttctttcttctggttgctaggatgctctgattatctctttccttggtagatttcaaattcacagactatatcgccattccaagaaactctttaatgatatttttgaatactactcaagtttgtttatggctagcttaagctcamacagaaagaaatctcagtgggggagatgttcacttgagccagcatttctcctcgaatatgatgagtgtaatttttttttacgaccttcctgtgatgcatgtaattgggtttggttgcttcttctgtatttatatataacatatgttggtgtcttgtgctttttttttttaaggctgagaaaatttaaagtctttgttatcaagcatgccagggaaatagtgataccagttagtaaaaaatgttagagctcttttttgttgttgttcttccttccacttccttacttgttggtcagtcccacacatatagtgaacagctgctgagtgccaggcactgcagggtcctgaataagagggcagagatttatacatggaaatcacttgcttatgccaactctaaagatacttcatttttcacccctctcccccaatgtaagaagaaactgaatcctcaaagtgatcacaaaattttctaccaaacactatagtaatttagggtaaatatttcttaagtaaggtattgagggaaaatgcttttccaaagttgtctagacagtcaagttgtggctttaaaagaacttgaggtgagaagggtgggaatggccactgatgagtacagaatgttttcttttttggtgtgatggaamtgttctaaaagtagataggagtgatgcttgctcgactctgtgaatctactaaacgtcactgaactatacactttaaaagggtraatgttatggtgtgtgatttatatcaataaagtggcttttaaaagtctttggaaccagccgggcacagwggctcacryctgtaatcccagcactttgggaggccgaggtgggcagatcacgaggtcaggtgttcgagaccagcctggccaacatagcaaaaccccgtctctactgaaaatacaaaaattagccaggcgtggtggcaagcacctgtaatcccagctactcgggaagctgaggcaggagaagctcttgaaccaggaggcagaagttgcagtgagccaagactataccactgcactccagcctgggcaacagagcaagactccgtctcaaaaaaaaaaaaaaaacctcgttggaaccaaaaattaaataaacaagttttactgtaatgctatagtagcctggacaccatctttagaaaatccaaaatkgcctccattatgtaagatttaaatagtctcccatccacgaaagttaacttaatttcatgttataattttttacgatctcactatcagaatctccacagtgattaaaacttcttgaaggtgcagttctctctccccctaccactcacacacttggagtagcaaacactgacctggtttctgatgtctactatggcacctaataactttgtgactttaggcaggttacaagtaagccttgttgaacctctttccttacctattaaatgagatgaataatgacaacttttttgggtgattttgaagactcactgaaattttgtatgtaaagtttctggcacacagaagggtatagatatcagttcctacccccacccccataaacttgctactttatatcttatagaacatacacattaatattaatattaatgaaatcacagtgaacagactcatgatctcattttcaccttaacatattactttgttcttgtttccctccatcttgagacaaaaatccactgccacctaaatcaactctctcatctcccctgacttgattctggattcctttttttctatcttcaccttgctctgctgtcccaaccttttagtattatcaaaggcaaaataaaaattttgcgatgaattctctaaatttaacattgtgtttgggaagaaaaaattgcagtttagggcatacatgcagacaagtgaccttccatatgtctgaagaacaaagggaaggttagaggttttatttaaaaggagaaatgttactgctctttgagaaagttcattggcactactaaggtttgggggagctagcaagctccgactggcgagcagtgagtggtgggcaaaatcagttctagagttgcagcaagttatctcagaagctatagataaaactggtttcaggttacaacaagcagttccagcagtcaggcttacagagaattacattcttggagcaatgttttataccctgagtgcttttttcccctggcccctcaactctgatttagttgggtatgacaagaatgacccactgtcacccaggccagagggcagtggtgtgatcgcggctcactgcagcctccacctccctggctcaagcaattctcctgcctcagcctcccaagtagctgggataacaggcatgtgccaccatgcccagctaatttttgtgttttttagtagaaatggggtttctccatgttggccaggctggtctcaaactcctgacctcaggtgatctgcccacctcagcctcccaaagtgctgggattacaggcgtgagccaccgtgttcggcctaccctgttttaaacctcaccatagtttacttttcttctaccctcaactttctcagagctttcttgtattaaataactttagtatgattaaaataaaattctatactacactttggttgtagtctgtcatgcctgtgcctttgcacatgtttttatctcctttgacactcagttaaggagtcatgccctgaggagtattctccctcatcaccccrgccctgcgttcctgtatagcgtcctctgcatgtcttcgttgtatgtcctttcatacattatagtcactgctgagatatttctgactgctatcacaatctctttgagttcagggactgcatattttatctctatccccagaatctagcataacccctagcaaagtaggrattcaaaaatcacagaatgaatagtacataggtgatttataaaaatagaaccatcccacatagtaccactttgtaacccacctctttttccctcaatatattagaaaataaagtcctgtaaatatttttagtggctgcatagtattccattatgaggctggatcatacccaatttttaatatgagcatacctcagagacactgcaggttcagttccagaccactgcaataaataaagcatatcacaatataggtagtcacataaattttttctcagtgcatataaaagtyatatttacactatactgatagtctaatagatgtgcaatagtatatctttaaaaaatgtatgtaccttagttaaaatatgactggaaaatgctaacaatcatccgagccttcagtgggtcataatcttctcactatggagtgtcttgccttgatattgatggttgctgactgataaaggtgatgattgctgaaggctggggtggctgtggcaatttcttaaaacaagaatgaagtttgccacattgatagactcttcctttgaagaaagatttttctggagcatgtgatgctattttataggattttacccacaacagaatttctttcaaaatgggaatcagtcctctcaaaccttgctgttgctttattaacttagtttgcrtagtattctaaatctttcgtgrtcaacaatgttcacagcatcttcactgggagtagatttcatctcaagaagccagtttctttgctcatccataagaagtaattccttatccattgacattttatcatgagattccagcaattccatcccatcttcaggccccactttttttttttttttttttgagacggagtcttgcctgtggcccaggctsgagtgcagtggcccgatctcagctcactgcaagctccgcctcccgggttcacaccgttctcctgcctcagcctccctagtagctgggactacaggtgcccgccaccacgcctgctagttttctgtattttttagtagagacagggtctcactgtgttagccaggatggtctccatctcctgacctcgtgatccgtccaccttgkcctcccaaagtgctgggattacaggcattagccaccacacccagcccaggttccacttctaattctagttctcttgccatttccaccacatctgcagttatttccacccccraagtcttaaacccctcaaagccatcatgagggttggaatcaactaactccaaactcctgttaatgttgatattttgatctcctatgaatcatgaatgttgttaatgccatctagaatagtgaatcctttttagaaggttttccattgactttgcccagatccatcagaggctattgcagctacggccttacaaaatgtatttcttaaatagtaagacttgaaagtcaaaattactccttgatccatgggctgcagaatgagcaggaatattttgaaaggaatcttccttcctgagaagtaggtctcaacaggaggctttaaatatytagtgaaccatgctataaacagacgtgctgtcatccaaacttcgttrttccatttctaatacacaggcagagtatatttagcgtaaytcttaaaggccctgggattttcagaatggtaaatgagcattggcttccactgaaagtcatcagcttgcattagctcctaacaagagaatcagcctgttctttgaaactttgaaactaggcattgacttctcctttatagctatgaagtcctagatggcatcttccttgaatagcaggctattttgtctccaytgaaaatctgttcttagtgtagccaccttcatcaatgatcttagccagatcttctggataaacttgctgcagcttctacattagcacttgctgcttcaccttgcacttttttcttatggagacagctttttccttaaacgtcatgaaccaaacccttgctagtttcaaacttttcttctatagctttctcacctctctcagcctttacagaattaaagagggttaaagccttgttctagattgggctttggcatraggtactgtggctggtttgatctatccagaccactcagcttcctctacatcagcaataaggctgtttgcttttytgtttttgtttttgtttgagacggagtctcgctctttcgcccaggctggagagtgcagtggcgtgatctcagctcactgcaagctccacctcctgggttcacgccattttcctgcctcagccccccaagtagctgggactacaggcacctgccaccatgcctagccaggcatacacttttttgtatttttagtagagacagggtttcactgtgttagccaggatggtctcgatctcctgacctcgtgatccgcccacctcggcctcccaaagtgctgggattacrggcgtgacccacygcgcctggccaagctgtttgctttcttaccattcacattttcactggaatagcacttccaatttccttcaagagcttttcttttgtatttacaacttggctgttagatgcaagaggcatggcttttggcctgtcttggctttgatgtgcctccttcactaagcataatcatttctagcttttgattttacatgagaaatatgcgactcttcctttcacttgtacgcttagaggccattgtagggttattaattggcctcatttcaatattgttgtgtctcagggaattgggaggccagaagagggggagagaaacaggaatagccagttagtggagctgtcagaacacataacatgtatcgattcaccatcttaaaagggcatgatttatggcaccccataacagttacttgcaacagtaacagcaagatccccaaaacgtattttaataatgaaaaagcctgaaatattgtggaaattaccaaaaggtaacagagatagaaagtgaacacatgctgttggaaaaacttcaccartagacctgctcagtgcagggttggcacaaaccttcaatttgtaaaaaagaaaaacacctttatatctgtgaagcacagtaaaatgaggtatggcttagtagggaaccccatttttaaaggctcagtatgaagggtcttaaattgargatgtatttttgcrttctggttaagacactattccatttcagggttttttgtttttaagtggtttcccaacactcctcagggaaattgagcaagaattccatcggcagtcctcacatcaggaacagtgaaaaaggataatgtttatatggcacccgagataatcagataaggccagaagacaagagtcagagggttctgcctaatctaagccccaccatcctgatgttwaagggcccctgaatcggaggaccctgccacaggcaccaactgaagtcttttgtccatgtaacaaattgcagctcaagtttcaaagtcaaatctgttggagttcaactcggaggtccatcatttcccggctgtgtgaccagtagtttcttaaccattcagcctcagtttcctcatctataaaaaggaatgatagtaccacgtacaattgccagttaaatgcagtgtgtacattatctcatttagtcttcatgcaaaccttcaagactcaatcacaaagaaatgtccacacatttcttaacaaagaatacatatgctactacataccaactctcctttgtcagggaatccaatctagattggtttaaaataattataggaaagraattcagcagtgaaatatgtgactatattggatgcttgctatttgtcatttactgtatttctagcgcttgtgccaygtaagggctgatgaactcaaacmgtagctcagctttttgcatgytcttttttacccacctagagrtccagtgtttcctgtgatacttacctctaaactgctaaatagccacattttacggaagcatattcttcatacctttgctctaacttaaatctctaactttgcactatatttaatwtgggttttttggggggaaggggggagtggagttggttttttttgagacagagtctcgctgtctcgcccaggctggagtgcagtggcacaatctcagctcactgcaaactctgtctcctggattcaagcgattctcctgtctgagcctcccaagtacctgagattacaggcacgtgccaccacacccagctaatttttctatttttaatagagacggggtttcactttgttggccaggctggtctggaactcctgacctcccgtgatccgcccatctcagcctcccaaagtgctgggattacaggcgtgagccaccacrcctggctaatctgttcttcactttcttttctatactcactacaaaaaagggcaaggaagtcttcacagctgcacttactaacaccgtcacggctctgttttggccatcatctgtttattaactaaactctcttctctcccaactccaaatctttgtttcttctagattgagttctctccctgaagagcctaatccaacctggtccctgtaactgccctgataccttaggagatacctgggcttatttaacttctctctggccaccatgtctttttccagcctgagtcaaagtatattctttgctctaacctaattcttttaagaatgacmgagtaaaataagtaaaatttatatgaggagggagagggaggaggcaatcaagagaatgaatagtccctattcttgattaatccttattataactatgagttcaagggcaattatataatcttgttaaagcaccaggctaaaaacttgacatggaattgtaatttctgttgtgtatctaattactatgaaagcctagttctacctgtttcatcatttataaagggaattgcaacccccaccacgaccaacaaagtagtttcagagattgggagggactaagctagtcaatgtaaaccaagcttgtccagcccatggcccgcaggcctcagtgtggcccaggatggctttgaatgctgcccaacacaaattagtaaatttccttaaaacatgcacagatctttttttttttaaagctcatcarctattgttaatgtttgtgtattgtatgtgtggcccaagacaattcttcttccaatgtggccaagagaagccaaartattggaccacccctgagtaaacactgaaattaattaacttcttcccttttggattttaattacataagtaataataagctcattttttaatacttcacccattcctgtattgtttgaaacataaatcctttccccattcccaaaggtaacaacatattaacagtctgaatgtcattccargcttttctgcagtcattcaaacatatcactctttttctaatattaggaaaatcttcacacatacagaaagaactttacagtaaactcaccacctagatctaccattaacattttactctactagtttcatcacatttcatccatcaattggtcttgttcatttttgcatttcataataaactgcagacattagtatatttccacctaaatacttcatcattcataccattaatgattcagtcttggccgggtgcggtggctcacgcctgtaatcccagaactctgggaggccaaggcgggcagatcagcaggttaggagattgagaccatcatggctaacacggtgaaaccacgtctcttctaaaaatacaaaaaattagccgggcgtggtggcaggcacctgtagtcccagctactcrggaagctaaggcaggagaatggcatgaacctgggaggcggagcttgcagtgagctgagatcgcgccactgtactccagcctgggctacagagcaagactccgtctcattcataaataaataaataaataaaatgattcagtctttctttacagtttttttctgaagtaaatattacatgagacacamgtcttaaatgtacatttgctaagttttgataaatgtatacacctgtgtaaccccagccctatcaaagatacagaatattacctatcacccccagaaagttctctcctgccctgtccaagttaatctttatcccacccctccagaaataactactattctgatgtttttccaccagagatatcacaagatatcacatggttttrtgattcattgtgaaccacagatgtacaaatataggttaaattattggtcagaggccatactgatgttaagtgctttttgttgaaaggattcatrtttatgatgattttagttctatagtcactgcatcttagtcagattatttgactagtatggatggattttacaaacattttgtggaattctttttttaaccttagggaacctccacaaggagctcattttctttccagaagtctagatgatgccttaaaacttactgaacaaccagaattagcaaataaagtagacatggtctggatagttggtggcagttctgtttataaggtaagtgtagttgttggtaaataaaaacaaatgttctgttctactttcagcttccttgccatttaaaggaagtggaagaaacaggtataactcattgtctgaacctttaaaaaattaagccatgcrtataggaagcagcacattatctgtactgtaaattatttgttgttagttgaaattatttgttgtttgatactatacaaactaaatagaaatgcaaaaataaatattttagtctgtatcagccttttttatttattcatttatttttgagacagggtcttgctttgtcacccaggctagtgtgcagtggcactgtctcactgtagcctcgagctccaaggcccaagcaatcctcccacctttcctcccaagtagctgggattataggcacacaccatcgtgcccggctaatttttgtatattttgtagagtcaggattttgccatgttgcccaggccggtctygaactcctgggttcaggcaattcacctcccaatgtgctgggattacaggtgtgaaccaccacacccagcctatttatctttttaattggcaaataattgcatatatatatatattawgtacaacaygttgttttgaaatgtgtatacattgtagaatggctaaatggagctaattaacatgtattacccacttattttgtgtggtaagaacacttaaagtctactctcttagcaattttcaagaatacatttgttattaactaaaataatagatgttgtacaatagatctcttgaacttactcctcctatgtaactgaaattttgtatcctgtgaccaacatctccccaataccaatctactttcaaatcaaagaataattgatgtttccaatttaaaatccattctaaatcttttcctgagaattgtacttgcattgcactggtttctactccctgaatgtaccctagatacactgagttatgcctttgtctttcaggatgaatatatctcttactgagaaagggttggggctctcagttgatatacactaactagatgtatatgaatttattacaagtagaaaacttcttcaaccaatttttttttgttttgtttttgtttttttgagatggagtctcactctgtcaagactcagtcgcccaggctggagtgcagtgacacgatcttcggctcactgcaagctccacctgccagattgacgccattctcctgcctcagcctcctgagtagctgggactacaggcgcatgccaccacacctggctaatttttttgtatttttagtagagacggggtttcactgtgttagccaggatggtctcaatctcctgacctgctgatccacgcacctcggcctcccaaagtgttgggattacaggcgtgacccactgcgcccggccaatatacctcttttttaataccaaatgacttccagctttaaaatttttgaggataacaaatagaattctttgccttttaaaacaccaatgaaaaattaacatttatgaggaggaagaaaaatctagtttctgccatgtgggtggtcttgtggtaagatatatacagtgaaattattttagaaagaagaggtaggccgaygcctgtaatcccagcactttgggaggccraggcgggtggattgcttgaggtcaggatctaaaaaccagctgggccaagatggtgaaactccatctctcctaaaaatacaaaaattagttgtgtgtgggcgcgggcccctgtagtcccagctacttgggaggctgaggtgggaaaatcacttgaacatggggggcagaggttgcagtaagctgagatcgtgccactgcactccagcctgggtaacagagygagactctgtctcaaaaaaaaaaaaaaaaaaaaaaamctctcagtttcttgggctcctgtttctagaacctcttatkttccccatttgtaatagaagaaaagggacattttttcttgatatttttatccaagtatgaatttcttctaagaaaacaagttatttattttgttcagtgcctaccacactttgaatgattcattaccatagtcacttgaaaatgtattctttaagcaatataagtacgtaaatgcctttatataatatgataaatctacatatagataaataggaagtagaaccttcgaatggtatttttacacctgcctcacatcacaacagcttgtagatatcattcaggcttatcttcctatgggccaaatcggacctcccagcctgtttttgtaaagaaagtttcagtggaacacagmcccacccattcattcagttctgtctgtggcctgcaaaggtaggaaaccctatggccctcagagcctaaaatatttaccatcactccytttacagaaggtttgccttgtataatcaactttttttttctttttttttgagacggagtttcgctctttttgcccaggctggagygcaatggtgcagtcttggctcaccgcaacctccgcctcccgggttcaagtgattctcctgcctcagcctcccaagtagctgggattacaggcatgcgccaccacgcccagctaattttgtattttaagtagagayggagtttctccatgttggtcgggctggtctcaaactcctgacttcaggtgrtccacctgcctcggcctcccaaagtgctgggattacagacgtaagccactgcasccgacttataatcaactttaatgcagracttcaccaccacagtcaatctaataatccagacagctcctaagtgactaaggggcaggtaacatagacagcatgtgcaggacaaagggataattcacgccctaggcaggacagagcagaayggctcaagatttcttcacactacttagaacagcatgtcatttaaatcttatgaattatttctggaattttccagttaatattttcagaccacagttgaccatagataacaaactggraagtgaaactgcagataaggggggagtctgcattccactttttaaatttttggtacagtaagaattagtagagcatctatttggttgtagcaaagataataaatgatttaatataaaatgatatattgaaaataaaaagtgaaatttgttctgtacccttmkttggaattttaaaaataaacacttggatttgttgtgtgtgtgtgtgtgtgtgtgtgtgtatttttcttttctataaactatttgagatcaagaattactgctttgttagaattgcaattaagacatactttttatgaatgagaattttaatacactcattctagggcaactttttctgtagaaattatcaaccatattttaggcagtagttagaaaagtcatgtacaatataaagccaaatgttaatacaattgttagcaccaagaagcagaaaaattayctatctactagcattgtaattatcttstgagaattggaagcattacraaattttatgtatatgtattaagtatgctcttggggttttccatagtcaaggtctcattaaattgtactatcttattcatacaagtttatgtaaatttttctatggagagcaactagataatttggggctcttaactctaaacagccaaagggaaaacaataaaagagaatgcttaaattaaaaagttcttgtaagcaaactggaggccagactatatttaaactcagtctctcataattattgataatggttagtgtcattctcaatataactaaggcatactttgcagcaccccagatgaaagaatagtatattttaataatatgctttggcagcaccaagcatatttttaatacctagtataaacttaactaaacataaatcttagagtttctttgtcttttgacacacattaagaaaactgatgttgttttatttcaaaggaagccatgaatcacccaggccatcttaaactatttgtgacaaggatcatgcaagactttgaaagtgacacgttttttccagaaattgatttggagaaatataaacttctgccagagtaagtataaggttattaattagtctgaagcactttggatttcctgcttaagactatagaaaataacatgtcttttcagactacaaattgggttcactgtgtactgctaggatgatgggtgcaccaaaatctcacagatcactactaaagaacttactcatgtaaccaaatacaacctgttccccaaaaacctatggaaataataaattaaaaaaaaaaaaaaaaagcttggcacagtgactcatgcctgtaatcccagcactttgggaggtcgaggcaggggcagatcacctgaggtcaggagttcaagaccagcctggccaacatggtgaaaccccgtctctactaaaaatacaacaaattagctgggcatggtggtgcatgcctgtaatcccagctacttgggaggctcaggcaggagaactgcttgttcctgggaggcagaggtcgtagtaagccaagatcacgccattgcactccagcctgggcgacagagcaagaccgtctcaaaaacaaacaaamaaaaatattaagtattttaacacctgagcatgtgatgtctttccccttgtttaggtcctatttcgttcagcgatgttttatacctttcagtgttaatttcatacttatgtattctattccttttgatgctattgtaaatggtattttctttagtttcagactgtttattgctagttacagaaatgcaaatgatttttgtttattgatcttgtatcttgcaaccttgctgaactcatttgtaattctgtcaatagattccttaggwttttctctatacagtataatgtcatctgcaaatataggtttacttcttcctttttaatctggattttttctttgcctaattgccgtggctagacctgccagtacagtgttgactaaaagatagcaagagcagacttacttaycttgctcctaatcttagaggggaagcttttctctctcatcaagtgcgatttaagctgtgagtgcctttatcacattgaggaagatcccttctgtttccagtttayttagtattttttatcatgagagtattatacattttgtgacatgctttttctgagtctattgagatgatcatgtggtttttgtcttttatactaatattttaatgtactattaatatggtatatcacattgattttcatgttaarctaatgtttctgggataaattctacttggtaatggtatataatcctttttatatgttactgggcttaggttgctagtattttgttgaagatttttgcatttatattcagaagggatgatttatagttttttttgttttaatgccttcccctggttttgttatcaggataaaagtgacctcatagagtgagttargagatgttctcttcccttctgtttttttgaaagagtttgtgacagattgttagtacttcttaaatgtcttagaaaattttaatagtgaatcgattgagakaggaatayggaaattgctccaaagtggagattctaaacaaggctatgggagaaagcaaaaaactcttccattgcaacatttgatggtcatttgtactttcaggcatgtactaacataacatcataacagcctctttaatggaatggagggaattctctaacgggagacctagagtaagtcagtccttcattctatggagaaaaaggaaacctgtgaagataaagtgaatatactttgtccctggaaaacacattgctcagttctggagcggctttctctccagatctctgtgcgctggggaacttagatttgctttctactgtcyaaatataaactttggtcattctccacctcccctatccctttccccacagctactcacttagtttaagtcccgttgtctctatcagttaacctcttgtggttatataggtttctgttcaaacataaagtcttttattaacaccattcttcccgatttaaaaaataaacagactaatatagtgaaatacagatgaaagagagaacttgtgagacaagaagagaataaaattagaatgtggaaggagccayaagtgatgggagccagagcagacggtcatattaataaagtaaggtggttttactttgtgtctgccgtcagctctgtacgtcattgtgcagtcgatttttcaacagcactgtgccagcctatcctctagggctctgctctcattcatcttgcctggaagaaatctttctcagactatttcacactagaccccaaccaaaccagcaggcccagatattttatattggcagttttctacttaatgagccccaaacaggcttttacttctagttaacaatcttctgtgtgaccacatagtcaaagagaagacagattaaaagaggcctgtggaggcagtagttggctccagagctgggacagatgccccttatcagtggacaccttgaagtaggttttggatgggctgatgtttcttcttctgaccctaaaacttcctgtcaggatgctggcatactcgtccacatgactcggatatccctttgctcctgagcctgtgcttcctgtagagtcttgattttaattgtattttggttttttggtttattttttgtttttgagatggagtcttgctccgttgcccaggctggagtgcagtggcacgatcttggctcattgcaacctccacctcccaggttcagcgatkctcctgcctcagcctcccaagtagctgggattacaggcacgtgccgccatgcccagctaatttttgtatttttagtagagacagggtttcatcatgttggccaggcttgtctcgaactcctgacctcagatgatccgcccgcctcggcctcagcctcccagagtgctgggattggaggcatgagccaccgcacatggcccaaaaacttcttgatatgttgcttttgtcttatgaactgacaatcttgacacttgagaattttgcacaaaaaatgtatgtagatgttacttttcatgactcattccagagagactaaaattataatagaaaatggttaatagaaacattgcttcttcccctgaaatataaattattccagaaagtatctttttcttttccctataattttgttacattgtatctctgtttttgttttttttttaccaaaaatgcataatctctaattagtcagcaaaggttaatgtctattattactcagcaatgtattgaatatcatgagacttaaaagtttactgtgttgtccctgcctacaatgagtttaaaaaatagagaaacgaggcgggcggatcacgaggtcaggagatcgagaacatcctggctaacacrgtgaaaccmcgtctctwctaaaaatacaaaaaattagctggatgtggtggcgggtacctgtagtcccagctactcgggaggctgaggcaggagaatggcatgaacccaggaggcggagcttgcagtgagccaagattgcaccactgaactctagcctgggctacagagcgagactccgtctcaaaaaaaaaaaaaaaaaaagagaaatgaaacaaaccaataatactagtaggcaccatttatagaacacttgatrtgttaggcacratgctacattcttttttggttttgggggatgggggcggagtcctgctctgtcactgaagctggagtgcagtggcgccatcttggctcactgcaacctctgcctcccaggttcaagcaattatcctgcctcagcctcctgagtagctgggattacaggcacccgccaccatgcccgggtaatttttgtatttttattagagacaaggtttccccatgttggccaggctggtttcgaactcctgacctcaagtgatccactcaccttggccttccaaagtgctgggattacaggcgtgagccactgcacctggccaacaatgctacattttttacaaggatgaagactttattgacagccaggctcggaggcatgtcacacagcagaaccagagtgaagcacagtctgattcaagcaggcgttcctgaccacctggagcatactggggtgcagcctgcatagtactgaagaagtaaccaaagattggggttcattggaggctggaakggtcagaagattcctcagtggagaagctgggtttggaaggggagctggagagaacacaggcttaagtgagagttagggaacaggaatagcagatcctaataaaggaattacaatctgccacacattgtggaattagggcagtatagtctccatcaatcaaacagaagcagagaacctgtcactgtccagggcacataatttcagttatgttctaaacagcttcagattgtatttttgtcttttgcttacacaagaaatgtgataccaaatgtaagtcttgcaaaaaattcttaagaaatttcctrttagctgggtgatagagtggaaagatacaagggaaactgctgactggtttttgagagaatgaggaatccaaaggaaacaaaaaaggagaaattacactttttgttttctaactttctatatagtttacagtttttttcttaccatttgcatatgtagtatactagcatgatatttatccaacttgacagtggcttaccattgtgaagaaaaaagggaaacyttttatttgctttatgcactattgatgcatttaaactgagaatcagggaagctgtgtttttaatggacacataatttaattatatattttttcttacagatacccaggtgttctctctgatgtccaggaggagaaaggcattaagtacaaatttgaagtatatgagaagaatgattaatatgaaggtgttttctagtttaagttgttccccctccctctgaaaaaagtatgtatttttacattagaaaaggttttttgttgactttagatctataattatttctaagcaactwgtttttattccccactactcttgtctctatcagataccatttatgagacattcttgctataactaagtgcttctccaagaccccaactgagtccccagcacctgctayagtgagctgccattccacacccatcacatgtggcactcttgccagtccttgacattgtcgggcttttcacatgttggtaatatttattaaagatgaagatccacatacccttcaactgagcagtttcactagtggaaataccaaaagmttcctacgtgtatatccagaggtttgtagataaatgttgccaccttgtttgtaacagtgraaaattgaaaacaacctggaagtccagtgatgggaaaatgagtatgtttctgtcttagattggggaacccaaagcagattgcaagactgaaatttcagtgaaagcagtgtatttgctaggtcataccagaaatcatcaattgaggtayggagaaactgaactgagaaggtaagaaaagcaatttaaagtcagcgagcaggttctcattgataacaagctccatactgctgagatacagggaaatggagrggggaaagctggagtattgatcccrcccccctccttggttgtcagctccctgtcctgtgtgtgggcggaacatagtccagctgctctatagcaagtctcaggtgtttgcagtaagaagctgctggcatgcacgggaacagtgaatgccaaasacttaaagcaattcgatgtttaagtatgtaagttcttttttttttagacagcgtttcgctcttgttgcccaggctagcatgcaatggtgtgacctcggcttactgcaacctccgccttcccagattcaagcgattctcctgcctcaggctcccaagtagctaggaccaggtgcgcgccaccacgcccggctaatttttgtattttgtrtttttagtagagatggggtttcrccatgttggtcaggctrgtctcgaactcgtgaccgcaagcgattcacccacctcrgcctcccaaagtgctgggattrccggcttgagccaccacacccggcacatcttcattctttttatgtagtaaaaagtataaggccacacatggtttatttgaagtattttataatttaaaaaaatacagaagcaggaaaaccaattataagttcaagtgagggatgatggttgcttgaaccaaagggttgcatgtagtaagaaattgtgatttaagatatattttaaagttataagtagcaggatattctgatggagtttgactttggttttgggcccasggagtttcagatgcctttgagaaatgaatgaagtagagagaaaataaaagaaaaacyagccaggcacagtggctcacacctgtaatcccagcgctttgggaggctaaggcaggcagatcacttgagaccagcttgggcaacatggcaaagccccatctctacaaaaaacacaaaaattagctgggcattgtggcgcacacctgtattcccatctastcaggaagctgagatkgaagaattaattgagcccacgagttcaaggctgcagtgagtcgtgattgtgccactgcactccagccggggtgacagaagagaccttgtctcgaaaaggaatctgaaaacaatggaaccatgccttcataattctrgaaagttattttcaactgataaatctatattcacccaaataatcaagggtgaaggtaaaataatacatttttagacaagcaaagactcaggggttacctccatgtgccctttttagggaagctgttggagaaaatactccagcaaaatgaaggagtacacaaaccagagaatgacatgaatccagcaaataggatccaacacaggcaatattccagctatggagctagctttaaaaaggaacagtaaaaatattaatcggttagctgggtggaatggcccatgcctgtagtcccagctactcaggaggctcagcagcaggrcgacttgagcccaagagttccagaccagcctggccaycttagtgagatcccttctcttaaaaataataacttattgccagatttggggcatttggaaakaagttcattgaagataaagcaaaagtaaaaaaaaaaaaaaaaaaacaaggggaaagggttggttaggcaatcattctagggcagaaagaagtacaggataggaagagcataatacactgtttttctcaacaaggagcagtatgtacacagtcataatgatgtgactgcttagcccctaaatatggtaactactctgggacaatatgggaggaaaagtgaagattgtgatggtgtaagagctaaatcctcatctgtcatatccagaaatcactatataatayataataatgaaatgactaagttatgtgaggaaaaaaacagaagacattgctaaaagagttaaaagtcattgctctggagaattaggagkgatggggcaggggactgttaggatgcattataaactgaaaagcctttttaaaattttatgtattaatatatgcattcacttgaaaaactaaaaaaaaacaataatttggaaaaacccatgaaggtaactaacggaaggaaaaactaagagaatgaaaagtatttgcctctggaaagaacaactggcaggactgttgttttcattgtaagacttttggagccatttaattgtacttaaccattttcatctatttctttartaagaacaattccatcttaataaagagttacacttgttaataagtgctggcctcctgttgttctttgtacaccccacacaaaatttcaaagaaactttgatggcaatatatctccatggtcagcttaaaaatagagaaaggaaaacatagaattagccaagagtcacacaaaacaaagatcagttgtttgttaggaaacaatcaaaatcaagtctcactttttccagattggcttatggaacagcactgtaaggtgataacttggggcaaacatgtaaataataaaacatatgttttaaatattcaggttagcacattttatgtttctgtgagattaaaattgtgtgtgacatacccgcttccttaaaggcaatgtttctgaaaatgttgtacctgctattcctgaatcagggatgggtcccagaatctgccttttaaacatctcagataatctgaagcctgcttaagtttgtaaggcactgcttttgcactctaaggaagaaaaaaacaagttttaattcccgtctctagaacatctcagtgaagcaaaacaggaaagcaaattataagttagtatatgtaagatttcagaaggcaaagttgtaaagattagatttccttagcctgggaacatggcaaaaccacgtctctacaaaaaataccaaaaaaattagctgcgtatggtggtgtgtgcctgtaggcccagctacttgggaggctgaggtaggaggatcacttgagcccaggaggtggaggctgcagtaaaccaaaatcgtgtcatcactccagcagcctgggtgacagaccaaaaccctgtcacaaaaagatttccttgttgctgatctgttttaagaacaagacgttcttaaatgtgtaatgcaaatacatataaaactatttaatatcagtaactccaagagaacgagtaaacaaactagatttcccttagcaagatgcttttcttacacaggtagtaaactaaaaactgtaaagttaatggcctaattaggcaacatgactgtgaggaaaagattggctggccagccgttgaaaggattcagacaaacagttatctatgaaagattgaaccttgtaattaaaaatgttccagcggggagaaagaaaagaagtgcatgattaaatgactaatgggaatagaattagagactctataaggagaatactttttgtttttgagagtctcactctgtcgcccagcctggaatgtagtgatggcagtctcgactcactgcaacctctgcctcctaggttcaagcaattctgcctcagcctccctgtagttgggattacaggtgtgtgccatcaagcctagctaattttttttgttttttgttttttttttgagacagtctccctctgtcgcccaggctggcgtgcagtggcgcaatcttggctcacggcaacctccgactccagggttcaagcgattctcctgcctcagcccccaattagctgggattacaggcccccaccaccacgccgggctaatttttgtatttttagtagagacaaggtttcaccatgttgcccaggctggtcctcaagtgtcacccaggctgcagtgcagtggcacaatcttggcccactgcaacctctgcctcccgggttcaagcagttcaccctcagcctccccaatagttgggattacaggtgtgtaccaccacccccagctaatttttgtatttttagtagagacaggtttttgccatgttggccaagctggtctcaaactcctgacctcaagtgatccacccacctcggcctcccaaagtgctggggttacaggcctgagccaccacgcttggccaatttttgtatttttagtagagacagggtttcaccatgttggccaggctggtctcaaatgatcaactgctggtctcaaatgatcaactcctggcctcaagtgatctgcctgcctctgcctcccaaagtgttggaattacaggcatgagctactgcacctggcccaagatattattacaggcccccgccatcacagggataaaggggaataaagcccctggccaaacagaagaaagaaggcctataaaccacatgaagtgctgttcctgttacccgggggaattactttaatgaccgtttctaatcatctgctcctgtcctttctgttccccagctgacctcatgtgtaccaggaagttactctgtaaatacagtgacatttctgttgaaactttttcttaaaaaaaaaaaaaaagatgatctaatacacattggttgtgctagatattttctaatatacgtcctatgttatgtatgatttttctaaattgttgaaagtctaaatcagtcaagaataaaatttagaattgtcgtctactttagcctagagaggccctaactaaatgactaacagcactaatgacaaacgcctaatacgggcatagagttttgtctgcaaggaggaaaagacttcatggtgctggaggtcaggaaaacctggggggaatgagagatttttttcagcacctaccagctaaagtaattagggaaagggatcctgaattagactgcctctttttcagtgcctagtcatgttcccctccaaaaggccagagacaaggagttaggaggcttctagttgacctgattcactgtccacaggttgacttctcactgccagttgtctttacttttgatatgtgaattggcaaaacttagactagggattcctccccctcccccaccatgccatacccctcaacattttataatgactaattcaagcacacggaaaggttgacagaattgtacagtaagcacccatttacctatcacctagatcctatcattaacactgctatctctgctttatcacatatggagccatccatctatccatcctatattttgacgcattttaaagttacagatatcactattcttcatgcctacattcttcagcttgcctattaactatagttcacttttttggtaaaatttacataatgaaatgcagatcttaaggataacatcctacaggttttgataatggcatatacctttctataacccaatctcttatcaccctagaaaactccctcttacccctttccagtcagtcctcaaccccaacccccagaggtaaccactattttttttttctcattatagattagtttttcctgtttctgaacttcatatgaatagaatcatataggatgcactcttttgatctggcttattgcagcatgatttgagtttcacccaagttgttccatgtatcagtggtttgttcctttttattactacgtagtgttaaaagataagtcaagtcctattaaatgttttaaagggtttgagcaaacagcaattcacaaattgggcagctccaaaccaagagtggttcagggctctaccaagagaatgcaaggaaaaggcttttgtaacttggaagcaaggcaaagaaaataatggcttggttatgactgtgtagttgccttatttggtctcccccccgccaagtcccttgttatataagtcagttggtggctactgattgaacttaaacttcattttgctttaatgcaggtatttacaaaaaaaaaaaaatagtccaagttaagtttagcttatcaaggtcaagtttgtgtccaaggcttaactggctttgtctgctgaagagatttacagtcctggtccccattttctcttattctaacggtaatattccattgtacagatgtgccagtttatccattcttctcttgattttaaggtgggactcaagactggccttgaagaggctagaaaagcaatgactaagggtcaggacaagaacaaatacatattccaggcagagggaaagccatgaagaaacttcatctccagattctaaaacccaggacaagcccttagcaagggtgggtgagttgttattaggcctatattagtccgttttcacactgctatgaacaactgcctgagacttggtaacttataaagaaaatagtgttttttttgtttttgtttgtttttttgtttgtttgttttgagttggagtgttgctctgtcacccagcctggagcgcagtggcgcgatctcagctcactgcaagctctgcctcccaggttcacgccattctcctgcctcagcctcccaagtagctgggactacaggtgcccgccaccatgccaggctaattttttttgtatttttagtagagacggggtttcaccatgttagccaggatggtctcgatttcctgacctcatgatccacctgcctcggcctcccaaagtgctgggattacaggcgtgagccaccgtgcccggccagaaaagaggtttaactgacttacagttctgcatggtttggaaggcttcaggaaacttataatcatggcagaagaggaagcaggcatgtcttacatggcacaggcaagagagaagagagcaaaaggggaagagccccttataaaaccaccagatcttgtgagaacttgctccctatcatgagaacagcatggaggaaaccacctccacaatccaatcacctcccaccaggtccctccctcgacaggtggggattacaattcaaattacaatttgagatgagatttgggtggagacatagccaaaccttatccaggccccacctccaccaagtactccacctttgctgtgcctttcaatctgttctctttcataaccgcatctagttcatgtctttttgtctcttacttagacggctggagaaaactaaactgatagtttctcaatctctgatctccgtctccaacagtctctcataaacatggccacaaagacaatctttatttatttattttttttttttgaaatggagtctcactctgtcgcctaggctggagtgcaatggcgtgatcttggctcactgcaacctccacctcctgggttcaagcaattctcctgcctcagccttccgagtagctgggattacaggtgcctgccaccatgcctgggtaattttttgcatttttagtagagatggggtttcatgatgttggccagactggtctcgaacacttgacctcaagtgatccacctgcgtcgggctcccaaagtgctgggattataggcgtaagccaccgtgcctggcccaagacaatctttctgaacagcatctctgattatatcactttctttcttgcctccttaatgctcccccggctaaggcgaaaccccactttggtctttaaggccctctacagtggcattaaccaaactctccagatttaccatctaccattttcactccctacatgttgtacacaagctacctcggctcttcacaaatccccagacagaccccagctttgccactcccatgctcttctttatgccactctctctgcctataattcctccctcctcacatcctccaatgcaaatcctacctgttcctcaaagcccaacccaaatcccaaattgaacctgtcatgaagcctgccttctcaccctcttctgaaccatgcagcactacctatttcagcccttaaatactgtttttccttacagctgtttgttattctcatctcctctcctttatcaatgaggaatgttttcagctgcgagtgctagaaaatctaacttacagtaactaaaacaaattgggattttgctgactctgattgattgattgattgattgattgattttgccctcaaaaaatcaaaccaaacttggcattgcaagatggctgctactgctccagagagcaggcccatgttcacagtaggaagaagaaatatagtgtcaggcacatatttcctttttgtctagaaagcaaaacttgcctcaaatcctccttccccaagcaaactctccccttatatttcagcggctagaactggggcacgtggccactcctcgctgcaaggcaggctaagaatgtggaacaaggattgtagtcactgactcattcacatcagtggttcttaaccctggctgcacacagaaccagagggattcttcaacgtctggcttcacccccagagagtctaattctaatttatgc

SEQ ID NO: 93776 - DNA, 29843 bp, Homo sapiens
ttcctgaaattggggaaaaccgtgagatgaaccaatgtgttggtgttcaggaattgagactgggaaagttcaagatgcctttcacatctccaggtggatatgaatctgacattcagggcagaggtacaaaatggagatttaatttgtgaatcatcagcacgtaggttgcattggaacccttgagccaggatgagattactgagggagtaaatttagattaaaaatgggagtgatccatagactacatcctgggcaacttcaaaatttgccacacacaagataattatgaagaaccagaaaagtagactgaataggagcagccagagaagtagaaggaaaataaaatatgttggtgttctgcaatgtatgtgaaagaagccttgcaagtgaatcaactagaagtggacacatgcacacgtatgtttattgcggcattattcacaatagcaaagacttggaaccaacccaaatgtccaacaatgatagactggattaagaaaatgtggcacatatacaccatggaatactatgcagccataaaaaatgatgagttcatgtcctttgtagggacatggatgaaactggaaaccatcattctcagtaaactatcgcaagaacaaaaaaccaaacaccgcatattctcactcacaggtgggaattgaacaatgagatcacatggacacaggaaggggaatatcacactctggggactgtggtggggtggggggaggggggagggatagcattgggagatatacctaatgctagatgacgagttaatgggtgcagcgcaccagcatggcacatgtatacatatgtaactaacctgcacaatgtgcacatgtaccctaaaacttaaagtataataaaaaaaaaaaaaaagaagtggacacattatatggaataacagaaactccagagatgctcatgactacccttcaaaacaacattgtatgtctaggattacatatccattctcttgaataaatacccagaaacctcagtggaactttttgtagcaaatttggtagaacagggagtagaaaaaaaaggtatgcaattagacgaaaatctctgaacaacttccttaggatagatctatacagatttctcatagaatccatatcccaaaaagcaatattagtattcatcagagacgaggaagccattaattactataaaagaaacacaaaactagcacctaaagtgacagaattctctcactttatgaaaataatgaggaaatattgtcagttgaagtggaatctctctatcacttgcacagtccaacgtttcttttcttttctttttacatgctggtaggagtatatattcgtatagcattttggaaaggcaatgtgacattaaaacacacaatttatatgacttttcagcaatttctttccagaatcaaccccaaagaaactgaaatagtcaaatgaaataaccatccataacagagaatagttggtgtggtgtgtatgtgtgtgtgtgtgtaggtatgtgtgtgtgtgtgtgcgtgtgtgtatatatatatgatggaatactacacagccactaaaaaggaatgaattggctgcgcatggtggctcacacctgcaatcccagcaccccaggaggccgaggcgggcagaccacctgaagtcaggagcttgagacaaggccagccaacacggtaaaaccccatctccaccaaaaacacaaaaatcagccaggtgcaatcatgcccgcaatcccagtccaacatttctattacatttggaatgcctcttgtaatccctatagtgtacatttcattacagttattttataacacttcaagttgaaggcaatgatgggaagtcttaaccaagttcataattactagttatccagcatattttaggtatttaaaactttttgtagaatgcataaatgagtggtaggttttgcaggtactgagaaaaaatacactgaatgaagatgcaatgtgttcttcaagaaaagtataagaaaaatggaagtctgcataacccaataatgggaacagacaatggtaggatctatctagaaaataagctgcataacctcagaatagctagaaatattttctttcatctctaagcagctactatatttaactaaaatattttcactgttattatttttgtaccacactaattgctaaatacatccctgttcttagacagaagaagtgccttgcttttcaaaatgacagtttgagatatagcagaatcctcatttaagtttctcacggcaaatggagttctttgttgtccttcagctgaaagaatcaatgtaattttaaaaaatgatttgttgcccactatgtgcaaagcactgttccagggacaaccacaagcaaagcacaatatttatcctcaaagaactcgtagtttgtgagtaaaaaggcacaagtgatgcttgagaaatgccctatgacagatatacataaaaggttttgagatgtataagataaggaatccatcaggtctgagaggatccagagagtttcatcctttaaagtaggcattggaaatggattttgaatgatttattttctaggcaagcaagaatcagacaggtgttccagagataaggaagtgtctgaataaaggcatagacacaagtttctgatattaaagagaataaatagtatagtgaatggctggaggaaaagagggagaaaatcagaggatgagaggcaaaaataaggagatttatttcttcatttaaaatggaaatgaaagaaaataaatgttcaatatttgatgtatatttattttatgtataagaaaatttaaaatgttcaatatttaatgtatatttcttttatgcattactgctcagctaaaatgagtaagtgaagtgaagaagaataccatgctcagtagacacacccagaccaagtcttagggttttgtttaaaggttgaagtttgtagttttgagatacccagaagttccaggcctccagaaaaccagtatttaatctacttttccctactattcagactcaaatgctaaaccaacgtgagcaaaagaaggaaggatcatatgatgagctgaaatatacaggaacaatgacagaatagataataagaggaagtctgagcagaaatgaaacttagaaaccagaaaagtatacactgaacacatgctaaatttataattacagctattcaaaacactcgaggataagttgtcaagttaaggacacacaaaaataagaggtatatttcactgtgatcttttaacattcaacattcaaaatttttccaaatggcacagattttgtttctcaaggttttatcattgttagtaacatttttacattttcactgataaaaatgaaatatgaaataatttaggaaagagaatcaaagagcagtgacctaaatatacactatactgattcttacacttcctttttataaagctactgtgactaacatccatttctctatcttatctgataaaacaaatcctttgtacattgtgagatttttataaaaatatataacttaattctcagtttatcactgaaacttaaataataataaaataacaccaataatatacaataagtaataatactgataaattgtgtttcttatatactaacacatagaaaccatcaacattgccatttaattaacttagaaataaaaagtgacgtataagtgctcaaattagaaggaaatcttattttttttttacttctaggtatataaatatacaaaataaagtagaatataataaatagtaaggccagaacaagtagtaccaaataaatggtataggaaaaacgctaggtgtttaaaatgttaattccaatcaaggagacttagattaagtcaaatttcactttgttttgatatttttcctattaattattcaagcacacagcatttaaattgattcatatatttaataattttacacagagtgaaatgtcaattggtattctttgttttcttccatattttttattaggaaaagaagagaaacctggaagaaaattttcctggaaagaaagagagcattgttcagcagcaagaacactgaccatgagaacaattcttctactcagaagccacctgaccttgggcctgtcactcaggttttctgagccacagttccctgaccactcgtcttgcttattttataggggctttagtttctttactgataaaattgctgtgctttgtaataataacacctatgtaagaatcaaattagttaaatatggaaatatgcataattgtaaagtatcatacccagtttctggaacctagctgatattttattagtgaatagaaggagaaaagcttgtcccattgatgctcagtaatacaaaacatttaaagaataaattcaaaatcttggctataatagaattttttaaagtgttattatccttcaatgtttgagtttgtaagtgaaaagtcacattaggaatcagctttgattaaaacaaaggaataactcttatagcaagtaaaccatttgtatgataataatccattggatatataataaagttcaaattctccagccaggcttttacctctatctactgctacactatctacctctcctcaactttactttctcatttgttttgcaatttagattgtaaaagtgtgttcagtatggttttatctctgcagaggctgtggcagttcaaacccacataagtttgggactgtgattacttcttttttttttttttccatccagagtccagattgagatgagaagcttcttctttgtcatctttctctgcttctgggtagatttttctatccctccttttcactgagagagtaattttttgagggtcaggagaggatgaaattcattctaagtctccattttgggttattcccaaaggctttttcctctctaggacttcttcctgttaagccaccttgtatctttttgtctggagggatcatacaagagttgtgcttgttcgaaaatcggtttatcccagttacaccaggtatttaattacgcaatacaaattaagtactttataagctgattaaatgtgacttcaaaaaaaaaaaaaaaagtaaaagtgatcctgtggaaaagtttttccttttgaaaatatttgctgaaaatgcacacataatgtaggcatgcagatatggatgagacaacttgaaaagattaggagaaaataatcattaaagccttaaaagatttagtgcccagattgttttacaattgtctttaaatccagacaccttattaaagaaaatgaacctggcacttacatatgaggcaatagaggtatagtttatgaaagcaataatacgtgaaaccccaatctgcaaatcgtatcggggggaaagccttattctaagtcaacagattagcttttcacttcaaataaaaattttagatacatataaatgatactttgtggttcttctctgtgaccaatattctgatttgtccaattgctactggatcgaatcaaatcaagtatgatggattttattgtattatcttaggacaatactcaccacaaacactgaataatataaaatgcatgtttaaattattttaacttaatcccaaaacctacagttatagtctatttctatcatgattactactactaaaattactaattgtttagtcaccatagtaagatcttcctggaacttcaacctacagcattacttaagagcagcacaatgcccaaaagaaatctttttattccagtcacctgagaccttgggggaaaaaaatccttagtccaccatctatgcacaaagctagggaatctctttcctaacaaaagattaacacgttttctccaagcagataactgaatcactagaaacaaataaagaaaaagacctgaaacaaagtactgcaggtacaaagagcaaagatcttgttacttaaaagaaaaactcagtaaacatgtcaatgtttcttggaagattagggaaaccaacattcttaaaaggtctcttattcattatttataagtagatgcaacacctcatttatayctccttatctcatacagaagagctaagattggcagaaatggtaagttctcaatttatgcacattggtttaacttgtttttctagattccaccttgggctttccttrggacccagctatccagcccaataaagccagtttgaaacagctgcatttggaacttgctgttgacacaataatctgagttatatgttaatttctaaaagaataaatgaacccattacttcccagatttcacagaagccacttgcttggagcagactaccatgacaagccagtctcaggggatccaccagcttcttcaggcagaaaaacgggccaaggacaagctagaggaagccaagaagagtaagtctcacctgtgaggggtctgtcacgaaataaacaaagcagtggaatgcagggataagcatagacttttggattaggcagaccttgtttcaaactttggtttactgtactccctgtgagaccttcacccattcattaaaattacccagccatatgttccttatttctagagcagggatgaagtttcctcattcagatccttttgagaggtcatgtgttcatggacattaagattatagagatgtgggcttaagccttggctatgccatgcctgttttctcaacattgttagggggtagaaaacctctggattgaatctacttattagtgagtaaacctgagcaaattacttattttttataagcatcagttttcatttccataaaatcagaataataatggctcattctcatccctctcttggtagctttttaacatctaatattttaaaatattttcattttattctcattttctacctctctttttatttttattaatttattttttaagagatgagggtctcactatgttgccctggctgaactccaactcctggactcaagagatcctgctgcctcagcctgccaagtagctgggactacaggcacttgccactgtactcagctctcttttcatttggtcatgcattcatgtacttacatatagaatgtcctcaatgaacttcaacaccttttctattctctttgatacaacagccaaatgaataggatattaacattattcccaatgtatgcagaaatggagtcactgatttgttcaaggttatattttaaaaatagaaaatattgtgccaggcaccatgctcattgcttatctttattcctcacaacctttactgaaaaagcaaaagtgatgcttagagaaattatacaacttgtctaaggtcacacagagggtaaatggtagagacaagatttagatgagctataatttccaagcccagatcttaaccactgtgctttacaaaatttacacaatttgcataataaaaaaattaatatgtctcagatctacaactggaattcagattcccaaggccaagacatttttttcactatcccatttcatatcacctcattattcaatctacaataatttgtagtgtcattcactctccttgtgtgtcctgcctctgcaattagattcagtctggcaaaacaggggccatattttcaaaatgttacttatgtaactctttggatgaatgtagtgatgggattggagtaggtactgaattatttaaacgtaatgaatgaaatgaaggaatatattacaacataagaaagtcagtcagaaataaggcaggtacactaaagttttcaaccacaggtaaaatcatttccttttcttaagataaatagatttcctgaacactcagcaatgtgggcatcaacaacataaaaggaatgactccaggtggagatgatagaagaggaaaggaagaagaaagatagtgaaggcaaactttacctatttctcaatttctttttctacaacgaagtgtggaaatagttgcaagatgatatgaatgtagagtagttttatagaaaacaaagcagttcaggacctgtggttgaagcggcatagagaattttccctttttaaaaatttcagggttttcttttcttcttcttctttttttttttttttgagacagggtctgcttctgttcccaggctgaaatgcagatgatctgggctccttgccacctccatctctcaggctcaagccatacctcagcctctagagtagctgggaccacagacacacgccaccacacccggccaatttttgtatttttgtagagacggggtttcgccatgttgttcagctggtctcaaactcctgagctcaagagatccacctgcctctgcctcccaaattactgcaattacaggagtgagctactgtgccaggcctttttaaaaacttctttaacaatatttaaaactttcagaacagaagaccagataatttaaagatgtgatagttatgttgcctttgctttctcattatggaggatacaaaatgaaatattgagtatagattaatcaatattattgtatgactcaaataatttttaccaactatttctccttttttcgagtcattaaagaataaaagaattgctatacatgcaagctgttttggggtgggagccgctaagggcaacctggcttcaaatttcagaataaagataaaagtccaatttcttttgcttttctctagtgaatatgctgtccttgggcaatctttcctcagaattcagtattgaaaagtacataytgtcttatttctatacaaaaatgttcatttcatttgccagtaacttaaaatacctgcatatttttttcttaatctaccatgtctttgttcatgaatattcaaggggatattcaaccagtaatagtaaatacccaggctttaaagacattctggaaaatattttgactttcaacaactaacctctgcactcagttttatggagaatgtcagcctgtcctctttgcctcagaagccacaggcgttgaggtcagttttaactggatagaaactgttttcttaaagctatcagcaggtattaaagtttatagttacaacagcttactcacataagcgatctatggcaaaatagaaatattaccttatataccagtatgttataacttccctaatgtttcagtggtttttgtttcatttatttaattcaataagtgtttattgggtatctactaattccaggccactttgatgtttacactgataaataagacctagttcttccttaaagaacttcccagtgagataaatgcacaaatgactattttaaaaagggaaaggaggcatgatgacaggagaggtaaagatagttatcattttagtaaacccatatacttttgctttattttttcatacaaagattcatttgaaattctgacatattaaggcagaatgatattcagaatgaggaccaagaagtcacaatagtgaacaccattgtagaaggtctatggtcattttctctttcttaaatccatttatttgcaagactctcagaaacttgggcataaagtgctagaacaagactcttgagtgtattatttttaagaaaaagaaagacaggaagaaggaagggcgagaaagagggaaagagaaagaaaacagcaattcacatgttaatcatttcaggaaaatacaagattaatatggttatttttatattatgctgaaaaaatattaatatattccattaaggagaacagcctcagatcctggtgcagttgctacatgatacagtatatggtctaagtgttttgcctttagggatactgataagggattatgaacctgatgtatcaagaactctccagaaggccacgcggtctatagaaattgaatatgcaagtctctgctctcaagacatccaccagctactgagagagatgaaatctgacagggacatgggcaggaatgtggacaggcttcggaagtcagactgggaagtagtagagtataaaagcattggcttgagttgaaaacctacaattcttaatgtcatttaacatctccaagtttcagactttctttctgtaaataaaaatagaagttataatacacgcacacacacacacatatgaccaagaggttgtaagaatcagaaaaatatgtgtaagatagtaaagcaaaatacacactagagttatttttatttttaatatatgtcatgtatttttgtatgttactgtaagtaataatgatagaagaatgatatagactagaatgatctcattccatttgtttttacccctgctgtaagttctgcatctacttttcctaaaacraagagactgggactgcttctggtaagatgactagaaatgttcagatactttcctgtattcactgattacaggttatatttattagttaaagctctcactcatttttatgtgcaaaactgccttactattttggttgaatttagatgaaatcacagtagtttgcactactttaaattatcttacctagattcaatgctctttacttaataaattgttcattaatcaaaacataaaagtgggtgtgttggtccaagacaagttacctaaacatcagagatctgccmtggagctccaggtttggggtattgaactgaaacttcaatcagaattagattagaaattcaaagtaccattatcaacaggaggaacagagacttgtgtttctctgaaatatgttgcatttttacttttagtcatgaccttttttaagagaagtatttacttcacttacacccattgcaaacttttaaaaccctatagctctgcattaacattgttctgaaatactcaaatgcatgcaattcaacatcacataaagaactcatattcccaaatcatttctgaacatacatggcatactctcctagaaataaacactcaatttatttactttggaagctgcagaaagtagcatttgtgcttaactaaaaattacaaattgcattacaggatatagattgaaagaaatagcaaaaaaaaatgtaaattttctaatctggatatgagaaaaatggaacaaatagctatattaaaaatgtctaaaagctacagacaattgtaatacaagtgaagaacacactgctctagctttctcccaaaatagtatggtcagtactcaccccctacagctgctctgcctggatgccagtctaacttctgcttcttattagctgtgtgaccttgggtgggttacctcttaaccttgctgtgcctgtttcctcagcctcaaaatggagatactaacagtacctacctcatggagttgtcatgattaactgagttaactcttataaaagacttaaaacaccacttggcatatagaaggtgctcaagaaattttagctgttaatattattttaatatccaataaaaagaattttgttgcaaaaacagcaaaaaagtcctggagatttcttaagcatggtccactatgaggcaaaatacatacttaagaaaatatttctgcattctagataatacatcagataatactgtaattcagatttatttttgtgagtctataggatgccaaccatcaataatttttttaaatcagcaaatttcctatttgcttccaaatatgcatatattctgaattatttaaacaagcacctcaatttaataaattcttcactatgcaagtggatgtttttgttcataaagacaagacttttaataaactaataaaataaaagttgttatataagaatttcatggccctgtcttgcatgttttgtaggcttgtaaatacttcctcttcctttatagtccacagactaacagggtatttgtaagtgtattgggctttcatttcttcaggtgggtaatattaaaataataaccacagagcattttcatctattaatagcatttggttatattcagtccaggagctacacaaaactatttattgtatttttaataaggaaaatacaagtagaagaaaagcaaaagaaaacattcaggaagcagagatytgacaggaaataaatttagtgtaagagaagctctagcagtgacagtcaccaaaggagaggctgcctctttgtttttctggtgacatttctttcccaatgtttgtagtcactgggaaaaataatagcattctttgaatcaggttggttttatcacaatattgacaatcgcccaaagccaagaagttttgtttggtttggttttgctttgttttctgagtggtagaatagatcaaaagttgttattactaacagaaatcttcaaacattaccaaagtaccctttgtttatacagcaaataaaaatggcttctgaactgtttatgcatatttttgtcaggtggcacattcatttcaatacctactattttcaccacactagggtatctggctttgtctccaatgctcaactagcattgttttctctatgctccttgctgattctctgcatttgtttcctagagacgctgtaacaaattaccatatactaggtggctttaaacagaaattgattatctcaccattctggaggccagaagtccaaacagarggtgccagcagggttggatccttctggaagcaccgagggagaaacccccatgcctccttcctggtcactggtggtagccagccatccttggcactccttgtctcgcagctgcatcattttaatgtatacctccatcaatacatggccttcctccctgtgtgtctgctctgactctgtgcctctgtattcaaatttcccttataagagaaccagttgttggatttaggacctgtcttaatcccttatacctcattttaacctgattacatctgcaaagaccctatttccaagtaaggttacatcagaggtaccaggagttaggactccaacatatgttttckgggggcacaattaaatcctctagctgtcaaatccacttgaccaccttgagcccttattttattttctttgttcccctttgttggttaaaacttctcagagaagttgcctatgttccctgtgtctacaatgtttcattccattttctattgaacacttcttcctataactccaccaatagttcctcttgcccagatcaccagtcttgctaaacccaatattaattcaatatctcattcataattagatccctctttcctctttgaaactctttcttcatttgactttggaacactactctcatggttggcttcctgttgtcttctcaatccttaaagtcggaccccaatttggacctgttctcttggttatcagcagatacttctgaggtgctctcatctgatctcatggctttacagaccagcttcaagttgatgactcccaaacttgatattcccagcactcgttgcttccctgatctctaagttcatataaacaccagctgtctcagcatcactattggatgttgaataggcatatcaacraaattgcagtattgactccatccccaaaataaaatgttggtgccatcattgactcatatctgtctctcatgctcatgtatcaattccacctccaaaatatatctaccctcttcttgctaactccactactactttaccatttccagcaattattaaatttgcctgaacaattgcaacaaatttcagactgatcttcttgattctcctttacccctatagtgtattttctattttcaccacaccagccaaagaaattttttttttttttttttagacagagtctcactctgttgctaggctggaatacaatggcgtgatcttggctcactgagcctctgcctcctgggttcaagcgattctcctgcctcagcctcccaaatagctggaactacaggcacgcaccaccatgtccacctaatttttgtatttttagtagagaccgggtttcaccatgttggccaggatagtctcgatctcttgacctcatgatccacctgcctcagcctcccaaagtgctgcaattacaggcatgagccaccgtgcctagccaagaaatccttttaaattacaagtagtattatgtcatgccttggctaagaacccttcatgaatttagtattccaaagaccaaaattcttaccgtgccctgtgagatcaatatgacctggtcgtgctactatctttctaataccatctcctaacattcatgattgaatatcctgttctctttgctccagccatgatggtgtttttgctcttccttcagcatggcaaatatcctcccacctcagggcctctgcacttgctgttccctctgcctggaggacccttccccctgcctggaagactctcccccttcagatatctgcatgactagttgccttattcctttaggcctctgttcacatattgtttcatctgagaggcctgatctgtctaaagtagaatccaccatctttctttaccccttattctcctttcttcttcaccatcatccctgtcatattatatacttattgtccattttctatttttatctccccaactacattcagaacacaaactccatgaaacaaaaagtttgtggctttcactgctatatccatagatctacaatagtgtgtggcacagaatagacatctagttatgttgattaaatatctcttatttcagttctctgtgtcttttgatactgctggccatatccttcttggaatgttctcttctgtcttttggtttctccaacttctctgactactactggctccttccaaccttcctccttcttttcttaaaggttgagtgttaatattcccccaagctgagaccttagccttcttttctcctcattctgtatactctcccttgatttctgtctaaatcccattgctataactagcatatatacaggccccaatgactaatatgcaaatctctgtcttcatttcagaccttyctcctgcatcccaattttgtctccccagctgtcgtctgcatacctccaattaaatatcctcaggaaagcttacagaggcttctctagtgacagcctgaggacttctcctcaaactcacgctttaccccttgcctttttttttctccttgacttcttttttagcaaaaggcccctaggaattggacccgttttcctaataattatttaaaataattaaacaactacttttgtcaatcattttatatacatttttttctaatccctccaataactttttatggtagattattaaatctgtcttatagatgagaaaactcaataacctgctcaaagttacaaagcttctaatgttttattgccatgatgcctagtgcatgattctgattgccttagatgataaatgaaatcctatcttctccattgggaaaagagcctagaacaaatttagcaatccaacagaattaggtttctctgtacctcaagaacttatcgcatctggggacagtcagttcacctggcctgtcctaatgagaaggccaggaagagtccatcttcaagcattaccctttgtctccgacacagagttgttttaacctgcccaaaattgattttattaatccttttcccacaaaccacctgaaaatcagtccaaatgtcttttctccccgcttttggtcacagcagccatgtttttaatgcatacaaagaaataagtataattttagaattgccaaattcttacacacagagagaagcaagttagaggttaatatgagtggatttgaagtgtgcattttgtttcacctctaacagaacagtaggctttaggctccagttttttccactggattaaatcaggtggagcatatgcaggctcttacacagcagcagctgctgagtctatcaagaaaattgctgtgccagcaacgatttccctgtggctctcccatttaattgaatgagaaccagcaggtgactggtgccatgacaagggaatcacagacacgctctgagcctgtcaccgtgtgatggagctaatatacagcctcttagtggagtgctgaattccactcaagggtagggcacacagaccctttcctatgattttttttttaatgtgctagagaggcataactttaaaaccactatttttagatattatgcaattaagatggagagtagtgaggcatgtgatttattttgtaaaataattatgtatcctacaacccattattactaaaaaaaatcaatacattaacattctgtatttttgttctgatgtaaatgacaaacagatagaagaaagtgggttggagatcaaggaatagtttttcctaccaacatatcatcgatttattctgctcacagagaatctctgtgaataatatatatgtagttgtcacaaaatggttacaactatagagaatgaaggaatcagtatatacaaaatggtaatragcattaattaatataaagataagcattgctattaatgttccattaagcctcaagcaacagaagagcagtagttttcagcagatctcagattttaaagaaagtgtaggcagagctaaatatctgttctgaatgaggacttcccagttccattcaagggtggtagatattaaaagagacacatttcagtttgtaactcagtgactctatttttatcccatatacatacagagactagtgaagcaactcatacttagaagggaaagaaattgagaaacaatctctgtgcaaatgctgcaaaggtagatacatgcataggtaaatgggagacagataaaagtttacactaagattttctttcatgctacctgagaacacattattctttagttcaaagtctttacaatataacaaatggttgacagaaattgtaaacaatacttaagaaacattatcagaggaaaaaaactataaaatgggtaaaagaatggaggcattttactgaaattgaaagacaatagattcatagaaaaaaagaattttaatgtagttcagaatttctttaaagttttaatgatcatgaagcattagtagctaagccccaaggtggtgggtggagagagcaaagcaccaattaatatttgtctgtaaccccccccaaacttactctggttgtcaaaaaaagtcatgtgctcagctaatgattaccacagcattgtattcgtctaaaastttcgtttatgttgtctgctagcttaaggcttacacctttgctcttaataaaagaaaaaaggctacttaactaaatctcctaatcattaaaaacaattggttttatagccactttcaagcaagttcccctcagagaaagttacaaaaaaaaaaaattgctttgatgtattgaggcttaatcagacattgtagagtcaacaaatggtaaggaaaaatcccaataaaacgtttttaaaaattgtaagttagtttgatagagtctgagttgcatgtttgtagtgattttggagatctgccagtgttaaataggatccagttggtgtggactgaaggattctggcagcaaatcaagactgaaaatctgaccaaataatgtctttttgagtaagtgacagctaaaatctgttctctggcattactgctgtgagtaaatgggcagatattttatttaaacatgtaagtgcaaaaaaaagttgtcatttacgtgtcctaaagaatccaataaaaaataataaaattttcaatatctatttttttagcaaagtttgccattctagaaaaaatcatcaaaaataaggaagaatgtatctattttaaaaaaactaagtttgcagctccatatgcatacgtgtgtaacatatatgtacagttgttaatatatatatccttgttgagatatatataataaatatttatatattgatatatataattatatatatatatatatatattkgttaattttcaggaaaaggaaagcgattgaagcaagccaaggaggaagcaatggtagaaattgaccagtacagaatgcagagagataaagagtttcgactaaaacaatctaaggtgagtaagaaagtcagcactgtttcttatgcagaatagataagatcttcatatttataaggtttaatataggatattgacagaaaaaaatatgctgcaattgagcagatatagttcaatcaagctgaacatcaagcaaaatcttaaacataataattactgattttacattttcactttcaaggcatttttaatttctcacataaagggtccatcagtagttattatgtaatatatagtatatattaaaaatcatattcacaaatatacaagctgaagggattgcttaaagtctcattcctaccactgattattgactacatgttttagtaaaataacttcagagaacatgtttttatataaatatatatggttagttacataaataactaatatttccaagatttacaaatgaccaaagtagatattgttgcaaatttctgaaaagscttctggtatttcctgatgatttcctttgcaactggctgactcattcaataaatctttcatttagagataaagaaatgctttttcctacattggcacatttttaaatatctgcagtttactgtaaattataaatgcatgaaacctttggagcggacaccctcctttccatgttgcaacatgggctaaaagaaagtgcttaactccatgtattataactaaattttatatgatattttattttggcctcaataaaaatataagtaaagctctgtgcagaagcctgacactgccaataaattattagcaatttggaaatctttatttacaacttctattttaatggtaatggataaggagttcatgtaggatcagataaattggaccacataataacaaaacctttttcatcaaataaaaaaggtcctttctagaattaaatggaccactcagcaaacataaaaatttttatcaatgtttgcaaacaagaaatcctaaagtcctaagttcatacaacactccatgattggcctttggctatctctctcaccacattttctaccaccctagtctctattagttctgttctagccatattggtcttttgctcttcctcaagcagctagaacatgcccctaccatgaggccttcacatgtaccattctcacgccctacaattcttttctttagatatattcatctttctttgatctctattcaattgttagcaccttttcctgatcactttatctaaaattgtgtctgtcataaacacatacctattgtagtccactctttttcctcatagcacttagcattatctgatatattttatattgttttttgcatattgcctatctttccttctgggactttaaacaccaaaagaatcatttctttgttttgttctctgttttcctagacattagaacagtgcctgccacacagtagacatgcaataaatatttgttgaaagaatgaataacatttttttctttgattttcttycttattgaatcctgtcataaccatgatctattaggacctgagaaaacaatcatctttaacattattcagctttgattatcttatataggatatttctgatataattatttccgttttttaagtaataacaaaactaatcacaatttcagaaagtgcttgtgttaaatctcttcaaatatcatttctccagaagaatcttatcagatatatatatcttgttcaggttatttgttttctgctttggttaataattaaataatcaaaactcctcatctctctcataattagcgctccaagccaattttacagttatttgatcaaaagctcacatagaaaggtcagcatatttaagcctcagctacttcgagcattttgtaaaaccattagcacagatcttctctccttggcatgacctccatatgtcaggcatattgctattccacttaaatcttatcctcattaacccagggcaattaggaggtctgggaggagacccaagaaaccagcctcctgtgtgccgtgggtgttgtatcttgatgttactttttgttgctttttagctcttgttaatatatgtgatttttcaagtcccctgacttatcaacggaagcaggtatcccaatgtgggctgtacgttagcaaatattgcttcatcaaaaatctatttatcccttccttagtgctaccctatctaaagaaaatattatattgctaaaaagaaatctggactacagtagaaaaattaaatatgttgttaatacaagtaaaagtcagatagatcatgaatctaagtagaaaacctgaaaatggttgccttgggcatattgaagacctttatatctttagtctttcttcctgaatttatatcccaagagcattttgtttgctggaggcaatcacaaattgagagcataaaactgtttttcttgcggtgatgggacctgaagctctgctttaccttaaactggaacatttaaacaacttgtaaaaaaacatattgaatgtttaaagttcttccatcaccatcagtcattatgctgtaaagctatacatcagtttcaacactgacattttgaaaattaacatggagaagtcctcacatgtcacccttagaccaaatgtatcatgacatgttacagaattatcaactactaacttatacattctcccaaacattcaggtaacaggtttccatcaacatgagcaacagaacacagtaatgagttctctgtaatatccaagatatctaatcattctactcaatacaaatgtgtattgagcatctactaagtgccagacagtgttcaaggcatttataatacatcaaggaacatgattcttgtctttgtgccacttacattcattcactgaaactcctacatgggttaaatcaatactctgtctgcagatatcaagatatggaattcttccctaggaaaaccatttaaaatagtgtatgactagtcattgttatagtactgcataggaaacactgcagaaactcaaatcactgggcatcaaataaattcagaaataatattttgtttaattatgcaggatgagacgtgattatggggtattacaagggtattacaatgtttctgaaaatacagaacatattggaaaaatttgaaaagtacaagtaaaacaatcagtgaaaattatagtaataatcactaacatgtactgattacttgttcagagttaaactgagctaagagtcatctttataagtctctctggaaaatgattatggtgtcttgaaaagccacattaagaattcaactaatattaacagctgccatttattgctgcactgtccaaaatggtgaccacttcacatgtggctactaagcacttgaagtgtagctagtcccaatcaagatgtgctataagtgtaaactacataccagattccaaagacttagtatgaaataaaagaatgtaataatttttatattgattgtatgttaaaatatgaatattattagattaaatatattactaaaataactgcacctacttcttttacacttttgatgtggcttctagaaaacttataattacmtatatatgagttgcctttgtggctcatattacacttttgttagacacaactgctctgcacacttaccaatgaatctggtttgcattttacagtatcttatcaaatggatgatattatccctataaaaaaatagagaacctaagcttgagattaacttttccaaagtcattcacaacagttacactaaaccaacccaatgacaactatttttaatgctgttccaaagaaaagtaggtaatagtttcacaacagtttgtttttaattttttaccactagaagacactgaatttagagaattatttttttaatttggtagaatcacacttaagacactaaatttagaggaaaaattttgagcttggtagagccattttaataagtagttctcttctattttaaaatttcttcttagcaagggaaattcgatccatatgtttctgcttcttgtatactcacttatcaaaatgttattctgcaaaagttatttgatgtcttagaaactgtaacttttcaaaattattttctttgaactgagaagaccccattgcctggactgtaaacagaaagaacttgaacccaagcgcctcagtggcatttgatttcaagcctaggactcaaaaagatcatgcagattttagaatttagaatagtctaacaaccctgaagtagaagtcaatcattactggagtatcttggattaaattaaatgcatacttttcctaaacactctcagacggaaaaagcaaacaaacataaaacagtcttcttgcctttaaaatgccatgtgtaggaaagactaagtttacaaaggagatacgttaggagttgattttttttgctttagtaaaggctaactttcaaagtgtttcactgcagaattcctttaaattgttaactcctctggtgaaattatattttggtcaaatcattccttgataaagaagctatgaggaaagaggagataatagaaaatactgggaatcactgccaattaaagagcaattagaaagatatattaaactgtgtctacaattatgatgtaactaaatgaacaagcacactcaattttaaagaagtacaacttacactaagtgttcaagataatatctattacccaaagaaacacacttcggcagccaggcgctgtgactcacacttgtaatcccagcactttgggaggctgaggaaggcggattaccaggtcaggagttygagaccagcctggccaacaaagtgaaacccggtctctactaaaaatacaaaaattagcagggtatcatggcacacgcctgtagtcccagctacttgtgaggctgaggtgggagaatcgcttgaacctgggaggcgaaggttgcagtgagccaagactacgctattgcactccagcctgggcgacacagtgagaacccatctaaaaaaaaaaaaaaaaaaattgtgcatataaaagtatcttagagcgcacattgtgactgtcttcctgataaaagcaagatacagttcagataatgtattttaaaaatagaaaaacactctttaaaaaccagcaactgtttaaaacttttaaacactctttaaaaaacagcaaaagtgrgtttaatggtgtctttcaactctgttttccagacttataattcagaaaataaacaatagggaatatatgggaactaaatggaaactgtcataaatacatgaaaaatgtgatggaaaagaacttctgggcatggtttaatgattataaatgtgtattcaatttgtaccatgtggaggttggttaaaagtgaaagtaatctgctatgaccagtttcaatattttatgaaagttcatccttyccactcatggcattgatgatcttgttggttctctgaaaaaatctagaaaaggagtacataattgtgcattgtaggacaatcatcagtaaacaggctaggacaaatttaacttgtaaaacaattgtattatgatgtgaattctgtctgttttgttttggtagataatgggctctcagaataatctctcagatgaaatagaagaacaaacactagggaagatacaagaacttaatggacactacaataagtatatggaaagtgtgatgaaccagctcttgagcatggtctgtgacatgaaaccagaaatccatgtgaactacagagccaccaactaaatgtacatcacagttttcaagaaaaaaaaaggtgtgtgagtgccacctggttgcttatggcttcgtrtttttatgttgagaaatttgaaatgagaaccttaaatttacatttacaggaaatgtgacataactcatacatcggcactgaattaaacaaaacaaaatacaactgttgctatatcttttctagtaataattatgaccttgtcacttaacttggagtaagtcaagaatgcaaaatagtaacatgttttttaacacttgaaagaaaaacatggtcatgacagctttttagtgggcatgggttttttatttcttctccttttcatcgatttagaaaatgtgctcttaattgtattaaatggtaatttgctaaaagataatctttaagcaagatataattatgactcttcaacagatctaaaaatgaacatgtcaagggtcttatttaattcagtaatcaatgggaaaccagtaaaacagagagatagagacaaagaatgatgggttatatagccacttttaaacatagatggggtttataatcattctgtctgtctgacctcaactaaacagatattatttttaaaagaaaaaagtaaatgataaataagctaataacatagattttggagctttgaaaaaaaaaaaaaagaaatacaaagaaaactcccaggagatatactaggttagtgtgccactagcccagtctcctagttacagctaagctaaactcttgttaaatactaagtattttgttagtgcaatgtatatatcatctcaatcctaccttgtaagcagtattagtgctcttgttttacaaaatgagatgcaaagatgaaggaacttatctggagttgtttggataacagtggcagcactgagctttgaactgggcaatgtgactccaatgttcacaccctttacttcttaccaaactgcttacctgcacagctcctatatttgcattagtaagaagcatgggtgctataaagtctttgattttccagtaatatatgcagacaaattttaattccagtctaaacaaaagttaattattgtcaccaaactattcatataatcttcaattatatgaatctctgattatatgtatagtttggtaacaataattaacttttgtttagactggaattaaaatcataaactgaaatggttttaattgatcattgttttagatcagtggtccccaacctttttagcaccagggaccagtttcgtggaagacaatttttccaagaatggaggggtagtggggtaagatagttttgggatgaaattgttccacctcagatcatcaggcattagagtctcataagggacatgcaacctaaatccctcacatgtgcagttcacaataggattcgcgctcctatgataatctaatgccgctgctgatttgacaggaggccatgctcaggtggtaatgcttgctcaactaccactcaccttctgctgtgtggcccggttcctaacaagccacagacaggtaccagtctgtggcccaggcactggggacccctgttttagatcactagtatcattgtttctttttaggagaaaaagttaaaattttaccacatatcttagtacctcggaaatagtcaattttatatgcatgttaggtaaatggagcaaaatttgaattctatttgtttctccattttcccaactttgggggcaaggaaaaccaaaccagttgattggttttatgtggtatatttccccatttattagaatgagaactgattgccaattaaagaagagaaagatatcaaatattcctaggaacactggctcccattttttgaggggggtggaggagaaggcatcaattaaagttgtgtctccctgacattaggacagtgttggaggatttctactcaacacagatttggagaattcaattactctattctgcaaagcttagataaataaaataatgagtaaaattgcacattttgggagttatcacgtgaaaagataattctgaaaaagatagcattgtgatttgccttatatcataagatgcagttttctgtcttgtctcatgaaaaccatcaagacgccagttttctggatgtgaaagcttgaatatgttatatggaacactcaagttaataataaattcctgagccagcacaagagaaaggatatcttttaggccctaaatactatagaaacacattaaagtcagtagaggatttttctcagaagtaaagaggagccaggtctagaagaaagagatgagacttaggcatcagcacactgtacatccagtcctgccagcgccacaagctttctatgtcctattggcaactcactcaacctctctgggcctacgattcttttttagtgctgtaatctgaaaatggtgttgaaataaatgatctctgtaggccctttaacacttatttttacatactaagtcagaccaatttttcaaaagcagtatttattacttttagttttttcattcactactgtagtatttgtcaatttctcaacaatctcacgtttattctaaacactgtattgttaagagtatgtgctgttgctgcccccaatatcctagattctgtgtagtttgcatatttttacattcaaatatggtttcacatctttgcctaactgaatgagtcattttctaagaactctcacaccttcacagatggtagagctgccaggttttactttatttacatatgaaaaggttttatgtatttcagagctagctcacttatctgtgagagctttctcagtcacagaaaaaaagttgacttttttgtacgtatacttatactaaaaggctttttctgttccgatagatcttcacacagaaatagaatagtgttagcatgtttttaattggtctttacccttgttttgatcctttgcacaatcagaaactacaaaatgaaaaattattccattgagttcttactcatttccattgcacttaaaaacaaaaccatgcaatttacaggcttgcaaaggaatgcaaggatttcggtttttattctcgatgttagcacacaaatacacacaaagtcaggaattgtcatcaatgcatcacagccattactttctagatggatagagctagtagaagagagttggccagagtgtgcagaaagctgccacctttgaaatatcccagctgaggccattctaggtctagccaacccccaacatgtcagagtccagcctaaatcagcacagccacattacctgccaccgaccatgaatgcaggcatgagcaaagaggacatcgtatgagccacccggaaaactcatagactcatgagcaataataaacattttaagccactgagttttagggtgatgcgttatgaagcaatagctaactgctataccgattgaatattgccttaaaaaggagagggtgaccaactgtcttgaatgctgcttagtgttcaagtaaaataggacagagatgtgactgttagatttacatatgtggaggaggagtttgaggagagaaagtgtggtgagaaagctagagatagcagttatagataactacaaaactataaaaatgatcagagaaatggggctgcagcttgagacagatgtgtgtcaagcacgtgtttcttgtctggactaggaaatgttatcgcatattcatatgctgattgaaattcctctagaggagaaagaatctctatgacgaatagagaggggaactattgcagaagcaaagtccttgagaaggcaggaagcctagaattcagatccgaagtagaagaattggccttcaacaggaagatgaccatgggcatggattgacaaacatagtaggtaagtagatctagtggtaggaagatgagaaagttcctatttaccactaatttcaaactaaattcgaggacaatgatcagctgagaatgaggagtaattttaggggacttatcaaacacgagaaagggtaaaatggtcattttagaaagtaagaagattactatgctaggaaagtgtaataggattatcaagcagcactgtatgtctaaatgaggcttattgtcatagttttaaaatgagattaagtcagttgtgtgttttcctctggtcatggtgagttgctcaactgcaggaagagagtaggcaggtagtctgatttcacctctaaattcatcatcaaagacttgagattagctcccttgtcctgtgtcttttaactctaaagttgaactgaaataattcttcttgaaagactactgtgtccctaaacttaaagaaaagaaaattattggaaataaaccacttaaaagaaagatagaaatctaagcatagagctcattacaaaaataatgattccattttatcaacttgaagaaatataactgtgataactgcatgcttctcctatttcctgttcttccatctcagctctcttgggactgcctaatattggcaatgcaaggagttactagtgtagtgagtttgcttacttccaagagtcacctgaaaaagctacttatcaatgacataaatgactggaggaccttatgtcccgtgcaatgttaactattcatttactcactcacttattcagccataattattgaattatgtgataacatacatttgagattggtagtagaaatacagacatggctattaccaaaagtgacaagtcctgtattcttactcctaccacttccagtgacccagctcctcaagtccagtttaagataaggtacattttgagtgaactggggttctctgtgccatctaataaactaaactcctgcaataggtattgtgaacataaagaatatttaatactgtgtagtttaacacagtaattaagatcaccatccctcagactagactatttggattcatatataagtagcaaatataagtgtctataataatggtaattattattatagttgaaaaaaactaaaccaaataggctgacataaagacaaaatgagtgtggaaggaggttacgagggagagaatgccagaaaaatcactgtaacttcttttgcagacagtttaaatagaccattatgaaattcccttatttttaaactagagtaactaaactgtttcttcatgttcagttaagtagaatccaatggaacagaagtttcactgagcctgttttatcatgctagcacttccactgaaaaagtatctgtaactgttaacttgttatcatttttattaatgtgtaatcaattaataagaacatatgtgttccacagacaaatcccaaagatatttaaatagagatamcagtgaatatgagagccttgccaatattctgaagacctgtttcctagtggaattcacagtttgtagtcacagttcagaaagatgctttcctaagcaaaaatgtaaatatatccaaacactccaaataaaaccacaagcactgaatgttatatacatttacatctacaaaggaagcaagaagcttttcatggtgacaaactagaatcagcaaggtttaatagagctgtgattttgctgattgaaacttgtatagaccactgctcatgaaaagactttcaaaattgtgtgtgaccacacagaaagtaaagagggaccagcaggcagtgaatataaaccaacacaacaccagccatgaaatgagtaaatgtgtctagtaaaaatgaacaaacaccactcccattaagtcaagtgaagggcttgctaataatggtgagaaagttgaaacaacagtgttagcagcagcattcaaaaataaaataataatattaaggctgatttttacaatatgctaattccctttgcctgaagtttcctttcttccttctctgcctgacaaaccctactagttttttaaggcaggtgtgatggttaacttgagtgtcaacttgactggattgaggaatccaagtattgatcctgggtgtgtctgtgagggtgttgccaaaagagattaacatttgagtcagtgggctggggaaggcagacccacccttaatctggtgggcaccatctaatcagctgccagaaaatatgaagcaggcagaaaaaacgtgaaaaggacagacgggcctatcctgccagcctacatctttctcccgtgctggatacttcttgccctggaacatcggactccacattcttcagttttgggactcaaattggctctccttgctcctcagcttgccgacagcctattgtgggaacttgtgatcatgtaagttaatacttaataaactctctctatatatatataataatgagtatatatatacta

SEQ ID NO: 93777 - DNA, 56246 bp, Homo sapiens
tgaattagcaaaattgagtctctgagaggctagctgactggaagtcccctccctgtccgagcttcagggagctgaaaaactcagtgtgggaaggaagtggggagtggtgggatttccctgaagaaagtaaacgtctgagaggtgaatcctgccgacctccacttcccaaacactgatctgaggaggaaaggcagaatcccagctctagccacacaggaatttctggtttccattcaaggctgggagtgaaagagctatttccaaagcaaaagatgatgccactcccttcaaggattacctacaactagttcctctttggttatcacccatttttacagaatcttcaacacagagaccccactgcttgcccaagtttcctttcctctgaaacccatggcattcacctgcccctctgacttctgttgagtccctaacatccttttcttcttccctaaaagataaaagcagggttgtcaacctaaaatcactggttttctccctccccagatatgaatagaaggtctacccctacccctactgttttatgacttttttcattctccattctattacatctccccacgtccttctcagatctgaagcccctaaaaggtagagaccatggcacaatagtaccctgcttccactatacacagggatatactcaactgtgaacttaagaacagaagctagcactcagcaatatgtgctcagcagggtgttaggtacctaatgtgcattatttcatttaatcctcaccacaaccttatgaggtaatcacaatcattatttccattttcaagaagttaacaaactaacttaatgggaacctcatagctaaaggtagaagaactggatttaaacctcctaattctgctgatttcaatccctgtgctttcaaccagtatgtaattccgcatccccttcaggtgaaggaccttgtcctgtttgtatcttcccaatgcttggcatctggcaaccagttgacacacaataaatgtttgttgaatgagtatctacctcctgccctgttctccaccctccctcagccttgcaagggcagaatcatgtctgcatccaccctaactggtcccacccaggctgtcccaggaatacttcctgtccttccccaagctaagtcaggagcattcctcaggcccaggcagcagtcctgtgtggaggaagaggcagtgggggtggttcaaaacagctgtttctcttggtttaaagaacaaggagctagaaacaggagggtgggcgcatggaccctacagcccattttccttggataacctccagtctgttcccttgaacccagggatgctgggcagttcaggtgagccgtycaggggctgggcccacctgagaccttccgccaggaagatgatttttctctccagcacggcagaggcaaagatctgaagtatctgttcaaaactgagacagtgcaatagagaactaaaatccacatgttctaggtgggagtccaggggccgtgtcagtgaaatgaactgtgggraaaccagagagagagaaggtgtcactatactgcaagatcatgcagaccccgaggtgctaggcctctaccagcctctattccttctgcccccaggagtgaatctggccctgtctctctgtccccctgctaattggctggaggacagcactgatgtgatcttgagtatggcccataatgtcctgcaccctccctcactcgcctccccgagcacacgcccctctctcactgtgcttcaccacatgggcttctgttccttgagcaatcccatctttcctgcctgcagccttcacagtgagggccctcctcctgcactgctctgctcccttcattcttaccctctttcaggtcacagaggcccccctttggccatgtgatactttcccatcttcttatgtagcaccctgttttgtttttttttctttcatcacagttacataatttctaattcaacatgcactggtgtgtttatttaacatctgttctccccactggacttacagctccaaaaggtcagggaccacattcattttggtcaccactgtattcccagaaaatagtacagcttggcacacagcaagcattaagcacttattttttgagaaagtgaaaatttctagcctctccccttattttcctgtggggaagccaaggttcaaaggggcacacagactattcagagttccagaggacaggactggaattcttagaacagtgttctacctgctgcctcagtgtgcttggtgccttaaaacgatagcagtcccctgtgcatgggtggagactcggaggtggggatggatgataagaaatggacagatggacgctgtaaggtagagacaggacaaacaaaggagagtggaaggggggtagcggcaagtggcagtctgagggctgagggaaaagtcctttatagcaccagaagcctcaacttacatggtttatttattataaataaaagtcttggtggcttgagcagtaactaggtgcttgtgggtatcaagttagaaggatcagaaaatctgggtttgatttcagctttgtccattctaaccaagtcccagtccccatctggctcagtttctctgtactttaacctggttaatggaagaacagtggtgagaggtgccacagatgcctaccctctccagctagggaaggtctcacccattttgctaacccacctcagtgcctgagtcggggatgaagctcttgagagtgacagtcttcccaggwgcagggaaggctgcctctcggaggccctgcatgaacgggtagatgacagccatggagatctgatgtctcttctccacttcatccaggatctgcagggaaaagaaccacgggaggcacggctcaaagggacactaccaggcaggtggaagagactctacttgcccctgagcgtcataatgttctcatactggttcagctgatcctcatgtatcttctagggccctccacgaactggtcctctccctccctggcagaggctgggctcatgctaaataatctgcagtttatctcccacataagacctgccttcttccagcttcctttttattatctctctacacatccatattcttcccctctcctaacaccaacataaaagcacctccctgggaagtcatcccggagtaaactcatcacccatgatggtaccatgtccactcatgctggttggagcaggaggctagaaggctaagcctcttggtaccactctgtcctccaactcccactgtagattcccgaggtcagagactgcctccatccctaggagcactgcacaaaggaatgctctgcccaagcaaaagctgacagagtttcctcccctcctcctccaaaggtcctgctggggtcagagcataatgaagtcctttctggtcaccagtggatggcatggcccccatggattctgctcaaattctgtctcagatgcactggcactcaaattagctccaagagaagtcctggggacctcaactgttcttctacccttgaaggagtcagaatgggtcttataactccttcatatttgtttagtgctctgccttttataaagagtcttctcatatatcacctcatttaagcctcacgccacccagtgagataggaaggtgagattattatatccattcgacggatgaggaaattgaaactcagggcagaagtttcttctgcttgtcctacttcaactactttcttacttggctagagtgggaacagtagctgtctctgcaagaggtccagtcccctagattcaatttccacttttcccttaagtcaagtgcatgcccctttgcctcagttttcccaagtgtgctttaatgctgactctggctatgggagaagagctccactaagagcttagttgcacaggcagggttggcagccagagacagcctggaatatgggcaggccctgaggaatcctatccctaccttggagaacaagccgaagcagccgatgcagctgatgatgcagtacactttgggaaggcgagggccagggccggyaggctggggagggacagagaggctccttcagtgctgcagcctccccaagggcttctcccaactgggtatgaaggagcacaaggctgagggctggggagggggatttatggggaatggtgggtgcagcagggaggtcagaatggccaccagcatcaaaagaagaaatccttgagggtactgggtgagttggtgggcaagcgctgccaccttcagtgccagcacaatctggggtcagcaaagaggggtagcaagtgtgccttagagatgaagaaatggctaaggaggaaagcactgtaaaggtgacttggggaatcctcctgagacctaagatttgaaactaattgtccaagtcccagcctctgctctgggaggctccaggggccaaggtaagcaggcctggatagagcaggcagggagaggagttagttgtattgaaagccagagagagcacagaccagagcctgaccagcagggggagaaggggcatcaggtcctcgtgcttgtggggctgcagagggagcactagcatggcagcaggtcctgggctgtgctttttctacaaccagtgctgccaataagcccggagttttgcagctcaggcttgagcaagcccagccgtggagctgagcagactgcagaaaggaaggggcagttctgagctgcacagaccaagaggcgcctgcagtatccaatctttctgctcccatccacattggtcagaacgaaggagaaggtctccctaagaaagagcagacaaggcttgatttgtattgctcactgaatcctaaaacaggaaagtggtcagcactagagggtggagaggagggcaaaggggagttgctgattaatcacaggagtaagggctcactggtgtcaggccctaaacacatcatctcatctaattgtcaaaacaactctttgaggtaggttcagtaattattcccactttaaagatgaaggaactgaggccagagggtgcttcttattcaaggtcactcaactcataaatagtgaagtcaaagctcaagcagtcaaattccagggctcatgctagaagggcctttgctacrtcgccttcttggaggctaactgctttctgctaagtccagcttgggccagtagcagagttaaaagcagcaactattgcttctaggacaggtgggagaatctggctctttggacagaagtgactgatcaaactgatagctcatattcttggccttgagggaccccaggccagatgttttcaaacaaatcaattacactcccaggccgaaaatcaacaaatgacagcagtgagggaggctacaggagccacagaactcacacatgttccttctccccaaatccaatacccttgcccagggctgagcaattacctgggatactcggtgagtgatgcccactcattcccatctgggaagcagaacaaggggatagctttgagcarccgctcctcctcctcctgctgaccccgaagcaggttctcccgctataaggcaaaggaaaagacaagtggatgtgaagctgggggcagagatagcaggagacagcttcagagctggtgggcttcctttgaggctctaaagcagtctagggttaagcttctccactagcataggggcgaagggtgcctttgcccatgactctgcacagtttgcattctgggtccagttggaacaactccaaagctgaaacagcccctcctgggtcaactctacataagcttgagttcgacctcagtatcgagatctacatagaaaggggacagggccatgttgaatatagaaaggccctgaaatggcccaggcccctgggaggacaacatcagagaggtaccacatcagagaagagaagcggccagctcagttggcacacctgctaatgagaaggcttcccaaccctctacctggtgaaggatcagacaaggagtctaatgcttgggctcgggcagagggctgtgcctgcccaccagttacaaggctgccccactctttccttcccacacatcccagagaggggattcattctaggagttctggcagaaggtaagcttctctgcagagaagggtgactgaaaatgggatttggaagacctatcaggtcccctaaaaggcaaaatgtctagcctagtttccctgctaggaagcctaggtcagtccctcacaaagaagttagacctagattctgtgggtgataacagagaactggggctgtgctaagaaggaaatggagagcagtgagctcagagctcagggcagctccaggctcaagccccggtagggtagggagaaggaggtggaacccccacccctaccaccttccaaacaccccagtcctctggctggccctgcccctccttcagtccttaccttgggaaattggtaggtgattataggctcgtaatcatcctctgaacgcttctttttgagagaaaccacaagaaggtattcaaagaagtgctgccccccagcaaagttgggcaaagagtgctcctgggccctttctggttcctttaaagcttcccctgaattgtcctggggtggtcctgaaatcaagccagagcccatttagtataatctcattgatccattcctggagtggagtctgtgagaatccgggtgacctccacacctcaaggccgccttgccaatgctgagatacctggatactggccagaaccaccagtcactcaggatcagggccaaatgggcagtttccacacctgccctggtagacttgaaaccatggggagccaagcagaggaaagaaaccactgacacagaagccacggaaatgtgctggagaggccacatggaggccaaggccccagggtaccacmgagactgcctaacctgtcgggtgcttctggcagtcctggaacaatayggcctgagagtttagttcatactaagtgaataagaacaggctcaaagggcatgtgactgtgaccacactagccccasagagggcatgaccagctcttaaaaaccagcagaggaagcctcctgacccagtcacatggggaaccatgtggaggccgagatataaaggaagaggaggaaggagcatttcaaggaagaaacagtcccgcctaagagggtcaccctaaaaacaaggaagtaggcagtccagtcctgacctgctcggagttgaagcagtcggcgttggaagagcctgaacacccggcctaccacttgtccttccatctctgggccttcaggacagagcggactcccctctcccctaacacagacagactggtgacagtaagcctgagaaaggggctgcttcggtctccagccacaactctgtgaagccaagccacgcgctgtcttccagagagggaatagaagtttccatcctgtgcacccagtggttgagcaagaaggatgtgacgggacccaggaaggcagcagaagccagcaccaacagagtcagcatcctggcactgcagcgcagatctcagctcctcccaagagccccagggtgtggcgagagaaaaggtcatgagcaaacacctctggctgaaagtagccggaaaggcctggctacttatgggctaagggttttgaatctgggctgcagattgtgcagagagttaatttacaaccttagaacagtggacaatgcttgatagtgtcagactgtgggcactggaaaccggctggtctcaggatagggatcctatacctccaacacttggattgctgacctttcacttctcaacttggtcaacggaagtcaaaaaccccagcaaggccacctgctgaattctagaacttccaggacttcccgacctagagcacatggccaaacactttctgcagccaggatgtcactgccctcccctgattaagataaatagacttggcctaataattatccaaatagattaattcttccaacaaaagaaagagttctggaagtcaatacccaatagccttctttcctgatggtgcagtagagagcaaaatccatctctaagcccagagttcgtgatattttggaaatagctacaatggtgaatttcaccccctggagagttctgtcactggcacttgttccagggttccagcagagtccctcttctcaaataggaagcactggctcagaagactgtccccagcataaggtaggggactgattgcaccagcagcctgagggtgattccatggcagtggaaaacatctgggtgatctccacccaacccccacgcctgctcagccttcctccgggtcaggccaggtcagctgttctgcccaagctacaggcacagctgctagcccactgctgtgtctggagactaggtaagagagaaggaatagcaaaaaaatcaccttggattctcacagaaacccctgaatgagtaaatacagggaaggcttttaccaggaagctgcctcaaagggaaagcagggggcaaaagggtttgacgccagtgtttgccactcctgctaagaataagcacccctctggaagagagtggggtgctaggatagggaaaacagctgctttgctcctaagagctctagacctggcttctgtgggactagaaaaagccaggactcacggccaaactcmtgtacagtaaagaaagatgttcaaatgctgtaatgggtgagaagagcgaactagaacacttggagctggcamcacaccttacttgcaagctgcacagacttgttgcacaagccttaccacctgtttgaggaacaagcatcttcctgatacagatggggaaactgaggcataaagtaattcaaaggctattaaaattgacaggatttgttgggaatggggattaggaaagctccaaatccatgstcctgccttctggatgcatttgacatcaaataccccacagaggttttcaaaggacattgagaaacagaatcttatyactgatcattccagattctaatgaaattatgcctttccctaaatcctttgggctgcgttttcagatcattttcttctgctttatcaagcaagccaagagaatagcaaaattaataaatcattgacaaaagaaagtaattagacttttgggatgaggcccaagaaatgcagcaaaagactgttttctcccctctttcaaaaggtgttatccacaggagagaaaagcgtaagagaaaactaacctccatcaaactcatgtttcatataaggcatctcatttaatctccagtgccctagaaaggaattattattcagagttttagttgaggagggagccaccctttctagggaagtcaggaatctggttacacttgttcctccaccagaaagcctctcccacacacacctgactgaagtcccagatctgtctagaacataggtgaggggaccttctggaaccttgatctgggaagctggcccatcccttccagctcagctgctctcaacccaggaccaccaccacatcactccttgtcaccaggatacacacacacacacacacacacacacacacacacacactccctcctaatacacaactgtcctggggccagaaaggcaaaggargaagggggagaatccccaggcaagtggaggatggtatggaagatgaagagggcatatgctcctggccctacaagtgttaggcctcagttcttacagttcctcagtatcaggaagctcctccaggcacaatcaggaagtgcctggtgttggggcaggggtgggtgggaacaactggaatgtctcctctgggctgcagggggcagaccccttccattcacacagatgtcccagggtctgggaagaccaggacagaccaggccagtgctctccagagaagagagaatgtcagcctcatcctgccttctgctcccaccactgcacggtcccaggcctctgccccaaactgtggtctctgacctctccctgatggtgcagatggaatggccagatattggagatctgtgtctagagaggacactacaaagagggaaggagcagggtgtggcaggaggaatggcaacaggaggaagagcagatcactcagaggtcactgcagttcaaagaarggtgcactgacctcactccctgaggtccccccaactctggggcttgggctaagagaggggctcacttggcctcctrgcgtgccaatgttggaaagggcaggttgtctgggaatggcccctgctctttgctcctcagacagtaggacctctgggcaaagtatctaagggtcacggctgttcagccataggactggctagtggtaagccacacaaatatttgccgagtgaatgaataaatgaatgaatttctaactgccctccttccaaccccagggctctgctaagaaagaaaagaaggtgcttctttaacttagaagttgacttctaatttaatccccataatcctggacgggggaattatgtccatttcactgttgcggggctgagggaaagggaaggggtgccctgtctgggcgacacgctggaaagcagcagctgcgcaggttctaccgccgytccgctggaggccacactctgaagggcacctggccgagggtgggtgggggtggtaacgtcatcggggagacctgtgtttgtggccggtggctatctgckgggcaggggcaggggcgctggctccgaggaactgggcaaagaccacggaggactcccagggcggcgaggtggggcggggcggcgggcacgccgggagctgaggcagtgcctctgggaggacaccacaaccggggcgctttcaggcacactgcggttgcaccacaagcttcctggatggaaggacacgtggccccggggccccacaacggcttcctgtgtcccgccgcctccccctcgccccckcaggcctggcctcgccgtccccgcccccacctgaccctcttcccctctccgcgcgctccttcccgctcacctgcccccgcgcagcctcctgagtccccttccaactgctcccggatctcgacgccccgtgccgccctccaccgggccccagccgccagccctagccccggctccccggtgcccacgccgtccccccgcgctctccccggccggcactaacccccatggccgcgcttcagtctcaggctggctcgaaggcggcggccgagcccatccatggcccctggagtgcccggctcccgctcccagctccgcgctggccccgcccccctatccttgacctccgcgggtccgacactttcactttcacgcggggggaggcctaggggacaggttcggggcggcgcggcgcaccttccggactccggcccaacccccgggcgcacctgggygggcccgctctgccctcgccctgggcagggcagcgtggggtggaagagggcgctcgacgcgcgtccgggactgggcggcgccacctcgttcccaccctccgtggggctcccggggaggcttgacttagcgaacaccctgcagtccgcaaaagcgcatgtcctggctgaaaycaccgtcttccaggtggccccaaacgaatcccaaaaggggcagagttttcagtcctcacacctctccaacccctccacctctccctttgcaactgctttagcccttcgaccatctccaggtctcttgccctacttgtcctctcactctcggagttcctgaggaggaactggagatgcggattagggacctgtcgctgccttccattcaaacttggccttgagcagaccagcaaaatgggggtaacccctgccattccacagaaatgtgaaagttcaggaatagaaaactctttgtaggttgttacataatacaaatttaagggactgttattgtcataattgttgcagctgtcccctctccccttctaatcctgaatttcaatgcagcctttccgctcctcccttttcacatcttcattgacttccaaatacgtccaggctgtaaacttcaggtatcaaccatgacattgtgggtctgctcagcccacttcctcctgggagatctgccctagttccccgctcsctctcaggacattatctgtagggctgggaagtgcagagtccatctggggttgcttggtttacaaggttttagggtccttttcaggagaggtaggcagagggaagaagggactctggcagaaatacgtctggaatctgttggcctgactcccagacctacagccctctttccatggcctccaggtgactctccagtcaccatgggagagccggaattgggaatccagccctagtattaactgtctrgtcttagcccagaggttctaaaagttgactttactccggycgtatgcaattttgcacttaattacagtctgtttctgttccctattctttgtgtattccctcacacaagtacacttcccttccccaagtaccttttctgggctgaacccatgtcttatgcatctctgtgtaagaacagtcgttgctcatgataaacttgtccaattgattgaatattattgtgccttaacttccccratctattttgtggtattcccaaccaaactaacttcctttctttaaaaacagatgaggaaaactgtgtacatgtgcaccaaaaagataagtacaagaatgttcaagggagtcttatttgaaacagactcacgctggaaataacctcaaatgtctattaatagtraagtgagtaaatcgcagtatattcacataatgaagtactacatagcagtaaaaataaataaaccactgctgcatgcaataacatggctacattgcacaaacatcatgttgagaaaaggaagccagacacaaaagagtacattatgtaagagtccatttgtataaagtttaaaacaggtgaaattaatctatggtatgagaggtcagaatggtgttacctttagggaggaaggaggaaataatgatkgggagaataccatagtgtttctaggatgctgataatgtcctgtttcttaaccaggtgatagatacatggatgtattcactatgtgatcgttctttgcagtgaacacttaagcacttctctatatgtatatgagactttaaaaagatttttaaagtattcgttaggatgttagggtgacattaatgaaggtaatgaaacaggaagaagttagttcagaataaaactagaaattattgggatgggaggaagtggagctaactaagtataatctgcatttttgagaagtgtggataataataggaacaagttaattgatccatagtggaaaatttgggtttaaagtgatgggttaagatggcgaagatgagagcatattatgggtatagcaatgagaattagcaagggtagacatttaaagtataagaaagagggtgtgcagatggagcagcgtctgagagaaggtggggggcaattagaagcttaggtagaagtttggctttaaatgggaaaaggaaacttttttttttttgagacagagtttcgttcttattgcccaggctggagtgcaatggcgtgatctcagctcactgcaaactccacctcgcgggttcaagcgattctcctgcctcagcctcctgagcagctgggattacaggcgagcaccaccacacccggctacttttgtatttttagtagagacagagacggggtttcaccatgttggtcaggctggtctcaaactcctgacctcaagtgatctgcctgcctcagcctcccaaagtgctgggattacaggcgtgagtcaccgcgtgtggccgggagaaggaaactttatctgagggaaaaaaaagatgaaaatggctatagatgttgataaatgtgtagataaggtagcaagaagttaaaggataccacaggaggcctcagtttctgctaagacaaaaggttctttttcttcttgtagctgccatcttccactgtcccctgggtcattctcctagtctggctgtagagtggaagtgaacgaccctagccttccttttttgaaggtcttgaaaggaagcacactaataagttgtattcaaggaggcagtcagtatgacataacagaatgagcctgggcatctgacacagacgaacttggacctgaacccactctgcctcttgtttgccctgtagccttgggttaggctttgcactgagcctcacttttctgatataataaaatcaccttgcagggcagttgtgaggattagaaagaatatatttgtaataaaaatgccaaacttcatacatacctttaatcctcaaatcactgtagtctcagctccatttcttttaattgcagaaagcactgtctattaccaggcttgtatctccaggaatttctgagaaacctcaagaaacacacactccaaagaccaattctgatattcactggtcattagggtccatcatgggaattcaaactattactttcccttccacagttatacccatttgtctgaagacatactgctattgttctcccctgtgccacactgcccaacttggacaatgattctatcttcaattccatatagagatagctgaggtcagaagaggttttgttaagacttagctgaaggtttgttaagactttgttttatgataagagaagcacgttataaaaggaaaacttaaacacaaagtatcaccactcttggggtctgtatgagggtcctctttggagtacttctctccctacccctagagctgcccccatcttgcagggatcagctaacctgactccagtgggaatgcccttgaacgcagccctgtctcagtattcgcatattcaagaatgactgacaagagcgatgtttattacattcacggggaaaccctgtcccatacttagaacctaatatcttttggcacagagataccagaacaacaacaaaaacaaaagcaacccatatttccccaagaataggcccatcaatacagaatgccaccatcaattggcctgcacaattcctcttcctttgagatgaacaaaagctcaagctgtctcaaactgtgtatactgcaagccatctgaaatttggcttctcatctcctgtgagaaatgagttgaataacctacccatcttccagaaacaagcaatgatatccaggattaggaaagaacatctgtatattagaaacaaagatagccttttctgttaccacaaagagttcctggagttaaaaagttctcaaatctctgtctcctataaagggtctctgctctatatttgatagccaaaatcttcttgtattctctttcttcccagtcttctaaagtgctaagttttcaatcccaacattttgtgtgtgttgatccctctgcttggaatcttcttcctcccactcctcactctactaacttctactcattctttatatcttgcttaaacgaacttttctgaaaagacttctttgaccacctcccctttccatctaaatcagatcctcctgttacaacctcaatcacaccgtttccttaggagcatttatagccatttgaagttacatatatgtatttctgagattatttgttcgactactctctccctttctagagtcatccccaggaggcatgagtcttatctctttcacttacttctgtgtccccatttcctaagcacagtgccaggcatacgttagataaacagtaaatatttgttgagtgaataaatgtatgaattaatagatgggtagtatgcagaaagcttctatctctaaggagacagaaaattaatttaaacattttttwattttctgggttctactcagggcaaacactttgggtgcctaagactcatttccccttttacccttgctggatatatggatatatttgctcagaggtatatcagatggtggaatctgatcgtggtagtcctggtctccttcccccaggttgactcatggtggccatgtgatccaggtgtggccagtgagaggtaaggaggtatctaatctagtaagggaggcaagaggcaatctcctagggacttctgggataggattctccagaagtgatgctgtttccctgcctctgggcatcactgggtttggatatgatgacaggaactggtgagatgaagccagcttgtatagcagaacagggacaacaggctctcagggtaatggggcaggagtcagggatggcatgtcaggcctgaagctgccttcactctgcactgcttgttacctgaggtaataactctccttatggtttaacacagtgagccttctaaatacattttacatggcatctcagtgccatgtaacatacacacatgtaatatmcaaataaaagtttcacaaaacaataccattcctactatgtgcaaggtatgctgatatttctcctttttcttccattctactattgcgcttttaaaaccatccttgtttgaggcaccttaaaattatttcacccccaaaatgtgttgtgacccacagtttaaaacatctttgggttttctggtactttttctgcacactctgaagccagactatctgagttggtgtctcaggtctgccagttactagtttggttacgtcaggcaagtttcttaacctctttgtgattcagttttttcataactgatagaataataatggcatctaccttacagggttgttttaaggattaaatgagctaatatatctawagcgcttggaatgggaagccattggcaagtctgaacacaagacttacatgatcctacaaagatgagtaaggcatggtccttgttctcacagagtttgcattcttgcaggaataatataatgcagagatactgggattaagataagcacgggtagttcaagatcatgaaggagaaacacgcattttagcttaagaaatcaagtctgatctccagtaggtaagtctgggagataaaatctcactcacttttttttgttaactaatagactagttttagatttacagaaaaatcgagcagaaagtacagagagtttgcacatatcccctcaccccacccccatatatagttttccctattattaacatcttgcattagtgtgggacatttgttacagttggtagaacaacattgatccactattaactgaagtccatcatttacattagggttcactctttgcttgtacattctatgggttttgacaagtgtacaatgacatgtattcaccattacagtattatgtggaatagtttcattgccctaaacatcctctgtgctcctcctattcacccctccttcccctgtcccactccaaaacactgatctttctaccgtctccatagttttgccttttccagaatgtcatatagttggaatcatacagcatgtagccttttcatcatacaatatgaagccttgcgtcttttaattagaaatgtgtatttatctttcaaaaccctctctgaatgcaraatacattcataagcaaaagaacaaagagtaataatttttaagtgtgttttcagcactgttcaggggattgagcagccaataggtgtaaccaatttccttaacaagcatctgcttaataaatatttgttgaacaaatgaatgaatgaattcccagcatgatgactacattagcagatggtcaatgcatgcttgttgaattgaactctagacctaacattttgattgcatttgggggttcccagttctccttgacaataaacttaagaggaacagatagttctcatggcttggtcactttatatgtttcaggcagtatgctaagtattttacaaatattaactcaaatcagcattatcaataatcttttgagctagctattactattcccaatttatagatgaagaaacaggctcacagatgttaaggaacttgcccaaaatcacacagcaggtaaagtgaacttttaattcacactcagatggaaactttatccccaggagcatcctgatgagcccaccaggacatgtcgtggagtcttccatggagctgacaagtgacccagcactccaagccttccatgatggtctcaaatagatatcctatgagactacactcaggtctgtgtagtgctcccaaaatgccctactctgctttctacactgaacaatgccccaaagtggtggaattttttttttttttaatggaagccagaggttcatcataataggtgtcatggaagtcctcagagatgtaaataaccccctagagataaggctgacatataaaagtctacctcagtcctggggaaatgagcacaccattcaccactgtaggagaaaagaaggggacagaagatcatgtagggctttgtaattcatcaaagattcttagacatttcttttttttttttttttttttttttgagactgagtcttgctcagtcgcccaggttgtagtgcggtggcgcgtctcggctcactgcaagctccgcctcccgggttcacgccattctcctgcctcagcctcctgagttgctgggactgcaggcacccgccaccacgcccggctaattttttgtatttttgtagtagagacggggtttcaccatgttaaccaggatggtctggatttcctgacctcatgatccgcccacctcggcctcccaaagtgctgggattacaggcgtgagccaccacgccaggccgattcttagatatttctacctacaattggaaatttaaattatctccaacacttcaaacttctgacagataagatttataaatctaataagcagaatctttgtaagcatataactaagtcttgtaaatcgaacatacccacccgctaaatgtgctaagcagagagagcatcgtcaaagcagctcatgaggacaaatcaatttccttgaatgaacacaayttaccaaaagtattgatcccatttttatctttttattrtctctctgcttgcttgtacaatttcccagaactacacatttttcttatccagataagggagactttaaaactaggtcagtcacatgagtacagtaactgacatttcagaatcagggtttggtctgagactctggatgggaaagcaaggcctgagcattagttccaagttcattctagatgagccatgagttaataaactgaacacttcttgtaggaatacaacttcctaatcatataccttttcttgcaatatagtgcatcctttattactttttggcttttttgaacagtaaccttttataacactttaccaagatgtctttttataaatttttattgaataatttgaattaaaattctcttcttcttaactgaattgcagtgaaatctttctattgcccacctgggtcctacactctgttcctctgaaccttttgtgtttattaaccactgctctctggccatttattgacagaaagaatctggaattttagagtgtcgagttagaagggacagtatcagaggcactcatgtgcccacctgtccaccccccgcccctgcccccaccactgttcctgctaagtgctgggaactctgcctagcagtttcaacaatgggaaaatcctgccttgagaaaatatgaagcctgccrttccctggcctccctggctggggtgtgaaagcttgtgattatacagccagttagtggctgtcaggaccagaatccaggaaatgtctctccaagcccctatcttcaacacaagaaggagatctgatggataactcttttctattttctcccccgcccccgcctttttttttttgcttgatgagcagagatagacaacagagaacagtgagcccttagctcaatcctgaaactcagaaatcagaacatacttgttaacagactgattaacaccaccaacccccacctgtcctggttgccctaatcacaaactccaagaaggaatgatgcccacacccccacagttcttttcctcttccctcacccctgcacaacccaggaaggtgctcagctgagcaaccacagcaggcagaagggctgcctgctaagtgaccatggcatttaagggaagccaagaaagtgacgaaaggcttcgaaagacaactgcaggaagaaagaaagaaggtcatggtggacaggatcytggggggaagagagacatggtcaggtggagaggttgggggcggattgccatcaccctcaccatgttgcctacttgagtctcagaaacaactctcttttccttccctttgtgctcctgcagagaatatcattccatcttacatcttattgttagtagtggcaaatccgtacaggtctgcagcaacctcgattcttgcctcctcagaagaaagattttgactgaggggaataaggcagagaaagagactgaagcaagttttagagcaggagtgaaagtttattaaaaagtattagagcagaaatgaaaggaagtaaactacacttggaagagggccaagcggatgacttgagaggttagagtgaatggtttgacttttgacttggggttttatatgttgtcatgtttccgaggtcttgcattacctctcccctgattcttccttcagggtgggctgtccgcatgagcagtggcctgccagtacttgcgagaggccgcatgcacagtgtgtttactggagttgtgcaaatgctcacttgaggcgttcttcccttaccagttgagtattcctagaggaaggtcatataccagttaaactctgccattttgccttttagcgtgcatgcttgggcccactcgcccaactcctgagatcttattgggaagctgctgatcaccaaattttgatgttttctatctactgggagattgcctttccctggtgccagctgcgacaaattattattttagagagatagtcaacaaccgcctgaccatcacctcatggtcacctggcattcctggtttgggggcccactcctgccctgctcatgtctgcgtaactacctactgtaacatcatgttttatttaaagagatagaygcacaaagtgtatatatgtgtaggtgcccacatgtctatttaactgtatgtactaaattaacatctgtccccaaactgatctctgctgaacagagccaatcaaacttggttcccttgttgagcttgcactcttggtattacatacggactaggggasagggccagcctcagcactgatgttacagtctcaccaatgcaccacaaagtagcagtctctcactgtgagttatcacctggagttctttttctcacaactaagagaattagggagagtgagcacaaagggtgaagttggagcgaaagtttaataaaagaaaggagaaagctcttggctgcggagaggggacccagaaaagggttaccatttttacagttgaatgcaaaggtttttacaggaaaccaataagggctggggatctcatttgcataggtacgaatttctggtagctctaccttgttcttctaatgcacatgtgggcccttagcttgagttactccgtattgctttgttccccttactgtgcatgtgtcaggggatggaattgtccgttgtgggcatgtctgggcaagccacctgtatagcctttcttatctgtgtggctgtgggcatgtcttaggcaagcccccctgtgcaaattcctttatctgtgcctgcagcttcatttttcaggctgttcttttgtttgaaagagaacccaccctaactacctgcctgaccagtttcttcctttctcctccctcactaggagatgctcttatcagactttcctaagtgtcaaaaaaaaaaaaaaaaaaagccacagtctactccatcttttctccacttctttgttcacttatcatcttactctaagaagtctttatgtagctatcatttcctgagcgtcacactgcttggttctgggaatcaaaccacacaaaactgaactcagctcataggacataccatctgtaacccaaaaataaaattctaacccccgccgccgccgaccatctgaatggaccccttttctcagcaagggcattccaagagttacctgagggactggttcaggccatgatggggggtggagtgtggacatgcctcatcgtacacgcctccctctcagaacagactctgaaagtttgatgagaaacagttacagtcaattctttctgaagcctgctacctgaaagcttcatctgaatggtaagacttcggtttccacaaccccttaytgtaacccagacattcctttctattaattccaggtctttagataataactatttcaaccaattgtgaatcagaaaaatttaaacctgcttataacctggaagcccccattgcaatccccccacttcaagttgttcccccttttcagaccaaaccaagtacatcttacatgtatttgattgatgtctcatgtctccctaaaatgtgtaaaactaggctttgccctgatcaccctggacacatgttctcaggatctcctgagggctgtgtcacaggccattggtcactcatatttggctcagaataaatctcttcaaatattttacagagtttgactcttttccatcgacatgtttcagccctttgagttttcacaaccaacgtaatttgcagggtacttgcaaacaccaacagatattttagatataaaaatgctttaaataattggattatttgagctaatattattgccatatactccaaaggtaaaacagagctcactagtgtccttgcaactgacargaagcagaatatagtggtaatcagcacccgatgggatgcctgagagatgtgaggtctgagcagccatcacgttgtagagttgtagagaaygtgagaaaccatgggcaccaagttcccagggtgaatggggctgtgcaatcactgcttcattttgcttttgctttcttccccagctcttctctctctctctctctctctctctctctctctctctctgtctygtgacacaaaggaaaccaaatgcaagttgatacttattctatagggcccagatactagtctccttcttcacaggaaatggaaagtctcagtaaatctctcaacagaggcctgtttgcaggaggccggggcctaggaggtggagctaagtttgtttatcagcttgttctggggacagaggtggaaccatcacccacaaccagaggaaactgtctggttccccaaggtcattatgggacttcctgccagagcacctgatggaacagttcatgactgaggtgggccctcaccttaaactctttccgtagacagaagtgggggatgagagaattcgtaaatgaccaactaaccacctctcaggtcaaatctgaactccctggtgacttgagggaggttttgtgcagaaaaarcaccaggcctgccaggcctgcaatgcagtcagaaattgctgcatgtaaatcctggccctgccatttgaaagttgctcaactttttccctgtaaaatggggaaggctataatgtgcactataccccggtgataagggttatgtaacttcctctcctatccattttcatttctcccctttccttcccagttcccaagatcccattatccttcctcttacactgacagccaaaacttaaaattctgcttgctttattttgcagagcaatttagttttctttgtttcattttttcctttcaagacaagattctgggaactaatttttcagaattaaacaaccacacaaatgttttgctaacacacacacacacacacacacacgagtcccccaaaaggacttctgcctccagctttaaaacacgtgcattttcttttctcactgtattagtttttcagtcgatacttcccttgtttctccagagaacctaaaatgagcaagaccaccaagctggtccaccatcctctacatggacttcgagagtccccagaacactgctttttatggccatttgtataatctgaaatggtgccccctccatgcccctcccatgtcttycaatcagcttatttgtaaagtcttccataatcatagtgccattatgccgatatcttataaaaacatgtttattayatacacctgccaaacatgggcagcaggtattttgcaataaaagtgaaaaaagcaatcaacagttgaaattgttcatcactagcccaacatctttcctaycacatgccccttcttctctgctaatagaacccctatttgctaggtatcggtagaaatcctttgactttaaagagaggaggcctcctaccctcaccataatgcatgaattgtaattcacctaaaccacacatagtaatttcattctcttataattggtcatgtgacccaatgagctatgaggggaagtttgctgaatgtagtgcccaggaaagcttttgctttctgggcaaaaaaggacagactcaactggtagggtcccttttgcycctcygccatttcttctttcctgtaatactgacattaygcatggaaatactgcagcaatcttggaaccatgaagcacaaggaaaagaacaaagaagcaatctatgaaactatggcttagcagaaagatagcaagaacctgggatagttgamaactttgagtagctgaccagccttggtcttaccagttatgtgaaacggctaagccctcatttgtttatgtcactgtagctgggtttcctgttatttatacttaaatgcagtcctaataggtacatagtgcatcctctcaaaaatggttaaaggctcattatatacacctttgcgtcagccttgattccacatctagtgcatgagcaagtcctgtctgctctaccatcaaaagtgtatcccagatttcaactatttagtacttcycaccacccccactgccattaacctggctgaagccaccatcatctctcactcgtaatgcagcattctcttaatgggccacttgagtctactcttttcttccttcagtcttttctcaacatggcagccagaatgattccattaaaatgtaaatcagatggtatcatttctcttataaaagctctccaatggtgcctctgttacgcagattagaagccaaggtccttaaaatggactatggggcacctacctgattgggctcctctctgtttttttcatttgttttgcttttttttgtttgtttgtttgttttggttagatactttctattactgtcttcaagtttgcttgttcttttgcaggatctaatctattaagctcactcagtgaatttttaaattttaaatctcatattttttcagcttttcttcactttttgtttaatttttcataatttctacttctgtcttcattatactcatgttttcctttaaaccctcgaatgtacttttttttttttttgagatgaagtctcactgtgttgcccaggctggagtgcagtgrcgcgatcttgacttactgcaacctccgcctcccaagttcaagcaattctcctgcctcagcctcctgagtagctgggactacaggcacctgccaccatgcccagctaatttttgtatttttagtagagttggggttttatcatgttggccaggctggtctcaaactcctgacctcaaatgattygcctgcctcgacctcccaaagtgctgagattacaggtgtgagccaccgtgcctggttttgaacayacttataatagctgctttaaaggtcttgtatattaatatctgtcatttctagatctgtttctattgacacatttttctcctggttatargtcacatttcctgttttttggtatatctagtgattttttttttaattggatgcttgacattataaatgttatgttgctgttgaatgtttagattttgtggccaggaagtcaatttatttggagattgacaagagcttttttttttttttttagacaaggtcttattctgttgcccaggctggcgtgcagtggtgtgatcatagctcacagtagcttcgacctcctgggcacaaacaatcctcctgccttagcctctcaagtagctgggactacaggtgtatgccactatgaccaaataattatttaaatttttttttgtaaagacagagtctctatgccgctgaggctggtcacagactcctggcctccagcagtcctcccacctcggcctcccaaggtgctgggattacaagtgtgagccactgtgccccgctcaacttgaacattttgaagcttgtgtttaaactttgttagaacaagtctagagtcacccttaccatggggctagtgaggcccttaactaaagtttgacgcttctgaggtttctattaaatttccagctgctcaagaaggactttccactctagccggtcttatcaaatgtctcccagcccagtgcaagctttagtggttgttcagcttccagatctctggtggtgcttatttccttggtacttttggttgttgttgtttttgcccattctgctgtagtctcaccctctgtatgagagctttgtattcagccacagatctgagagaaccccatgcaggtttctgaagctctttttctgtactgctcccttatctctggcattctattgtgaagtttccaagcctctcagcctcttcaaactccattctttgtctcagtgggacttgcatgctctccataggcccccctccttgtgttgcagtctgcacaaggcacagttgtgggagggctcacctcatttgttttcacagccctgcattgcatgttgcctaatgtmtgaaaacaatcattctgtatattttatatcatattctagtttaccgtgtgagarttactcagtcgttactggaggaggccacaaatacttattaaacrtgtgaagtattttagtttccatgctggttagtaggctgtgaagatgagttagtgtgcatagaggaggtagaggatgtgaaactcagggtgggtgggtgaggaggaatttgcccaagacaaagctattgttagacctaggaggagaggcctggtgctttgcatcctcgggctgtgctttcacacacaagccacatcatctcttccctggcttagctgctctgagcactgcctcctcctcagtcgtctcctcctcttcagttatgtcttccagcayttgggatgctgacttcttcagccaagccccctccaagccctccccatacccacattcagataaagtggaaagaggttttcyatcccaagtgtatcagatcatttggaaagatcaagacccactagctccatcatgagccagtggatgagctttctgattgtccctgctttgactcccacttccgatttgcccaaagcccctctcaccaccatgcagcctgcaatatgagaccatgtctgtgaaaccgtgccatgaacagcaacacttaaggaaattggattatttaatcaataattggagcaataagcatctgcctcggtgtgccaggccacaagaggcacaggtaaaaggcctgtcttctcaagaagcacttattctagagactggctgcccactgtggggttcagttagcagaaaacaccctgctgccagtggtttcagggtctgcctcaggtgcagataaggcaaaggatccctttgcccaaggtcatgacttaccagggaagcccatcacttgtggctgaatgaggagggcgtataaagacccaggcattttagtctgaagtgaggcaactctgatggacgtcacttcttctgaatctcatggctaggttggctgaagctttgtcggagctgcatccaaactcagcctcttcctctgcccaatcttgctccctctttcctttcacaacagataatttctaattaacagcttgtgcccacacttcaattccacacctgcttctagggggcccaactcgtgacacagggaatggccgtgaccatgggctttggcagctacagtccagtccactttccctgcagacagggaaaggtcaggtcaggcaggggatgatgactccacagaagagtcaccctgataccacaggcttcagcttctcaacactttttacctcccttcttttttttttttttttttttttgagatagagtcttgctctgttgtccaggctggagtgcaattgcacagtcttggctcactgcagtctctgcctcctgagttcaagtgattctcatgcttcagcctcctgaatagctgagtttacaggcaccctctatgcccagctaatttttgtatttttagtagagctgaggtttcaccatgttggctaggctggtcttgaactcctggcctcaagtgatccacccacttcagcctgccaaagtgctgggattacagccatgagccgctgcacatggccaayctcccttctttatcaatgtgacagaaagttgaaatgaagatgaattactgggacatgagatcagattatgtttattgagtgtacactctgagccaggtactaagctaagtscttcacttgcattatcacgtttcattccctcaaacaacctcccagggaggtaatctcattatccccactttataaagccctttgcctctgtcttatgagagttggggcaggcctgagggcaatgagtgatgatctcagatgccctccagggtcctggcctgtcttctacagcatgaatccctgtgagcagcttcattctcattgctggctcctgcttatctcctctttcttctcctccctccccagctctcagttctgcagatctggcagcactgctcagaccctaccagcaaatccgaggcactttcaatgcccatcccccaccctcaaaaataggaagaggagaaactctcagaccacatcctgcatttgagcaaagttcccaccagtggttcaatgcaggcaaacatttatgcgacatcttccaactcatagccaacctagcaaccacaaaagctgggctcccaagaggtcactctttcacttatcagcaatggactaccagtgatcgacctgctgtgtgtgggggaaactggaagtgtacagatgagtgattcattcatttattcttatactttttcacctaacagtgacttactgcggtcttattttgtttgaagcacaggtcctaaagatgtggtgggtagcaagaaagagtcttgatcttatgttccacttagtggaagaaataagatttacagtccattatcaaacaatttcgtaacagtccagtcacatgcacacaaagtccagaagaatgtacaggagatttgtagtttgggatggatcataacatctcacacataaagggtctcaggtaaggtgagtattgaggtggctgctgcagttcgttttcttcctccctggttctgcactgggcccaggtctttctatttaggctctctgggtgcctcacagacccactgctctccccagggagcacatacctctctctgaacctgctacctcttctcccccacgccccgtcccagtggacacttggcctctttaaacctccctccagtgtcctcccttattgatggccacactgagcaagtgtggtccatgtgtcccatgctgagatatgctaaaagagcctggctcttcctcagccttgaagcacattaaagaagtccctttctgttacaccagttttaggcctgaatccggccccagaaagcaagatgggacagtgccaagcctcaggaatgcaagcatgttagggcaaacaagaaaaatccactttgctgtatttagaacagagcatttctccttcctttatttttattttcatttttccctttgatcttccctggtgttctccctctgcattctcttttttgggtcatacttatttctgcagtgaacaaggttatgacatcatccctctgtccccactcatccttccaacctttctgagacaatcccggggccaagaggagactgagaagctgggggaggtaggatcttcccaggacacctgcccagcgccaactaggtgttgagctgcctaccaacaaccacgagagggcgccccttccccatgcctctcctgcggaggctccctcgggagtccaggtttggggtgggtcagaagtgctgcaggccctggacacaggcttgtatctggaaggtgacagtgcctctgcctcatcactgactaatagaaggccaaccttcattgttatttcctccctgtggcagaactgggttctgaatttctcctcaagcaaatccccaaagcatatttttaacctaaccttgggttaataagtatagtttttcctatctttagggattcaagttctccctggggtttggaacagagctagatcctgccttcacagacccctgtaaatcaaggtgaatcgaaagtggcatttaaatctggccttatatgccaagaaatggacatcttcatgcttccaccccgctggtgatctcggttcccatgacacacctacactttcattaagtcacccttgttcccacgtctgccatagagttacggagtccaactctgasacttcactaagactggtctccttgtgtgtttcctattcttctcctcctggcaatgcccagatcctccttctaatcccttctcaaagcttgctttcaggaggaagccagccgggtccctaccagggcagtgtggcccttctattctctgcagtcctccattctttctgtaccactgtggtgtttgtgtttaattctctgctcctttatcctgcctcttacatatctctttcctgagctagatgcaaaagctgtaaatgaagattggcagacataaaaatatttttaaaattatgtaatgaaaacaatataaacataataggaagtaaaaaatgaaaaaatacaataaatatgataatggattaatttctataatacagagagaattcctaaaaagccataccaaagagatggagaatccaatagaaacggccaggcaactcagagaaggagaaaaagtattggccaataaatatatacattaaaaagttgcccaacctttagttttaacataaattaaaataagaaggcataattttaatataaaagatagactgataatacccattatttattgtttactagaatgggggtaataagcatgcctcatacgtagttggaaggagtacacgttaaagcacaatttgaaaagtagcataaaaatagtgtatggatgtcttttatacaaaatcatctcattgcagaattatctgtgactgtgaaatttgaaaataactgaaatgtccatcaatgggggatgtagtaatttaaaattgcatataaattgatattctctattttgattatgtgaaaggatgctttgccataaattgttgagggtaggggagaaaaagagagagagagtgtatgtgtgtgtatgtgtgtgtcaagaaagaggagagagagagagagaagggagttagggatgatgtataccaaaattgttaacagtagtttctttagagaatgaataggtactttcattttctgctttatatattttaatattcttagggttttgctacaatgtaaacttgctacaattaaattttttaaatttctttttgagacagagtttcgctcttgctgtctaggctggagtgcaatgatgcgatctcggctcactgcaacctccgcctcctaggttcaagcaattctcctgcctcagcctcccaagtagctgggattacaggcatgtgccaccatgcctggctaattttttgtatttttggtagagacggggtttttccatgttggtcaagatggtctcgaactcccgaccttaggtgatccgcccacttcggcctcccaaagtgctgggattacaggcgtgagcccctgtggccagcccaattttttaaatttcaagtttgaggaaaaaaggaataatttgtttacatgtttgtctcycccactaaaaacataagtcaatagaaagctgaaatcaaattatatttggttcatatttggtttactgtataaattacatttttgcagtgactgacagagtaaacactccattaattttttaaattacttttcttttatacattttaagggtggatgctttatttagcacatacttcattccccctaatgttatatttacctgtatttatacatttgccttcccaagtagagtacaagtttcttgaggcagatcaaatagggactctataagctcttatcagttctttacaaggtgtagattttccataagtgtttgctgtatttgtcagatgctgaaggattgaaagccatttttcctccttgggctccaacccccacacccacattatcttcctcttccatggtggggtttgagtttagaacatactaatgtctcttgtgactttgaaagattaggagtctagtaaggaatgtctccaagttaggttctcagttggaataggcactggagcagatgaagaccttgcttaggagagaatccacagcttaagcctggaaggaaacttgtttaagaaaaaaatctgcaaataattgccatgaccttgaccacgaaagtcaaaatctgattgactaagctttctcttttagtcctggggacaagtttatcattttctagaattaaaatgtcaggagaaaaaagatacatctctccatccaccaacataataaggcgtaatgtcaggaaagcagagataaaacattaatgcctttctttactgtactctcagtgccaatctggtcatctgattgaagtacggagatagacaactgcaaagcaatgccagcgagagcgaatgcacaggcacactgtgaaatgctacatttaccttcttcagcagggcaggaaatacctaccaaaagatgaaaagatctcagttcaaactaacaaagaataccatgagtgctttctttttcttttttcttttttttttttagatggagtctcrctctgtcacccaggctggaccatgagtgcttttttaaacctcrttttaaatctgaaagaagaatgaatacattggtatgcataagaagtttagtatgaacccatactgtgttttgttatcaacaaagaaacaagaacaaaattggcaccctttcagtaagctcagctgargtattttcacactgaaggttctgcaggcttctggagcccttgagaactgagtaggtaggttcaggcagctgtaacaaaataccacagactcggtggcataacaacaaacgtctatttctcacagttgggaggctgggaagtttaaaatcaagctgcacacagatgaggtgtctggtgatggccctcttcctgatctgctgaaagccacctacttgctgcatattcccatggtaaacagagatcatctcttctgtgtctattcttgtaagggcactaatcccattcatgaggactctaccctcatgatctaattacccgcaatgccccttctccatagaccatcacactgggacttagggcttcaacatgtacattttgggtgacaccgaggagtcagttatgaaaaaggcactgggagataggtagggagatgtgcaaggccctgaggatctgagcctttgagtctggagtgcaagtccattctcacaggttaaggcaggatcctgaacaaacatttgttgaggtttttctttttgtgtttcacataattctttatttttattttttattttttatttttttgagatagagtcttgctttgcccaggatggactgcactggtgtgatcgcagctcaccatagccccaaccyytggggctcactcaggtgatcctcccacctcagcctcccaagcagctgggattatcaacatgtgccactactcctggccaatttttccttcgcatacttcttgtacttgcacagtggagacacagacaccaatacatcacaatacactgtgaaggaatgaaaggaaatagaatgcactgtaggcagaggtgccagctcgtctctgcttgggggacagtgggaagagctacagagaaggtgtcattgtaggtgcctggtaaacaatagctgttgtcgggtgtggtggctcacacttgtaatctcagcactttgggaggccaaggcaggaggggcgcttgagcccaggaattcaagaccagcctgggtaatgtagtgagaccctgtctctacaaatttttttttttttttttaattagcaaggtgtaaggtgcatgcctgtggttccagctactctggaggccaagctgggaagatcctttgagcccgggaggttgaggctrcagtgagccatgatggtgccactgcactccaactggggtgatacagcaagagcaagatcctgtttctaaaaaaattaagcaagccagaggtggtgtgaacacagagaraggtgggggcaagaagaaggagacagattgggatgatgaggaaggagattcagggccgagggtgataccaggaggcagagcctgagtatcacctccttcccttctccaggaccgggtcccttttaggtgagactagatgaaaagggctcttcagcagctgayttcacagcaactaatttctgacaggtcagagttggcattgctcaaatctgggcttcatttccaagaagtttcacaagtctgccaggggaagtccctggacttcttgcttctttcgtgtaggacaggctgtcgaaacctcagtrgataaaagacctagagaatgtgtatcccagaagaagctggccaaggatatgggagcaaccaccatggaccagaagtctctctgggcaggtgagcatggggttgataattcagcagsaaakttggtgaggaaggaagaggtaacaggtctrtagaagaagtaatcttcctcctttcctgggacttcagtctttccgttgaccttagtgtcaaaaaatttcaagccaatgcaactgttgtagrggaaccacctgatctttcctgaatggacaaaaatgcagcagtagccrgaaccctttgcactggcaggatgttctcagtttgtgcagaggtccttcttgtccacattagaactggagctaagacaggaaagaggccaagctttcttagtctcttggtgtatgagcgttgtattgcgagtcacatctttcttgggctctgctgtggttatattttacaacttttggagagccccacatttctcatctgcagaatggtttattgaatttaatgttttttaaactctccctttcaactctaaagttctgatccaaaactctggcttttgtggtggctgggaattgggatgagagtggggatgaggctaaataaacaaggctatgagtgaacgggggacgtttaccaggaggggaggggagggaatatgtctgctggaggaaagaaatcatttatttgtgtccatacctctttcaccttgtcttaccctctcaagccatgaagcccccacttggcaagagccttttgggttccctgttgaacttagctgagccctggactgacccttgacagggtagagcccgtagggaggccacactttggagaagggcctggaggctgacctgacagtggatgtgccacagagaatttctctgaccatttacttagtgagtgtgtggagaaccagggcctaacctccctgcctaaaaaaacatgtgagtcatcaagagagaacagtagagccctgttttccagccctaagctctgcaggggrrgaatcagctccagcagctgtgtcattgaaagttttctctcctttttggctgcccctttcttcacttttggacccgtaaaggtttcagagtgaacaatatccccaggctggggggattgcagttccaggagtcttgtccattgggcaaagtttctaggatccaggggtctgctctttttttcctttaggaggatgtgttaagtatagaataatctcaccagtcttcctagggtagatgtcctatggagaagagactgggcataatttcaaacatataagtttaaagcactaccagggccagctcacactgcttatcttgttctaagagttaattgtttatacatagtgggaccatctcaatttgcctgagatagttctggttcaagctatcgtcctagggaaattattaataatgttcctttttactctttgaagggtctcattggacaataaactatatggtcaccctacctatattcaactccagactggactatgagctccttgagtgcagggaaggcattaactgcattataatttccccagtgtcctgagcaatgcttagcacagagcatatgattcaataaaactttgttggataaatgaatgaaaaaataaattcccagcttggaacatgtttctgcctaggaatgtagagacacaaggcaccccagggctggggacctcaaggtcctataaagaaaccacaggccgggcgcggtggctcacgcctgtaatcccagcactttgggaggccgaggcgggcggatcacgaggtcaggagatcgagaccatcccggctaaaacggtgaaaccccgtctctactaaaaatacaaaaaattagccgggcgtagtggcgggcgcctgtagtcccagctacttgggaggctgaggcaggagaatggcgtgaacccgggaggcggagcttgcagtgagccgagatcrcrccactgcactccagcctgggmgacagagcgagactccgtctcaaaaaaaaaaaaaaaaaaaaaaaaagaaaccacagcagctgtggctggggagcccagatgaagtgtggctctatcttgtatgtgagcacacccacattttcactgccattatctgggacagcagaaccaggtttggctcaacagatttctctttccacccatctattgcaggtgtagtggtcttgctgcttctccagggaggtaagtagtcaataagtcactaccgcctggatctcctggcttgggtgctttcatttttgatgtacagtttctttttctgctacatgctttttctcttgattactctctccggttctgccactgacatatttatgacactgagtttttattctatctttttgtgtatcccttgttctagttctttttgagccactctctctctcacccctcccccatagctggcctcaatatgtgtgtgtgaatacaaacatacacaatgtttgtattatctgtttctctactgatctgtgtcatccatccatacatacatactgaatcttagtgctccatgggtgtttcatatgttggtggtatctctgtctctcaatgtatttttttttaaatttttttgagacagggtctcactgtaaggtccaggctgtagtgcagtggtgtgaccatggctcactgcagccttgacctcccaggctcaaacaatcctccaacttcagcctccttagtagctgagactacaggcatgaaccactacacctggctaatttttaaattttttgtagagatggggttttgctatgttgccagagctggtcttgaactcctgggctcaagaagtcctcctgcctcagcctcccaaagtgctgggataacaggtgtgagccactgtgcccagtctcagcgtatttcttaactggggtctgggtactcaagagccagcactaaaggcccaggctgaatgaccctcagaggctctggcagaatgagcaaatgaygcaatggctgtcttggggagaaaattgtgactttctggactctaaggcaacagccctagagtctcactggctctcttcactctactccaggatctgcctacaaactggtttgctactttaccaactggtcccaggaccggcaggaaccaggaaaattcacccctgagaatattgaccccttcctatgctctcatctcatctattcattcgccagcatcgaaaacaacaaggttatcatcaaggacaagagtgaagtgatgctctaccagaccatcaacagtctcaaaaccaagtsagtaagatgggggtggaagcatcctgcatggrttttagaggagggaagctggtcttaagctgacactaagacatactatctcattcattcattcattcctatatatttctctgggtgtatttctgatcctaactgttctcaccagtgcttcatcccttcactgaacttcactttagttcaaacagccaggccctaattgtccattttctctacacttaagaactctgttctttagacaaaggcttccctggcagccagaaawtaaataatcatcttattcttctacttcaggaatcccaaactgaaaattctcttgtccattggagggtacctgtttggttccaaagggtaagactacatctttattttttgttcatttccccatgtaatttttgatcatcatcatttttcctccttctaagaagagatattaaactaggctttaagaggttttcccttggccaggtggcaaaactgatctgagatttgtcataagcagaggaacagcattaggtttcctggkgtctttgaaggaattcttctggagcttaatacaagcccagacactsaaggcttgagagaaagtgggccatgaacaatattcagaaaattctgaattatttacatgaatgtttttcactttatggattatagaattagttttaattggaaagtgcaattttttttaaaatcacttgagggtttgactttgtgccccggggtgggttggatgggttgcttccattcagaagccccaccatggcccatagcagtcagtggagtacaatgtctgggatcatggctgtgcagccagatggcctcagcaccatcagagcagcagaggaaacaatcagtcctgctttgcttaaaatcaaaatagctattgatacaaagcacacattcgaaataatattttctattcccatggaaatgatatcccatttacatcaagagctaaatgaaaatacataaggataaatatcacattttttcaatcttcagctacagtttatctaattttgaatttcttctgctttattatttaaagtgctaacatcttaaaaagtccagagatcttaaatttggctgagagagtcttggagtttttatagaaatctgatagtacaacttgtgcaacctgtcagaagtcagttacagccagagtrggcagagagaagaagtagtgttagaagacctatgtagatttctgcacacagaaagaaggaagaaagatcaggctacctaacttttttggttctgtgttaactcctccgtgaacacccttcaatatgaatgggcttccatggcacccatccttctaattatcaaattttctccccttcctaatacttgcttaggtgttgatgcaaataaaaatgtcttcatttattcattcattcttgcattcattcattcattcattcattcattcagtaaattcattcagtaagtaattgtttaccagtttagtggttgaaagtagaactttggagatagacgtgtttggtttggatttccctttagatgcatgcaagctatgtgacttttgtcaagttctttatgtctgtatgccgcagttttctttaactatacaataagaataataacagaatttacctcagggtggtgttgtaaaggcaggcaacgcaagcaaactgtttagcatagtgcccctgtgcaataagggctcaatggttgcagtaatcattgttatatgattattgttgttattattaggtaaatgccaggctttgtgccaggtgctgtgcagaataattatatatgtgtaatatacaaacttgcttctaaggaacaaattagtaaatttctattgaatgggcagctctcctaaaattggaggcatctgcccagaggctcaggtgcaatggctttctaatcattgtaagcactttcaaatgcaagagaaaagctagaaaactatttccaccgtagttttctgatatcaggccagtttcttgctatctcttcaacttcaaagatgagatacatgcaggaatcaaaatctcaatttaatattgagtaaaacaaaattaattcaaggctctaagaaagcctgggtgtgggaggtattgtaagaggtgaaaagtgayacaacttaaaggttatgtcctcaggaaaataccagtatctcatctacagctttgggtttaaaatgctattggtgcccttggtgtgggcatctgagaatcaacttcatggcttcagarttctagttcagatgaagcccttgaggagctgctgatttcaagtcctgttttcatcagaaatcccgggggtggggagatctgcgttgcctatttgtggccgggatgcttgtttggggaccatgaagtcactggagtccagttctttttcctggaacttccctaaatgttatccccttgaggcacatgaagcaggattagtaccctcagtcccaatttagaggtggccagactggaacccagagagcaggttaatgacaaagtggccatcaatcagaaaggactctaaccttggacttgaatctagttctcctgaccctaagcccaccacattgcaaactgcttttccaagggtgtaaagtgttaaagaaaaccaaagctggcatccgggagggaggtggggggggtcagcaccccgcccggccagccgccccgtccgggaggtgaggggcgcctctgcccggccgcccctactgggaagtgaggagcccctctgcccggccaccaccccgtctgggaggtgtacccaatagctcattgagaacgggccatgatgacaatggcggttttgtggaatagaaaggggggaaaggtggggaaaagattgagaaatcggatggttgccgtgtctgtgtrgaaagaagtagacatgggagacttttcattttgttctgtactaagaaaaattcttctgccttgggatcctgttgatcggtgaccttgcccccaaccctgtgctctctgaaacatgtgctgtgtccactcagggttaaatggattaagggcggtgcaagatgtgctttgttaaacagatgcttgaaggcagcatgctcgttaagagtcatcaccactccctaatctcaagtacccagggacacaaacactgcggaaggccgcagggtcctctgcctaggaaaaccagagacctttgttcacttgtttatctgctgaccttccctccactattgtcctatgaccctgccaaatccccctctgcgagaaacacccaagaatgatcaataaaaaaaaaaaaaaaagaaagaaaaccaaagctggacagtatttaaagcagtaaaacagattttattcaggaaatattgaaacggggaaaaagacctcagtatggtactgggttctattccaaaggcagcaaaggcaagtgaggaaatatagccaaagagcacgctaggggcaatcagtggatggaaaatcataaagaggaaacactggggctagagggatggattcttgctaaactgattcaacaggattcctgccaaaggatgccagagcgatgagataccacctgggggatggcagggggtgagtaatcaggtaccaggtctgggggtttctggctaaactgacctagcaggactttttctggaatcggacactgcaaagacagacacagaagcccaagattgaggtccagttgagaagagggctcagagaagcctacctaagtttggtcaaggcaagagtcttagccaaaggcagctccgttacccttaggaaggtctgcagagaatctagtcttcctttacctggctggatcaatgttccggcccaacaatcctttttctctcgtctgttccaaaaggggaaagcattagaatagacaaattgtaagtgaatattggggaagagaagactgctcaggatttctgtgaaaaatgtgttacactacaagtgttacttgttctttccaaaaagacactcgtattgcttctttccaggttccaccctatggtggattcttctacatcacgcttggaattcattractccataatcctgtttctgaggaaccataactttgatggactggatgtaagctggatctacccagatcagaaagaaaacactcatttcactgtgctgattcatgtaagtcatgaatcaagtaattcatgtgagtcagatgccacggtgtactcagtactctgatatccagaatccatggccacattgggagacaaaaaggaggagattgagtctaacagccccagcctttctgaagctcccactaatgagagaaaagccctgattcctattttaaggcagtaacaacatgaaacagtggagcccccttgcacatttattttgatgtccttctttttgatgaagaacatcaaaataaagcaacatccatatgaaagagggtgtagccataggatttcctgagtactgaggtggcctcacagaagatctatcagatagatctgaaaatctatcaggtagaaaccaagatagttattcctgggtagagtgaggctggggttctcctgcctaatgtggagacttcctgagcagatacaggcacaaggcatccccatgtggggtggggaggaaagggttgatcctttccatctaatgtggttctagaaacctcatrgattccaggcaagaagcttagcactgtactctgggaaggggaatattgcacctygtttctttgtttttcctaggagttagcagaagcctttcagaaggacttcacaaaatccaccaaggaaaggcttctcttgactgygggcrtatctgcagggaggcaaatgattgataacagctatcaagttgagaaactggcaaagtgagtacatcagagcaactttccatccctctgyttccaatttggtccatgcaaatgatgcatcagcatgtttgacggatgargggaggaggaagagagggaaggtcattgtcctaaccctgcatcattcagccaggaacaacttctttacagagactttcaatccttctagcagcatcattcaaagccaaaacaattacttacaattgtttctaccactgctcgtcacaaaatctctcccattgcttttggcactttagagatctggatttcatcaacctcctgtcctttgacttccatgggtcttgggaaaagccccttatcactggccacaacagccctctgagcaaggggtggcaggacagagggccaagctcctactacaatgtggtgagtaggccaggggaaccgcaggggtactggctgtgggggtggggcyggggagagtccagcatgtctagagttacttctgtcttgaactgaggaagagctatgagcccaagagggaattgggtagccccaggagcaagtgagtgcaggagaagtgctttgaycaggcaccaacaaaatgtcacctagaaaatatcagaagtgctgatagctgaagtgccctaagctctgtctctggctcagagtgtcccccatcccagtcttctctggattctccatctttcatacatttcttggcatctacacaggagaacagaacttgkaccttcctgtgtccatctatattccctatttaattctatctttaaaamaaccccatgaggtcagctgggtaggaaatgttactcccacttcacagatgatgaaacagaagcttggcagattccattgactcttcaaggtcgtgtgttgtgaacttcctggtgatgggaaatgaaaagtaaaaaaaaaaaataatgttgttgatgttgttctggaacataacttatccacccaatgggttctccttgcccattgatttatcaagataggagaattgcaatagagaaagagttaaagtcatgcagaatcagctgtatgggagactggaattttattattactcaaatcagtttccctggaaattcagggatcagggtttttaaggataattttgtggatgggggacagaaagtggcgagtgctgattggtcaggttgaagatgaaatcataagggttcaaagtgggtttttctcgctgtcttttgctcttgtttgggatcacagaactggttgagccagattcctgggtctgggtagtgtcagctggtgcatcagaatgcaagatctgcaaaatatctcaagcactgatcttaggttttgcaacagtgatgctattcccagctgcaatttggggaggcttagaatcttgcagcctttggccgcatgwctcctaaaccataacttctaatctcatggctaatttgttagttctacaaaagcagactggtctctaggcaagaagagagtttgtttctaaaaagggctgttaatcatctttgtttcaaagctaacctagagactaaattcctcccaaattsagttggcttacacccaggaatgaacaaggacagcttggaggttagaagcaagatggagtcagttaggtcagatctctttcactgtcataattttctcagttacaatctttgcaaaggctgtttcatatatatggatgtatattcctaaaattttgggagaaaaaatatctgtgttgcatgtttccaggccttcatattcaaagtcacaaaatggatcggtccagagctagatatgatttctggttggggttttctaggccttcatgtggctaagtcacatcagcctccttcactccttcctctctatcagttatctttaaggataaggagacatatctttgtcttctctaaccctttattttgttctgagagcaggaaagccaaaatcagcctcttacctcccaatctgtctataaacyaaaaataaaattctaagccccccaracatctgaacaaatccttcctcttggccaagggcattcaaagttaatctgaaaarttaattcaggtcatgatgggaagttgggtgtcagacatgcctcacagctgaccagcattaacatcaatacagagaccttaagactgatagaagagaatttctaagtctgatgagaaacatttacaatctagtctttctgaagcctgctacctggaggctttatctgcatgataaaaccttggtctctacrccacttatcataacccagacattcctttctattgactccaggcctttacataataactctttcaaccaattgccaatcaaaatatctttgaattcacttatgacctggaagctgcagcttctagttgtcctgcgtttctggagtgaaccaatgtacatcttacatgtactgactgatgtcttatgtttccctgaaatgtatgaaatcaagctgtarcctgaccaccttgggcacatgtcctcaggatctcctgagagctgtgtcatgggccattcgtcactcatatttggctcagaataaatytcttcaaatattttacagagtttgactctttacgttgacatgtcccattgggtgcaaggtcattgtgaggcctcatggactaggaatctgacagccacctttgtcagtattcacaaagagccattgtgtagacaagttccacagggattttgagttgactcaaaaggggaaggaagatggtgacaaccttgatttcatgttttctaggttccttgactgatttcttttgtgatccactgtctagttcctttcagaaattagaaaaagttgcataagcctcttgctgctaaagagcatatgtgcattacaacaagcactctggtccggggggtctggtctgttcacactcggatgtagaaaagaaaccaggcagtcacctctgtgaagtttgggatagaggctaaaaaaggtctgacacctttctttccccacactctgagcctccatctctcttcccattctaggaatatgctgtggggtactggatacataagggaatgccatcagagaaggtggtcatgggcatccccacatatgggcactccttcacactggcctctgcagaaaccaccgtgggggcccctgcctctggccctggagctgctggacccatcacagagtcttcaggcttcctggcctattatgaggtacctggaaaccccctgtaccctcagctccctgccatgtctgggtagatgttccatcttcaatttgacagcagagtaaagcatcctgagtgttgcgaaggggaaagggcagagtactactgaacatgtgaggggatctcctaactctgggttgggagagggtcagggaatgcttcctggaggaagtgaaataagctggactctgaagaggagatggagctagccaggaatggggataggcagaggagagtgcgagaaattgaaaaaggaagactaccccaagttcttgatttgagcagctaagtggatggcaatgccatttacagagatarggaagactggagggagaacagagtggacattggtcctgctcatgagatcagttttggacgttctgagtgtgaggagcccgtgggacatacagataacaggtgagtcattgaatatatgggtttggatcacagcaggccagtctgcactagagaggtagattcaaaactatcagcataaagctggtacctgaagccaaaccatacagtgagaagtgaatgaggccccagacacacccaaaaacctcctacacctgagggacatgcagaggaaggggaacatattaaggtaactgacaaggaactacaagagggataggaggaacccacccagatctgtgccaaagaccttagagaagtaggtgtttcaaaaaggagggagtggtcaaatgtgtcaaattctgtgcagttgtcagatagatcatagggataacaaaattgttctgctaattataccatcattcctctctgccctccaatctgggaaaatttatttaaaaagcataggggaagatataaatctaacaataggtcaaccaacagaaactctttggacactcccatatcccaaacactgggtactgtgaaagctagaaataagtaattatccatccttgtctctaaaggggttattgtcaaggtggaaagaatgtgaartacagacatagctagttaaacaagagttcaaaaacaagataactataacatttaataaaatcagagaggtattgtaaaacaatatgggattcaatgaccaatgaatggtgtagagtgacatgagatcagagatgggtgactggggaaggctccatggaagaggagaagtttatgctgggccttgaaggattagtagaaatttgatcaggtagagaaaaaaaaaatatcattctatatcctggtctatctttggagtcccagcctgacctctcattgtgagtgtgaacatgccatcggcccatgctgaatgacttggcacccaccaaggtacccattcagtgtaatgctcaatttttcccttcatcttacacataggaatgattggcacatcatcaattcaattggcaacaagaatgggacatgggtcattgtgagagtcctcattgaatctcagggtgcctgatacataggaagtgggagagaggctgacccatccttgggtagttctaggttgatagcaataacactcttaatataagggagaagagaggtcattgctcagaatctcctggtagggttataatatcaaccactagatatgcacttcccatctcatggaaagtttgatttgattgttcagttcataatgactctaggtcattataactttgacaggttgatatktgcttaaatattcaactttcattttctgccctcattgtagtaagcacraatgtagttcatccaaaaagagtaatcctaaatggattttctatgtgatgttgaaatgcattgtttaattgaagatttatcttttttagagctcttccttatgctaacagaaagaatatagctaatgatagaaggggagccccaggacagggcatattggatatgggacrggacagaggaggagtaataagatttaagtggagatgctacaagatgaggaatagtggtgatggtcatgataatacttcactttagaagtagagcactttactgttttcaaaaaaattttttaatgtgtattagttcatttgatcctaacaacaacactgtaaggtagatatgttgaaagcattattataattatttccattttgcaaatgaagaaattggaagatttattggtcggtgctggggtctgatctggaactcaagtattttctgatttctagctgctgtgtctcctcctgatgagactttagcacagacacttcctagaggttcaccttggaacacccacttcatatgatatatgtggtcatttctctcattgtctgatccttgggataaaggttctgatattttccccaagtccctagtggctcacctgccctgtctaccccaaccaagtttcaagaataacccattactgaccctctcgtttccctttcccytgccagatctgccagttcctgaaaggagccaagatcacrhggctccaggatcarcaggttccctacgcagtcaaggggaaccagtgggtgggctatgatgatgtgaagagtatggagaccaaggtaggtgggccacaggcagatactcctttaggtggggaatggtgatatgtagtaaaatgcctgaatactctaygttcaaagakagaagcttcygaggccccagactctaggatgggatccagcagcctttatagctcaagtctagtagtgactctatgtcayacccgcgagcagctgtggtacaggtagaagagttggaaaggacgcaaaaaagaattgagaacaagtaagtttattctgataagtgaggagtggagagaagagtaaggcaaggagaagggagrgggaataaaggagacgttggtgcctgtatagataatctactttgttaattatctcrggacaaactgttcagtccttctcatggattacctagctaggaggctccagattcctgagcctaccagttcttagaccttggtaagacatttgtgttcctttcaksgttagrrcaaaaaggaggcttgagtgtaattgacaatcctggccacttgtcttgttaagggcttcctagtttcttcccttattatggagagttttctcagcctccaagaatgccggaccttgagtgtggtgactcaagtcagaatgagatgtagctaatgctgatttggtggctctctctccctgagcaatcttacccctcaggaagtctctaactccagaaaaccagttagtctactgctgtattttaagcttagtccctcatctgaacctsatatggtcctgggcatttaggggccacccttcraatctctgtgtatccttctgtgtctcccataggttcagttcttaaagaatttaaacctgggaggagccatgatctggtctattgacatggatgacttcactggcaaatcctgcaaccagggcccttaccctcttgtccaagcagtcaagagaagccttggctccctgtgaaggtaacagtccaggctggagctgggagtgggcagacagctgggcagaacagggcacaggagactgggggagatcatcttcacatatttggactaatcctttctcatgstcctttggctcttctgccatgttttcttagcaattaggctggttctgcccttttcataggcttcccatagacttttaaagtaataataataatattgataaattttggctaccatttattgagcatagtatgagctaaagactttcattacatatatattagggataaatattgacaccaccacaattcttggttacaaaatcatcagcctgtcttaattttctaaatcacaataaatctgactctatgtcctcaattcactggactgatgataatttccatctcactcattacctgakgctcttttcccccacccacagttgatcttacttagtctagacatttgggagctcccatggtcattattgctaygcctttacccaagcctccctattaccttgaaggtcggtggctttgctgctgctccatccctgggcccccagttccctaggtgygttgtatatcctcctgtgcagatgaaggctgttgctgaccaaacagttatgctgtgatacattggttctagggcagagggtggagaagcagggcgctggggctcactgcagacagacaactaaaagactggctctgctatcctggcaaagggcctagaaccatttgaaaactcctgattagataattgggtagcagccttccaactctgagcatccattgtttagtaacttgacttaggcctcagtttactgagttgggctttgaaatatttttccttttgtttccaggattaacttacagagaagcaggcaagatgaccttgctgcctggggcctgctctctcccaggaattytcatgtgggattccccttgccaggmyggcctttggatctctcttccaagcctttcctgacttcctcttagatcatagattggacctggttttgttttcctgcagctgwtgacttgttgccctgaagtacaataaaaaaaattcattttgctccagtaagtatggcctcatttattcagtccttgaccctgtgatatcaggttgttctgtccctgctatttgtgggatccagagctagggtgaaaacgaagttttgcatatcatgtttaaatattaaaaacagctaacatgctgttaaaatatgacttatgctccaacattaacacatacaactttgcaaccacctagaaggtcagaacctgaaaatttaaaattctcagactccttagaataccacaccagaattcccatctttgcctctgtctctcacagtaggagcctcatgggcatacttgtggacattgtaggctttgtatccaagcttcatctgcactctaccctctaccctcaacctccaacacacaaacccacccacacacacatacacctgcctctgggctatgcatgtgcacaccggcgttgtggtccactctcagtaaagatgggcccagggaaaagtcatgtgcaggctctgagagagcgcacaggctcttctggctatttgggtagaaatgctggatgtctggatcatgatttagaagaggargtatgtgagctttaggtgaatgtgctcctagcctggcagtctccttaccttgtggggaggggtgcaactggaagagggcccaagtgggaccctccaaaggagggtcagcaaactacggcccatggatcaaagctagcccactgcctgtttttgtaaataaaattttattggaagacagccacactcagttttttttacatattgtctgtggctactttctcccaacaatggcagagttgagaagtatgacagagatggtatggcctgcaaagcctaaactatttactctctggccctttacagaaaagtttgccaaccccttttctaaagcacggtgctcacagcaccaggtctaagactgattccggtgtcagactccttaattttaggatgaactgttttcccccattttcccaatttcttccaatcttttccgtctagaaaagccacttttatcctgacctttgaacaacagtttcatgcacatatttaattctcatggcttgtgaagttagtgataataaacccaattttcagatgagctaactggggcatcattgtaagggtacatgtctgataagtggtggcaactagactgaatccaagaaggcggctgcaccagaatgtccgtggaggagggcattagaggtggctacacgatcaaagcagcataaggtgggaatactaggagacttttttcaaaactgctttgaatatcctattatgatggaaaaccccagacgtacataccaaagaatgggaatggcaagcactgacagatactargggaagttagtccccaaggtccccttgaatgctgctccagtgctcagatcttcttactacaaggtagaaattgcttgggcacctctctggctttctaactctggctttctaactttgcttcctatggtaattgaattctcaagaagcagaagatcagagtaattaagaacatagtctggagccagatctcctgggttcacacacagtggctttgttaccaacctagtggctatgtgaccttgggcatgttatttatcttttatgtgcccccagctttctcatttttaaggtggggataataacaatatctacctctcagggatatgataatggttaggtaagttaatatttgtaaggcatttgggcaaatgcccgacacatcacaaatactatttgtgtttgttattatttccattaaaaggaaaacattagataaaacaaatccaacagagtttatttgagcaaagaatgattcaatgaattcggcaacactcagaaccagaagaggttcagagagctgtcctctgcaatatggagaatgagtatttatagacagaagagaaagtagagaaatagtctaattggtcacagccaggagtttgccttatttaaacatggtctgatcagttggctgcctctgattggctgagatctggttactgttacaaaaaaatatacttctaagttaggtttcagtttatgtacatactacattaggttctagatcattaggagggactcaaactacagagataacctcaggccaaagttaatttaacacttccattatccagctgctgtaacgggcacaagagagagtatgggcagctgcccaacacattaaccttggccttgcatggagcctaagagcccattaaaggtctatgtcttgggctctaagccgtgaactcatggagccctctctcatgcttactgtgaggatagaaccatttgttttgcaaacatccaggagaagattaaggaaatcaaggccccttgtttggctggggttggggatggattctggtcatcctttcctctcctctcctctcctctccgctactttcctttcctctcccctacacccctacccactacaacccctttgaggagatctttgtaggctaagagtcttatgccaaggaggaaccatatcttagacttgctcaggggcagtatgggtgagagtcaggaggtcgtaagaacccaggccccagttggtctccgcttggattacagctctgctacttctcggtgtgatctttggcagtttgcttagtctcctgtccctcagttttcctaatacgtagaacagatgacagtaatagcatcttcctgaagggatagttttgaataaacgaattaatacatatgaagcttttagcacatcgtaagtgctgaatgaatgttcgctattattgtgttcaacactgctccagttctagttagtcaatgcctccagtttttgacattcttctagtgttcagacagaagctaaacagtcaaaagcctgggaaggatggggacagattttaggtaataaatagctttggaaatgccatcagctctgcacaaccatacacatgtactaaagttggtaggacccatttctgttttctttgtgaatctaatttgcctttaaacggatccggcctcaaagatcccaatggtctgagtagcatctcccagaaaaatcttgaaaatgtacctggcagatctcttaagaaggaggtatcttggcatatactgggagtggagccagcagcaagactctctcctagatgggatttcatttaagttaggctatgtcgatgcctcggggctaatgtcaataccaaaggtttttttaaaaaggcctgccttggaggacagcagatcacatctttggtactttcgttgtcttctggggcagagggaccctcagaaatggtctagaaacctatgatgtggcatcatggtgggcttcctgtaggtggcatccctttatgtatgggtagtaagactggggaaggagtggaaggaggtgggtcctaaaatattgtgattttcaaagccttgatccctgggcatttttgcagctgtcttttctctgatatacattgttcccgggatctgtcccagggcttgctgcctctcctttctgagtcaaagcataattagaaatgtctgtcccaggtgaattttctctgtcctctgtaaaccagacaacatttgaataaacagaaacaaccttggaaaatgatgctttctcatgccaaacttgatagaactcacaaacttcttgtagccactacccaaatctattgctataatagaatcaaggtattagggcctgggcagggataaacccacccaggatggtttatccaggaatgcggtcaaatggttatttgatgtcctttgtccatactcctctgctagcatccatctggtctctttggacacatgggacctactctgaccccaaatgactttggactctaggtcagcctcatacgtgtgccaaatatgccattttcctcaaagaactttcagtcaacagccttttaaagctgccttcccatgtgtccctgggttggttacccaagatggaaaacacagataagattcagagagctaaggggagccgtatgccacccctatccctttattcctgatctcccatcatgcctgctgaagggggtcaggtgcaggatgagagggcctgcatgctccctataaaagctgttgagtaccccactcagacctggaacttgcatttaggacttcccagaaaaatgggcaagctgctgattcttgctgatgagtctttcccaggcaggctgagtttagctttcagagcagctgcctgttctcctcagttcacttgctgtctcctcccctatcctatgttccaaaggcctgcactctgtccttcctccgtctcttgcagccttcttgagttcataacatggtggggaagtaaggaagagttcactgagcaccttagggcttcatactggagggaaagtggataactctggcagaccaggacaaggccatttccaccacgtgaaataatagaagacttaggccagcccccaccccaacccctttccagtgttctgtgattcccgctcagtgccagccacagagcaggagcccaagacactcacttaatcaaagattaaccaactaccaggagcaattagtagaaaaatgaataagacagatgtttctctgaatgtagaactctgggagcaggtgcataggagggggtttgggagagaggaagaaaaggcctcaaagagttaatgcagctcccccatggctaacttgtttcccagagagagtgaccaaactgtagaaagaagcccaataagggtgatcactgggatggcacaacagcacatccagggtgtgkttgggtggcttggaaaaggatacaatttaaaaacttcatctgagttgaaaagcagagtgtagttgttcctggaaaagatgagttgtagctctagggtgaagagactgctatgggaaggggccctctgcctgaaatctccctttcttcaccttctatgcctcctgtgcccctccccaccaatctggcttatctttagggtccattcattcaacacatattgatagagagctgactgtgtgctgggtagtggggactcagccgtgtcagcacagtctttgccctcacagagctcacagtctgatgggcagaccaataaacaatcatctttcaktgtggtaagggctgtgatggggataagcacagatgtcaaaggggcctagagggacagcagggagttccagtcccaaggtcacctctcttgggaagtcttccctgacctctgtgtctcaattttatcacttgtcatatggcattgcacctatgtgcttacaggtgtgactttccaccaggctgtgagctccttgaggggagggaccctgcctatgtagttttttgatctctaccacccagtaattaatataggtttattgaaagaataacaacacatcctcctggctcctgagtcacacaccatcacctgagcttccgggtagccaagtgaatgcctacattagccacctgctccaaatatgtcatacactagcctatgttgggaaagggtttatagagcagagggggcgtcaagccccatctccctttccccatttactggccatggctgccataggcttgccccttcccagccagagacaggatgaccctggcaccctctgaccaagatctttttgtctttaggtctggccctcctgctgcagctgggtaagtatcccatgagagggttccccaaaagataccaacagcagaatgtttagcctttgaatgctgtccacagtcactctcatgccgtgcttcattggtagagccttcagcatccttctccccaggagaggcaggttgctgtcatttttctggattcttttctccaagaaattcaactccccagcatcctattctgtgtgtcacaggaggtgccatccacaaaggattctctgtgaatagtatcccctgaagtttgccatgttgctgtacagccccacaacaacctatcaactagctgccaatttaacctaaagtttaacctaaaattgcaccagctaaatgcttagcatatttattgggtaactactgtgtgcaaggtgcttttc

SEQ ID NO: 93778 - DNA, 16526 bp, Homo sapiens
  misc_feature (1)...(16526): n = A,T,C or G
caattgtccacacttgtcctgcatcccattttctagaataatccattttcttatattttatatgagaaaatttcctgtttcttatattttatatactcagaagcatactactcttttgtgcatcactttcttttactttctcagacactctttcatctcatcagcatatcagaagtattttattctttttagtggtgaatttttgcattatcattttgctgggcttgcctcactcccctgtctctccattatctttgctgtatctcaatgctaaatgctaaatattataaaaacaatcttctctaaaagtgtctccttgactttctccctctgcctctaacaatttccttgggaatcctaaaatccagatgcctggctgtccactccttaggctgggttccttttcacttgctgtagtagttattatgggctaacttgccttgtaatgtttgactcactaggtcataagtttttatttacttatctatctgcaccagtgatggtaagccctgtgtcttgtttacttgtatagccaagcactcacaaggtacctgacacaatataggcattcagtaggtaattattaaataaatgaataaacattaattaataaataggttgatgtaggtgcattcccaaggtgtttactgcaaactacaccatctaactataagatcccctataggggattccctgtaggggatgggaattgcacctcttctctttcttccttctagcttgtgactcatcttttactggaaggataccttcttttaatatctcctacctgatttcccatatgcaaatcaacactctcagctttcatgtgttcacaccatgagtaccatctgccagactctatctctttattagagtatttctcctctatatgtgctttaactgatgagagtgctctagaaacaagagcccctcccccatcattccttcatatgcacttgaaaagaatatgactgtgtaaaagtgtatattgtgtaaatttttgtgtaatgtttatatatgtcaattaggccaaatattaataacatgctcaggtctagacacttactgacttttttctttgttctgttactgtgagaggtattagaagtctcctactatgattgtagactggtcttttctccttttagttctggcaatttttgctttccatattttgtagctatgttcatgagtacatagagattaagagtttttatatctccctgttagattgacacttattgttataaaatgtctttatctctaggaatgcttcttgttttaaaatctactttgtctgatatcaatatagctatacctactttcttttggttagtgattgcatagcatactttttccatccttttattttaatcttgctgtgtcactgtcatatttttcttaaaagtagcatttacttgaatatttttaaaaaagaaaacacatcagtaatctttgactaataaatggagtatttagcccatttatatttaatgtaactactggtatatttctggtatatttaagtaactttcccaaagccacagcatgttagtgggagagtgcacactaggcatttcctgactttcaagtccaggatgctttctcattcattacctcagacttgggttaaaggctgtatttcccaccctcacatctgcttctgccactgctgtaatatttagtccttcaagttccttcagagatataggcggcaccgctctggaatcttagcctgattccagaataaaggaatgttaatagccctctgtgagctttccaggagcccacacaataaggttggtaggctttcaaagaaatcagttccattagtgaagtagcacaaacaattgtgaatttccttgaactcacctgaaagccttaagatccaggagtaaattcagggtcaggaccttgatgccatactacaggttgagaacccaaaacatatctaaggtaggactgaatctaggacccacagccaccagcaaagaactacctatgctatattgctagcactccctagctcacctattttacttttttttttttttttttttgagaccgagtctcactctgtcacccagactggagtgcagtggcgttatctcagctcactgcaacctctgcctcctgggttcaagtgattctcatgcctcagcctcccaagtagttgggactacaggcatgagccatcacacccagctaatttttgtattttcggtagagacgggatttcaccatgttggccaggctggtcttgaactcctgacctcaggtgatccacccgcctcggcctcccaaagtgctgggattataggcatgagccactgcgcctggcctattttacttttaagaacaaggaaggctttaagcattctaaaacacaactagggaggcacaggagaaaacagtggtgatctgggaaagctggagtacaagatgaatgaaaccacttaccttcctgcaggtgctcctaacgtacacagtgcctcagtgcctctgtcttatggctatgagctttacagcaatctttctcaaactgcaaaaaggcctaactaaaatccatcttgcaattcctagcacttgcgttaaggtaggcagcatgtctacacatccttctgtaggatgtaggtttaaaaatatcagaagattttttacccaaaagatgcccttgtgccagcctgctttttcatgtgtaaaatacaacaattactgctactaaaattaatttatttggtgctcagtgaatgtttatttagaagccctattttgcataggaaatagactttaggtacaacatgggaattaacatgggtttgagtagtattgggtttttttggaggactggtattcttaaggaatttttaaacagaagataaggcacatgtgcaaatagtctataatgattattatttgtggagtgtttattatgcacctgattctttacaaatatttcatttaatgcttacaactgccatgcaaagtaggcatttgtatcccaattttacaaattaggaaactgagattaaggaactgtcccaatttctcaaaccaaatgaacaatggaaagaatttgaacctcaatggtagaaagaatttgaactccaatatgtgtggctttttccactggttccacatttcttccctaccaatggttcataaaaagaagtagtgagttttccaaatggtacaaacaaaataccagagaagtagaggtgaggaaggtagtcacttccaggtgtgatgattggggaaggggtcatgggggaaagccactgaggtgggcctttaatggagtgggaggtgggtacaggaggacaatattctatattctagacagagggaatggcctcagcaggagggtgaagatgagaccatttttgagtgtggagaacagtataacttaatatgcaagatttatattgagaggctagcagaaggcaaggcggaaagttaaattgaggcaagattgcagagtcgatgacaggcgaaggagaaagaactctatgaggcaataaggagctgttaaactctgccccccaactccagggatttggagccatatacagaaaagatctagaagaaaaagaagggagctacagtgcactgtcacagtgctgaactctgacagaagtggcggcggggaatggaattgatgattccaaggagaaggggaactctaagaccaaagagaagaggactatagatttcagtgaccaatgggttttggagagtagaagaaatgtatgaatcacaaaaactatagtggtgagagcctgggtgatcaagagaactttggaaccacacacggaaatgtgggcaacaggaagaggtgctggcttaggggaaagaaccacctggaaagtgtcagccacacagggtctgtggtcaggtatgttacaccgggggccctggggcaggctgaatccgaggaagtatcacaaaggaaaggagcttcctgagaagagaagaaccaagtgaaggccacttcaggggtagagggctgggaaagggtaggagaaataggagtagaaaaatcaacagaaggaaaagaggtaatgaatttggggtcaaaaagacagagtaggtaatgaccctctatagactttgcttaaggaggaaactttgttcttacaatgagtgaatgaatgactgcaaagaataaatgaatgcaaagttactcaatgcttccatctgacaaagagtgcgtgaaatagccaatcagttgcttcactatccaaatggagaatatagcccactatacataagccattttgaattatataagctactccataatggagcttattagtgtggttcccgggcttgagcccaatcttttcttcttgtgaaacgaaatcaagatagtattgtttccctgtcaataatgggttcttaaatgggcttgagctttgtgagcactgccaatatcaacacttactttagaggcaatcttgataaaggagaatctgataaggcacaagagagggcaaagagggtataaatggcaggttggatgagggacactaccactgaggcaacatggccaagctcacccttctcactggtaagagatcgtctcatctctgtacctctgaatgactctctccatcttgtttttctgcccctttaaaactcttttaccttcaaatttaaaccagatcaactgagatttttgctttcggcaaaagtatggggatgtactgaacagggggacagccccaaattgcctggtgataggtttctcactgccctgctgtccccctcccttcaccaagcctcaaaggctcatggtactttaatggtcttttgaatggaaatagaggggagtgggtttccaggacaaatccaaaggctttgccagcctcagtaggttggtcatctacagaggatcttaagagaatgaaaaatagaaaaagcttcctactgcttaagtgaggtgactaatgtataaaggctactctactcacattcctccagttcattattctctctgttgctttaaggtctgctccttgtgctgacagctgaaataggtaggtatatttcttgggatgaaccactatattgttcctctttttcttattcataatttggaaactcagtactgccctgtgtccttccacatcagacaaagaatattaactactctctacagagtttgaaattccctaaccaagtttaaaggattgataccattggcctaaaaatcccaaagcagaaaccaactagatggcagtcttaaagaatacgtgctaacaataaaaactaatgtggtgaggcagctacacagtgtcctctgctcttaaaacattttaaaatctgtcatcttactgagttttaaaacaactcttctttgagaggtgtacaggaaaggcattaccactccatctcacagaccagttaaccagggcagagataagacatatgacctgacctaggtaatacagagagttcatggcagaatctgaaccagtagccagggcccttgtctcttggtggaagactcatttccccctgggtggaattactcagggagatatccaaaagggctaaataggcttatactatcatcctttctgtgtctcagtttccaaatgggttaaaatgagaaaataataatacctctctcaaagggttttggtgaggattcatgagtaaatataagtaaatttctcagagcaatgcttggtacgtaagctgccacataagggagctagaatacatctaaatcatagttcactaagctttaaaattctatttcagctaaaggcactggtttctaaggttatttaattctctcttggaggaacagagctatctctaagagatatcttcagccctgaattgcctgctcattattgcctgcaaattatataattataggtttgctgcaacataaagttcttacattgacttttcccctttcctttgagacttcaaatagggaaatcatttggaaatctgtggtttttaaagaaatctgtgactcactagggagcttgtctctcaccttctttctctgggtaacaggctctgcctaccagctgacatgttacttcaccaactrggcccagaaccagccaggcctggggtgcttcaagcctgatgacatygacccctgcctctgtacccacttgatctacgcctttgctggaatgcagaacaacgagatcaccaccatcgaatgggatgacatgactctctaccaagctttcaatggcctgaaaaacaagtaaatgacggaaaacctgagtttcaaatcttttaacctttaaggacagtttaaacaagatcttccacagcagacttcaggctgaaattccaaacaggccaacaagcaggtaaattcagctttcttattatttcaagtgcaagaatgactctaattttaaggggaatggctggctcacagaagctagctgctaactaaagcccagctcagttgccaagggaagcttataagtccaactactggtggactcagttgagaacaatcttccacttagaagcaatccaaagctggcattgataaagcattcaktctccttggtcaggagattcactcctasggaaataattggaactgtggagacattggggtrcagcaaaccaacatggcacatgtatacctatgtaacaaacctgcacattgtgcacatgtaccctggaacttaaagtatatttaaaaaaaaaactgtggagacattgaaacataccaatcatagtcacctactccaacattcataagtaggaaataaggataagaacaaagataaaccaggatgagaggctgcatgacactttcctggcttcttgctcactattgcagctaaatgttgaaatggcttccctttcttttcatttgttctggtaaaacactttgtttcttttccctcagaaatagtcaactgaaaactctcttggctattggtggctggaactttggcactgctccgtaagttctttttggtgatgacttcctaggttgattttactctaaggtgttgggaccaccaaggtctcaccctgccttctttgggtctccctcagtttcactgccatggtttccactcctgagaaccaycagactttcatcaactcagtcatcaaattcctgcrccagtatgagtttgacgggctggactttgactgggagtaccccggctctcgtgtgagccctcctcaggacaagcatctcttcactgtcctggtgcargtgagctaagttccagatcattttcactggaaagcatacacccatctcatatgaaagatcactgggaccttaaaccyagtttcctagaattttatttggggtgaaggacctgaaaatcctattccagtaaggatgctgaggaatgaatggaaggatggaagaggttaatttaattcagtgtcatgaacctcatgaaagtaaacttaaagttactattcacagactttctcctgctcctgtacaggaaatgcgtgaagcttttgagcaggaggccaagcacattaataagcccaggctgatggtcactgctgcagtagctgctggcatctccaacatccagtctggctatgasatcccccaactgtcacagtgagtgatgtgccttatcttcaaacncctggaggtatcactcaggcagactagacttgtctttggtctgtcttgctattcagggaccttgtttaggaggctatggaagtggtgccttgtgcccgcacaggtatgggaaatgaccatcagaatgantttaaatcctctaccccacctcaggtacccggactacatccatgtcatgacctatgacctccatggctcctgggagggctacactggagagaacagccccctctacaaatacccgactgacacyggcagcaacgcctacstcaatgtggtgagtccctgtacagatgcaagrgcagaccagagatgatgatgaaaatcacatagagattcaggcacaaaaggyatcataagtttagtrkttttctcaaatgagaaattaggctgccataatcaattaaatattctcatttaytaaaaaacttgcctatttattaacaccatactgataattttacctaatatgaaagaagattaataacaagtgcattgttttttaataaaagaaaatgatatgccactgctcctatttcaataaattataaaaggctttttccaccttcccccttttgctgtttcccttttgccttacccattttctactgttctaatcccttgcctatgtatatcatatagaatttcggacattaactaatgaatcataccaggaatatcattttaaaatctctgctcttctatcatattttttttatccaaagggtatatgtaaagcctgcttgttattaaaagaatttagttgagaattagacctatcactttaacagatatatgtcagtgatgctctaaaatatgttgcaagtactttgtacagtgggcacaaccaaatcraaaaaagtttagctaataattaatcactaggccatcagctgtgggtgagaactctagctaacccactgccattgcaggattatgtcatgaactactggaaggacaacagggccccagctgagaagctcatgttggattcccagcctatggacactccttccttctgagcaacccctccaaccatggaattgatgcccctaccactggtcctggccctgctggaccctataccaggcagtctgggttctgggcctactatgaggtatacactcagaaatgttagaggaaatgtggctttctcttggtccatgtagctaataatatgagcaatatgcaacagttcttggattggagctgaaagtggatgtttgtggctatctagaagggaggcaagataaaccctcctgttgcaccactttaattgggccttcactaggtccctttgaggctagattccaaacacagagagtgtaggaaagtaggctaccattagtgagagtatatcaatctgtagacacttctgactgccagggtattccttgatttaagagtttctccccacattgaaaataaattactcaaaaggagtaaacaaacagaatcccaaataactaagaaatttgctggtaaagcaatagaccttcattttcaaggagtttttatgcaacactcctctacttccccttccccatgtccttttacctctgccaccacaaggacactgcctacctcttgacctgtaccttatattctgttagatctgtaccttcctgaagaatggagctactgaagtatgggaggcttctgaggatgttccctatgcctacaaaggaaatgagtggcttggatacgataayaccaagagtttccaaatcaaggtagactgtgttctatgggttgttgttgcctgtgagcatgttcccattatagccctggagccacagctcagccttggtgtctgtacataactgacttcctttctaattaccacaggcagattggctaaagaagaacaastttggaggtgccatggtctgggccattgacctggatgatttcacaggcactttctgcaaccaaggaaaattccctctgatcaccaccctgaaggatgctctgggcctgcagagtacaagtgakttagggagtgagaagggacactaagcctcagacttaagagaaattccaaaggttccttggaagtcatggagctgttgcacaagtaattgtctgacattgtccattcctatctggtaacaattgattaatggtgggaagaacaaacagggctyttcaccatttcttccttccttcattcatttcacaagaaatttattgaacatctattacatatacagtgctctgtaggtaccacaggtgatctaaatgcataaatatccatatctactctatggaaatttacaatctagtgagagaaattggatttacaaaaactgcaaagctagacaacaatacagaagatattatgtgatactgtgccccctaaaagaataagtaaccttcttgtgagttcatgataatgaaaaatttcaatcagtaagatgtaaggaggaaaaaatgcactgtgacttgaaggatgaggaaggagttggtaagcaaaggggtgagtggagcaggaaggatatatcagatcagaagactgaaatatgtggagacatagaaggaggagccaagaacaaaatccaggtactagctctcacacatcaggtatcactggctaaaagcaaggaggttcaggatttgttttcytttttcttctcaggttgyaaagctccagcccaacccattgctcycattgccgaggcaaacatcacatgcggtgtcagccacagtsgtagctctgrgggcygctctggcaggagctctgggggcagccccagaggtagtggattctgtgctgacagggccagtggcctgtaccctgaccccactgacaagaatgcctcctacagttgtgtgaatggaaagactttcactcagcactgccagcctggtggtgtctttgataccttctgctcctgctgcagctggtgataacatttttcagatatcacctcacccagcctcagaagttgttgtgcaataaaaggttgagcattactgtacaatcgcttctgcttctttactgtaggatcttagatgtaattgatccctatttcccaatgatatacagttgctccaccagcacccaagcctgcagcatgcactgctagtcctggatgttgggtagcggaagcagggggattaaaggaaaatacatggtcccttcattctcaaaacatgtattcagatgaaggctggggagcccaagaatgtaagactcagataacaatgacccataagcaaatgtcattttaaagtgattgatttgcccttttggctgagaatgcacaattaggaggctattgcagtgattcaggggagaggtgcaggctcagaacaaagtagtagcagtagaagtggtcagaggtgattgaatttcagctgtattcttaagatttgttaagccagcaggtttctttatgggttgcatgtagaacgtgggagacaaaaaggggagccaaggataatttcaacattttggcttaagaaattgcaaatatgaaattatcatcaactgaaatggagaaagctaaaagtagagtagattatgaaggaagagcagaagttcaactttggacatgttgaatttaagattgttattgggtttctaattggagatgtggagtagatagttggacataacatttttagaggtagttggtatttatagttggacataacatttttagaggtagttggtatttaaagtcaatagattagatgagatcattaagggagacagagaaaggaaagcattcaaggactaagccctgagcatttcagcattcagagggaggctggagagaagagtaggaacaagtaatgaagaccaaaaaaggagggctaagtgaggtagaaggaaaaccaagtgtcaagtatcctgaaagccaaggaaagaaccatattaaggaggagaaagtgatcaagtttgtcaaatactacttaggtcaggtcagatgaagtctgagaattgaccattatgtttaacaacctgtagatcattgacaaacttgacagaagtggggttggtaaacatcttggtggcaaatgcctgagtgcagtaagtttcagagagaatggaaaggtaagaattgaagacagtaaggatacaaaaacctgtcttatatgtgttaaagggaagcaaaaaatgggattaagaataaaagattatggaaaacagaagctgaatttatgttttcaaacccacatttacttatttagagatatgggagataaaaatctaacattctttccatacctctcactttcttatttttattattattttcacagagtcaaaaatttttttaacttaaaaattttttttttttgagacaaggtctcattctgttccccacgctgcagtacaaaggcacgaacatggctcagtgcaccctcgacctcctggactcaagcaattctctagcctcagcctcctaaagtgctgggattacaggcatgagccaccacatccagccccaaatttttaatatcactttgttttataacagaactgaagtcctatatttaaatcaatgcaatattcatcccctatacttacactacagcttatccaatattcatttctttaattatcttgttgtttgttttgtttttgtttgccaagaaggacttggagtatcttccattttcttgcatgtatgaaagtgcctgactgttgcctttatacttgattggtaactttttggacatagatattggctcactcttttactcaaaattttgtaaatattactgctttttattctggcattgaatattgagctagtgtttttcctatggctctttcatttactttttcaggtttggatgttttgtagttgaacagttttttcaagtagttctgtggctgccacaggccttaagttcttttatatgtgagaatatctgcctgtctccttggttcttgaaaagtatacttcaagaatattatacttggtagagtataatacgataggcttgtactttcttttcctcagaactcttcagatgtagacaaaacttcttaacattatttcaaatcatctctgccttaccttttaattccagttgaagctacagccaccaattctgcataagccttaatggtcttcatggcgttatggaatcttacctcagatctgtgttgtgtacttcttgctacccttcctagggcttctgagatacaggtttccactcaagcaggtacaatctagacacgcagaggggttactgtcacttacaaacatcagggaaacgtaatgtttccacctttcctcccctgatgttctagaagcacattttgtaagacttttaacaccgttccaaagggatagagcatttagttgtttctaccagtggctaatatgataaaagcatgattttattggccctcccttcttccctgtttcactcccctgtctcttacttattctttgcattccactcccaaattactctcacatgagctacttccaggtgaacttagccttagatagtaggcattgctccactgtgtcctggcattgaatattgttgtagggatgtttgaagacagtggataatcactaccctttctttaatccacacttttaaagttatttgatttttttcctgtgagtgcctgaagaattcatgatttattcttgaagttcaataacttaacaaggttataccttgattatgatggtttttgtcaatttctcctataaaacagttgagaggtaagatttaacttgcctgagttaacagacctgcaggcggcctcctggaaaagaaagttggcctgttgcctctggaaaccagctataatctatagcctaggtcctaatgcaatccatcctggcagagagctgaccatggtgaatgagaacttcagccaagtttacaccaagcagttgtgcataatcacggggttggattacaccagaagaaagccaagtgttctcccaacagatgaatgctaaggtagtagataagactgaaagccaaggttctgctatatcatactgctattagatcccatatcctaatctcactaaagaagagttttgttaagaagcttaaaagtcccaacatccaaagcccagagcctctttctcagagctagatatgtgctatgttagattgttgtatgctgcctgagaataaaataaacaccagaggatcactcatctgccatcgcttctgtctctgactttttacccagaagtactattccagaaagcccagtgtgcatgctgcttggctactcaccctgaatcacttgacaactggtgtagagagctggatgtcagactaggggcacctaccatggccttctagaagtgaaccaagggacttgggatttaaaaagtgtttctcagatgatcccatcgctttcaaagattggtatggcagtcatggggactagtccactaaattcctgaagatacagagtgataaaagtgatactgcgtagttaagatcatcgagcctagcattccatgattgttattattggccttggaagaattagctctaaggaggcagaccgaggggaacttgactcagcatcttgaatgaaattacaatttgaaaactttggtgaatgtgaaatgatttatatatggtcttatccaagcaggatcaaacaaattccatcctctgaccctcttcctatgactgataggatcagttcaagatggcacaggttgtcatgttattagggtgttatgagctccagttaaatgggtgcaaagggaaggaaagacaaagtatgtgacttatgaggttagttccctcataacaagtgaagaagataatctgaaataggctgattgaactaaccgaacttctgggtagactcccactatagctccgtcttagaaagtctatgtgattactgcttctatataaagggttaaacatgataaaattgatgatggtccctatctttgtctatggaaaaaaatatccagtgagttttgggggaactcatgacccaagtcataataggaatttcaggcttcataaagacatcatggttgaagcagaggtgctctgtttccagcaaagcccaacaggaagctaacttttgctttttgaaaggaggattccccaccagactgggaagcaacagcctaggctccagagtcggacactggacttaagttgttatcagatgaatttgctcagctgcgtactgttgtgttacaaaatcaaatggcattagatacgcttacctcagcccaaggagggttttgcaccttactgcatactgaatgttctgtgtatagccctaacaattctcacaatattactcacaaagccatgttgggtgtggtttttattaattgtgcttttaattctgctgtacttaacctgtatctgtaaactatatcaaatatcccttccccatgtatctgtaagggtattttcctgcaattgagtatcagattgaggccaaatgtggaggaaaagttaaacattaaatttgaactcaactgaacatggacacaaacaatggtcaccaagtcccgcaacaggttgtgtgagtcccttgaggcgttcatccagcactgttttggaaaaatctctatttcaatctagtcctatatgttagttattgaaaaaaatagacagtctcaaaaaacaagctgacctttttatgttccttgaacctagttgtgaagggcccttgttactgggcctcatgccaaacaactcattacaaaaacagctagagtcccagacggtgccaaagcttcatgaaacctctcctcgtctgtgcacgaacaggtggccaactctggagcccaggctgttgctttccagtctggtggtgaatcctccatagtctggtgagtgtaaatatatatatatcttttcccttctccctttcccattgcaatttgattgttatatcaatttgcttattatatcaagttgtttattatatcgtttgcttattacatctgcattgccatttatgtgagataaaggttgtttacccttaaaggtattgtgtgtgtgtcttttctcctcccctcacacatctctcacacagatcattttatacccaaagggatataaatcattctactataaagacacatgcacacgtatggttattgcagcactatttacaatagcaaagacatggaaccaactcaaatgcccatcaatgatagactggataaagaaaatgtggtacatatacatcacggaatactatgcagccataaacaggaatgagatcatgtctttgcagggacatggatgaagctggaagctatcatcctcagcaaactaacacagaaacagaaaactaaacactgcatgttctcactcataagatggagttggaacaatgagaacacatggacaccgggaagggaacaagaaacactggagccagctgaggggttgggggcaagggggggagagcattaggacaaatacctaatgcatgtggggattaaaacctagatgacgggttgataggtgcagcaaaccatcatggcacacgtatacctatgtaacaaacctacacattctgcacttgtatcctggaacttaaagtaaaattttttttaaaaaggggggaaaaatatatagcaaaatgcaactggaatttccaaatgaattagtattttatttaaacatctatattttaaaaataattgtaataatgagaatacatagacacagggaggggagcaacacacactggggcctgtcgggggggggtgggggtagggaaagcatcaggataaagagctaaagcatgtggggcttcatacctaggtgatgggttgataggtgcagcaagccaccatggcacatgtttacctatgtaagaaacctgcacgtcctgcacatgtatcacggaacttaaaataaaatagaattaaattaaatcttaaaaatagtaattgtaataaattta

SEQ ID NO: 93779 - DNA, 14369 bp, Homo sapiens
gaattttatcaaaggccttttctgcatctactgaaattgtcatgtggtttttgtcattagttctgtttatgtgatggattatgggttttttgttttttttttttttactttaagtttaaggatacaagtgcagaacgtgtaggtttgttacataggtacatgtgtgccatggtgatttgctgcatctatcaacccgtcacctaggttttgagccctgcatgcattagctatttgtcttaatgctcttgttcccttcaccccccaccccctgactggccccggtgtgtgtcgttttcctccctgtgtctttgcattctcattgttcaactcccacttatgagtgagaacatgcagtgtttgtttttttgttcctgtgttagtttgttaatgatgatggcttccagcttcatccatgtccctgcaaaggggggtcttacccagttgggtggaatgggaagcaggacccatttggctttcccttaatggagggggtgtgctgcgtggcagggaaacccactcgtctgtgctgcccagattcctcacaggtagcaggaggaaagactgagtctgctggttggcagagactgtgattacatttcccccgaggggctcaggcccagggagataagaattctctccctgagcccctggctggagttggagtttctacagggaggccctgcagctgctgtgttggctgctgcccctccttcaaggagctcagatggcttagacagcaggcagccacagcagtggtgatggctgcccctcccaccaggaacccatcaggcttagactgattctaccccagtggctgttggacaatctgtgcagctcttccttcctttccatgggtcatgccagctaccttgtcagtcctaatgacagaacctggatacctcagttgctggtgcaagatttgcaaaccgttttggatcttttccatgacagcctccggtcaccactgcttctagttggtcatcttggccccaccccccatattcttccttcttaatttttgtctgattgagttaattcaaaagccttgtcttcaagctctgaaattatttcttctacttggtgtagtctattgttaaatccactgcattttgtagttttcaaaatgtatattccatttccaaaagttctgattttttaaaaaaatatatctatttcttttaaaaaattttatttgtattttgaacttttttaactttctttaggtttacttccacctttctcttgtgtctccttgagtaacttaaaaaccaaccttttgaattctttatctggtatttcagagatttttgtcttggtttggatccattgctggagagctagcatgatctttggggggagctatagaacctgttttgtcatatttccagaattatttttctgattccatctcatttaggtagactatttcttctaattactttttaattctactgtggtttttatttcctttttaccctttgagggtgtgactttaatgattatagtttattatttatttatttatttatttgagatggagtctcgctctgtcacccaggctggagtgcagtggtgctatctcagctcactgcaagctctacctcctgggttcatgccattctccttccttagcctcctgagtagctgggactacaggcgctcgtcaccacgcccagctaatttttttgtatttttagtagagatggggtttcaccatgttagccaggatggtcttgatctcctgatcttgtgatccacccacctcagcctcccaaagtgctaggattacaggtgtgagccaccacacctggctgattatagtttattgtaacctaatttggctctgagtgttggaggtaaagatttggtatgagttccttggttatagagagtctttacgtcattgcttactcagatgctggttgtagtagcaatattctcaatgtgtgagcaggtttactgtctcctgtagggttgaaatagcagaggtcatttgaaacttctttatccccagtggtgtgtacttttttattgatttatttttttctcagtattttatttactaggttgaatagttcagtcttcagggcagtaggggatggtgtctacaggtgaaaactggctgtggctaaagcaggtaggtaaacacaatacccagtagtgggcagacaacccaaccttgacagaggtggctgggggagctctcagtgaaacacaccaaggtcctttcatgggagaaggaagaaagccatcttgctcccctgccaggccagcaagaaaacaatctgcctcccagtcacactcctgacacagtgttcctgctattcagatcagacaggtacctcttttaatctgcaggaatgcttatgtttaatgtagagagggatggtggctctactagtgcaagcctgaacctgcaaggcactcctttttgggggatgctatcaccctgaagtgcttcaggaaggctgtttacatgttcacccatgctaagttcccatgggagaagctgcagctgtgtctgcagtgctaagtaaggggaagagaaagtccccttctccaagacccttcacaagtaccagggctgccagactatcgtggtagagccacataactttccacactgagctcagtcctgcacttgtgcctctgctgatagaaacttcccacaagcagaaagttcagggactcaaggcttgccttctggattattttgtcaaacagggtgctctcttgatggggttcactccccgctttcttccaggagcaggagtccctgagggtcagattacagtgaatgctgctgctcctctgagtctagctgttcagtggggattccatatgccatgctggtgctggagaatgtctacaagggatctagtgatatgacctctcccagccatcatacaaagtctcccagcagcgggtaccagcatcagctctgatgggggtggcaggggagtgatatagactctgtgagattccttggttataaatagacttagagtgttggctttctcaactgcaagctataatagtaataaactggtcacatggacagactcaggacctcctacttagccagagtgatgcaggcaatgatgatagcttagaacatgcccaagttttctccttgctaggtgctgtgttattctgcctgcaggtgctgtaatggactatgttggttggcctccagccaggaggtggcacttgcaaaagagcaccagctgctgtggtagcagtgggatttgtacttgccttttattacccaggggaggtactctggtatctcaggcaatgagcagggccatagacttctcaaaattttctttcctttgtgttaagataccagggtaggtggaggggcaaagctatgtgggggctgggtcagacaagtcaaacactctggctctccacatgtgagtgccagcagtggccctagtggtttggaggatagttttctggccaccagggtaatgttccagggaagactacagctgtctctgctgcacggaagaatccatatggggaatagagattagcaggcagcagtaagctaagccccacctagctcccatgcacttagcaaagcaggcctcacaccaacattattccgctagcagcagctagctagattctagacagtctgccttcaaaactcaaaactgccctaggccataagccttccccagggagacataaactgtagctatggggctatatctttcccagtctgcccacaaagcagggacaaccagctcctgaacccatgtctacagtttacttcctacttgccccctcggttctggattatatcatgaagctcagttgggagcttctctcaacctgtgaacactacttgagttagctggcagacttctgtgaggtcctgtgtgaggtaggatcaggaatggcttccctccatctctgctggagaatggaaatgcatgcaaggcacgtcctgtttctgctacttataatatactccccaccagtcactaaataagttccagtgctggtagagttaagttcatcccctgtggcctgaattgctgggttcccagtgggagtgtgtatcctggaggcagtttatccccctctcacattctgggacttagttttctgcctggctcacagtgtaggctgcagcccaacacttctttcaaagggtatgtggtttctttcacttttccttttaagtttctgtgttgcttcttgggaaaaaaaaatgttcatagtgtaaatctctacacattgttttgtctttgcaagtgggagagtaatttaaaaaactattggcattttaaatttttatttatttatttttggagaacactgtcttgctatgttgtccaggctgaattgcagcagctattaataggcacaatcatagcacactacagccccacactattaacctcaagcaatcctcacacctcatcctcctcagtagctgggaccacagacatgtgtcaccgttgctggctttattgtcaattttagcattgttttatgtttgtagtttctttgttactttattcctctcttgctgtcttccttcatactttaatgattttttttgtagtggtatgtttttatttctttctctttatcttttatgtatctactagagcttttctttttgttgttaccatcaggcttatataaaacatcttaaggttataacagtctattttaagctgaaagcaacctaacttaaaccacatataaaaactctacaataaaggattgagggcctgatgggtagtttttgggtcatgggacaccaacctcataaatgattaatgctgttatcatggaagtgtgttcattgttgtgggaatgggatacttataaaatgacaaatttgaccgatggctgaagatggccgaataggaacagctccagtctgcagctcccagtgtcattgatgcagaagttgggtgatttctgcatttccagctgaggtaactggttcatctcactgggcctgattggacagtgagtgcagcccatggagggtgagccgaagcagggtggggcatcaccttaactgggaagtgcaaggggtcagggaatttccctttcctagccaagggaagccgtgacagactgtacctggaaaaacgggacactcccacccaaatactgcatttttcccacagtcttagcaaccggcagtctaggagattctctcccgtgcctggctcggtgagtcccacacacatggagccttgctcactgctagtgcagcagtttgagatcgacctgcaaggctgcagccttgctgggggaggggcacctgccattgctgaggctttactaggtaaacaaagtgtccgggaagctcaaactgggtggagcccaccacagctcagcaaggcctactgcctttatagaatccacctctgtgggcagggcgtagctaaacaaaaggcagcagacaacttctgcaaacttaaacatccctgtctgacagaactgaagagagcagtggttctcccagtatggcatttgagctctgagaacagacagactgcctcctcatgtgggtccctgactgcggtgtagcctaactgggagacacctcccagtaggggccaatagacacatcatataggcggcttccctctgggacgaagcttccagaggaaaaatcagggagcaatatgtggtgttctgcaatatctactgttctgcagcctctgctggtgatacccaggcaaacgggctggatggacctccagaaaactccaacagacctgcagctgagggacctgactgttagaaggaaaactagcaaacagaaagaaataacatcaatatcaacaaaaaggacatccacataaaaaccccatctgtagataaccaacatcaaagaccaaacgtagccccacatgcccagcaggcatgagtgccatggcctggctcccacagggctatgccaagccaggtgagcccccgcagcacccaggcatgggcctgggctgccactgctactgccaccaggcgtggcatttttattcaggcracgcttaagggagtccggccgtgcccggtgcattgtgggagcggcccgcagcccgttttygggaggaggcggagggtgcaaagccagccggtggatccataaagaacccagccaacccacagagggaggggaggggctgagctgtgaggagagcggggcccaagaaccatgtctaagcgggagtcctttaacctggaaagttatgaattggacaaaagcttctggctaaccagattcactgaactgaagggcacaggttgcaaagtgccccaagatgtcttgcaaaaattgctggaatctttacaggagaaccacttccaagaagatgagcagtttctgggagccgttatgccaaggcttcgcattggaatggatacttgtgccattyctttgaggcatggtgggctttccttggttcaaaccacagattacatttacccgatcgtagacgacccttacatgatgggcaggatagcatgtgccaatgtcctcagtgacctctatgcaatgggggtcacagaatgtgacaatatgctgatgctccttggagtcagtaataaaatgaccgacagggaaagggataaagtgatgcctctgattatccaaagttttaaagatgcagctgaggaagcaggaatgtctgtaatggkcagccaaacagtactaaatycctggattgtcctgggaggagtcactaccactgtcttccagcccaatgaatttatcatgccagacaatgcagtgccaggggacrtgctggtgttgacaaaacccctggggacacaggtggcagtggctgtgcaccagtggctggatattccttagaaatggaataagattaagctagtggtcaccgaagatgtagagctggccaaccaggaggcgatgatgaacatggtgaggctcaacaggacagctgcaggactcatgcacacgttcaatgcccacatggccactgacatcacgggcttcgggattttgggccacgtgcagaacctagccaagcagcagaggaacgaggtgtcgtttgtaattcacaacctcctggtgctggccaagatggctgcggtgagcaaggcctgcggaaacatgttcagcctcatgcatgggacctgcccggagacctcaggcggccttctgatctgtttaccatgtcagcaagcagctcggttctgtgcagagataaagtcccccaaatatagtgaaggccaccaagcatggattattgggattgtagagaagggcaaccacacagccagaatcatagacaaaccccagatcatcaaggttgcaccacaagtggccactcaaaatgtgaatctcacacccggggccacatcttaatctagacagaaatagctgtttggttttgtttttaaatagatctatttcccttatcacttcaactaaagactataaacaacaaaaatctcattgtgtctacacatcggggtgaccttaggtcagtttgtaagtggatacaattaataaaataaaatccactgcctttttttcctgttacattaactgaagatgcacctaatcttgaggcagcttctgaattgagaattatattgttatccaatgctgttgattcattttgaatctttagacacttatctcttgccgcataggctctttttaaaggtgctttcacatagcacagacattaccagtagtcatgtcaaatcgcagttggtgtcttcattttatgtatatttatcaagtaagtctgatttttttattaagcatcttgaatggttttctggagagacagcattggtaagtggcacatgatggtatcccagtcataagagggttgcatgattcctttgagtgtttgatttgaaaagcctagtcttgtctctcaagagcatctcggatccagaacattctccagtagtgcattcagttcaacacagcaagtgcttcactgcatggaaaacattttgaagacaaaaaaatcttatatctttttttgtagccttcctgatatttacagtaatacgattaactgttttatcgatagcaaaaaaggatactttttgcaatgtaattagatgttctatagtgctacaaggaattgccttccaaatggaggttcatgtataatactcatttacaattcaatatataattatgcaaataatttttaaatataatgaataataaagactgttctgtggatggtagtgtttaatacattttatattttgtatagtgatttcaggccttttattttcttaaaatcagtagctatttggcctaattcttagcactattttgtcctttgcgccagtacttttttgtgcatgctttttgtgatctgtgttaaaaacctgcattgccaacattgcagctcgaacttaaacttgttattcaaataaatatttaatttttttaaattgctcttgcataaaaaaaaagaccaaaggtagataaaaccacaaagacggtgagaaaccagagcagaaaagctgaaaattctaaaaacaagagtgccttttctcctccaaaggatcgcaactcctcgccagcaatggaacaaagctgtatggagaatgactttgacgagttgacaaaagtagccttcagaaggtcagtaataacaaacttttctgacctaaaggagaatgttctagcccattggaaggaagcaaaaaaccttgagaaaaaggttagacgaatggccaactagaataaacagtgtagagaagaccttaaatgacctgatggagctgaaaaccatggcacaagaacttcgtgatggatgcacaagcttcaatagccgattcaatcaagtagaagaaatggtatcagtgattgaagatcaaattaatgaaataaagcaagaagacaagtttagagaaaaaagagtaaaaagaaacagacaaagcctccaagaaatatgggactatgtgaaaagaccaaacctatgtttgattggtgtacctgaaagtgacggggagaatggaaccaagttggaaaacactattcaggattataagccagaagaacttccccaacatagcaaggcaggccaacattcaaattcaggaaaaacacagaacaccacaaagctactcctcgagaagagcaaacccaagacacataattgtcagattcaccaaggttgaaatgaaggaaaaaatgttaagcaaagccagagagaaaagtcgggttacccacaaaaggaaacccatcagactaacagtggatatctctacagaaaccctacaagccagaagagagtgggggccaatattcaacatccttaaagaaaagaattttcaaccaagaatttcatatccagccacactaaccttcttaagggaaggagaaataaaatcctttacagacaagcaaatgctgacagattttgtcaccaccagacgtgccttacaagagctcctgaaggaagcactaaacatggaaaggaaaaaccggtaccagccagtgcaaaaacatgccaaattgtaaagaccattgatactatgaagaaactgcatcaattaatgggcaaaataaccagctaacatcataatggcaagatcaaattcaaacataacaatattaaccttaaatgtaaatgggctaaatgccccaattaaaatacagagactgtcaacttggataaaaagtcaagacccatcagtgtgctgtattcaggagacccatctcacgtgcagagatgcacataggctcaaaataaagggatggaggaagatctaccaagcaaatgggaagcaacaaaaagtaggggttgcaatcctagtctctgatgaaaacggaatattaaaccaacaaagatgaaaagagacaaagaaggccattacataatggtaaagggatcaagtcaacaatgagagctaactatcctaaatatatatgcacccaatacaggagcacccagattcataaagcaagtccttagagacctacaaagagacttagactcccacacaataataatgggagactttaacaccccactgtcaatattagacagatcaatgagacagaaggttaaaaaggatatccaaaacctgaacccagctctgcaccaggcagacctaatagacatctacaaaactctccaccaaaactcaacagaatatgcattcttcttagcaccacatcgcacttattctaaaattgaccacataattggaagtaaagcactcctcagcaaatgtaaaagaaaagaaatcaccacaaacagtctctcagaccacagtgcaatcaaattagaactcaggattaaaaaactcactcaaaaccacacaactacatagaaactgaacaacctgctcctgaatgaatgctaggtacataatgaaatgaagacagaaataaatatgttctttgaaaccaatgagaacaaagacacaacgtaccagaatctctgagacacatttaaagcagtgtgtagagggaaatttacagcactaaatgcccacaagagaaagcaggaaagatctaaaatcaacaccctaacatcacaattaaaggaacaagagaagcaagagcaaacaaattcaaagctagcagaaggcgataaataactaagaacagagcagaaccaaaggagattaaaaaaaaaaaccttcaaaagagaagaatcaaatagacacaataagaaatgataaaggggatatcaccactgatcccacagaaatacaaactaccatcagagaatactgtaaacacctctatgcaaataaactagaaaacctagaagaaatggataaattcctggccacatacaacctcccaagactaaacaagaaagaagttgaatatctgaatagaccaataacaggttctaaaactgaggcaataattaatagcctaccaacaaaaaagtccaggaccagacagattcacagccaaattctaccagaggtaaaaagaggagctgctaccattccttccgaaactattccgataaatagaaaaagagggaatcctccctaactcattttatgaggccagcatcatcctaatagcaaagcctggcactgacaaaacaaaaacagagaattttaggccaatatccatgatgaacatcaatgcagaaatcctcaataaaatactggcaaaccgaatccagcagcacatcaaaaagcttatcctccacaatcaagatggcttcatccctgggatgcaaggctggttcaacatatgcaaatcaataaacataatccatcacataaacagaaccaatgacaaaatccacgtttatctcaatagatgcagataagggctttgacaaaattcaacggcccttcatgctaaaaactcaataaactaggttttgatggaacatatctcaaaataataagagctatttatgacaaacccacaggcaataccatactgaatgggcaaaaactggaagcattccctctgaaacccagcacaagaccaggatgccctctctcaccactcctattcaacacagtgttgaaagttctggctagggcaatcaggcaagagaaagaaataaagggtattgaattaggaagagaagatgtcaaattgtctctgtttgcagatgacattattatatatttagaaaaccccatcatctagcccaaaatctccttaagctgataagcaacttcagcagagtctcagaatacaaaatcaatgtgcaaaaatcacaagcattcttatacacaattaatagacagagagccaaattcaccactaacagacagagagctaaatcatgagtgaactccctttcacaattgctacaaagagaataaaatacctaggaatccaactttcaagggatgtgaaggacctcttcaaggagaactataaaacactgctcatcaaaataaaagaggacacaaacaaatggaagaatattccgtgctcatgcataggaagaatcaatatcgtgaaaatggccatactgcccaaggtaatttatagattcaatgccattaccatcaagctaccaatgactttcttcacagaattggaaaaaactactttaaagttcatatggaaccaaaaaagagtccacattaccaagacaatcctaagcaaaaagaacaaaactggaggcatcatgctacctgacttcaaactatactataagactacagtaaccaaaacagcatggtaatggtaccaaaacagatatatagaacaatggaacagaacagaggcctcagaaataacaccacacatctacaaccatctgatctttgatgaaactgacaaaaacgagaaatggggaaaggattccctatttaataaatggtgctgggaaaactggctagccatatgtagaaagctgaaagtagatcccatccttacaccatatgcaaaaattaactcaagatggattaaagacttaaatgttagacctaacaccataaaaaccctagaagaaaacctaggcaataccattcaggacataggcatgggcaaagacttcatgagtaaaacaccaaaagcaaaggcaataaaagtcaaaattgacaaatgggatctaattaaactaaagagcttctgcacagcaaaagaaactaccatcagagtgaacagacaacctacagaatgggagaaaatctttgcaatctacccatctgacaaaagactaataaccagaatctacaaagaacttaaacaaatttacaagaaaaaaaaaccccatcaaaaagtaggcaaaggatatgaacagacacttctcaaaagaagacatttatgcagccaacagacatgaaaaaagctcatcgtccctggtcatcagagaaatgcaaatcaaaaccacaataagataccatctcacgccagttagaatggtgatcattaaaaagccaggaaacaacagatgctggagaggatgcggagaaataggaatgcttttacactgttggtgggagtgtaaattagttcaactattgtggaagacagtgtggtgattccttaaggatctagaactagaaataccatttgacccagcaatcccattactgggtatatacccaaaggattataaatcatgctactctaaggtcacatgcacatgtatatttattccagcactattcacaatagcaaacagttggaaccaacccaaatgtccatcaatgatagactggattaagaaaacctggcacatatacaccatggaatactaagcagctataaaaaggatgagttcatgtcatttgcagggacatgaatgaagctggaaaccatcattctaagcaaactgtcacaaggagagaaaaccaaacaccacatgttctcactcataggtgggagttgaacaacgagaacacatggacacagggtggggaccatcacataccagagcctgttagtgggtgggaggctgggggagggctagcattaggagaaatacctaatgtaaatgacacgttgatgggtgcagcaaaccaacatggcacatgtatacctctgtaacaaacctgcatgttgtgcacatgtaccctagaacttaaagtataataataataaaaaaagaaatatatttgttcttttcatttctgaaggacagcttttcctgtcatagtgtcttgattggcaggtttttttttcatgacttaaatatattattccactctctcggcctgcaagttttctgctaagaattcacagataaccttatgaagattcccttgcatgagattagtctgttttttcttgctgctttcaaaattatgtctttttctttgacttttgacaatttgattataatgtgtctatatataatcttctttgggtttattttgcttgaaagtctttaagcttcatgagtctggatatttatatctttcctaagatttgagaattttctacctttatttgtttgcataagctttcttgctatttctctctctccctccctcctcccccaccttcttagaatctgataatgcatatttttattcacttgatggtgtcccttaggtctcatagggacattcactcttttttattcttttttttattttttgttcctttaactgactaatttcttgaactactgacctcaggtgatctacctgcctcagcctttcaaaatgctgagacaacaggtataagcctccacacctggctaactggcttatttcaaatgactcgtctttgaactgactgcttgagtctgctgttgaagctttattctgtttgcgtcttctgtcgaagctctctattgaattttttccttctttccttgtattcttcagcttcaggacttctttttagttcttttttaaggtttctatttctttattaaacttctcttttttcatgcattgttttcctggttttgtgtagttgtttatct

SEQ ID NO: 93780 - DNA, 160253 bp, Homo sapiens
  misc_feature (1)...(160253): n = A,T,C or G
gaatgaacatgtatgaccaacagctagttttgatgaaataatctaattacctactgaaaactccatgcttatttttgatacgacaaaggatccaaattaagttactgtaaataacaaatcttggtatgtggtacatctagaaatatctgttatactaagacaagcagctttcttttctcctaagcataatattttgcattttatgcactcttggcacaatgttacactaagttcaattaacaaaaaacaatatataacaacattgtcaatagctggcataggcagctggccagctatacctttcccacactggctaatttatagtcatttggatgtcctttgcctcatttataatgaccagaattgtggaaaatattccagctggggaaccaccatctttgcatcatgtctcctgacactgaaaatcatgttcctcctacctttgtggggctcaacggactgctttacttaattttgacgtttctggcatgcctttaagctatgtgctggccactctcaattactttcatgtatcacacttcctctcattatatgaccccccaaacattcctcctctctttccatgcagagacacaattctggcttcccttggagcctttcccctcaaataatccacagacacattcccacaaattatatttgtgtacttattggcaagctacagttaagcttgcaacttattttttcacgcttatttaaagatgtattgcagttccttcacagggttagtaggttagtagataagatgaatgctgtatacatagtgcatctatctggattgaataaggcaggcatttgacaatgttttgtattgaaacgttgtcaaacattatattgaaacatattatatttttcatcataaaaaagtagacagcaacagaattatataggttcacaattaattgaacaattatacccaaacatttctgcttactggattaattataagctccataagggcaggaactacaggtattaagataatcaaatagaaaatggttaagaaatagttaagtgaagggataaaaggtatcaaacatagaaagatctgtagtccttgccttgttcaatatttttgttgatgagttggacatagatggagagagctgaagtggacccaatatttgttaaaaatgtataatgatcaatggaaaaatctttcaaatacacaagataaagcaggcttggcttaagggcttcatatatgaaaaaaaaagactttgaggacttagttgacagcaagcttgagtcaacagtgtgtagttactgaaaaagttggtaaaatctcagtcctcattaattaaagtataatatgcaaaggaaggaaggtataaaattcatatttaaatttgctctgacaaaatctcacctgaaagaatgtggtctgttctgagaggcaaattttagtttgataataaatagaactgtataaccattagatttagccaacaatggaatagacttccttccttgagagaggcagtaggtttcccaacactggaagtattaagtagagaatggaaatctacttggaaagacattgtacaggaaattcatcttcaataagagaggatggtgagaaaataaaaggaaaatcttagggccaaattggttattgtctttgtcacactggttcccacaagcagactataggtatacaataagatattaatcatttcagcactcatggcgatcaggcagggctttgggtagctggaacctccaggctagttgcgtttggctgcaagcagtcttagctatacgtcccagtgaaatatacaaatgccgttttttatctgtgtcataatgtaaaaagattgggaaccaccgtacaaaattaactctgggttcctttcagttatgatgagtgaattttccaagttaatgtcagagttgtcactaggaattagtccgtggttctttctaaattacagaacccataatagagagtaaaacacctatagaatctagaattaaagcaaaataaagatagccactgtggaatttgacttagagaaaaatggtaaagaagacaaatagagaggctgcagttctaaaggtttggaacctggaggaggaatcctatcctttgtgcattgatggtggaatcgactataggcaaagagggctgccctctcttaagtgtatcctgaatcagtgcctatatgcagagaattagcctttccaattccagggccttttgaaaaagagcatagataaattttgactagcaaaagactaaatagaaaaattccaaggaggtgcccaagcaaggcagaaatggatgagatgctataagaggggggcttgtaaagcttggaacagtctgaaggcattgaatatttgagaaccagtagtcagggwggctggaagggcaccaaagaaaccttggctgattccacactttggcagcatttctgacaaacttcagccagaaatctctcccattgcaatgtccccttttgagaatatcaggcaaaatttacaaaaaccaacagatgcatttcacagaagcaatattagcacttttcaaatctacttcatatttagtgaacaaagaagaaaacagtgttctatacaaatgatagcttaaaagcaaatcatgctcattgtcatgtgttgttctcatgacatgaagactttaaaggcagaaactgtcttaaggtttttttttttaacatgttatatgttcttttttaaattttttttattattttactttaagttttagggtacatgtgcacaatgttcaggttagttacatatgtatacatgtgccatgctggtgtgctgcacccattaacttgtcatttagcattaggtatatctcctaatgctatccctcccccctccccccaccccacaacagtccccagagtgtgatgttccccttcctgtgtccatgtgttctcattgttcaattcccacctatgagtgagaacatgcggtgtttggttttttgtccttgcgatagtttactacgaatgatgatttccaatttcatccatgtccctacaaaggacatgaactcatcattttttatggctgcatagtattccatggtgtatatgtgccacattttcttaatccagtctatcattgttggacatttgggttggttccaagtctttgctattgtgaatagtgccacaataaacatacgtgtgcatgtgtctttatagcagcatgatttatagtcctttgggtatatacccagtaatgggatggctgggtcaaatggtatttctagttctagatccttgaggaatcaccacactgacttccacaatggttgaactagtttacagtcccaccaacagtgtaaaagtgttcctatttctccacatcctctccagcacctgttgtttcctgactttttaatgattgccattctacctggcgtgagatggtatctcattgtggttttgatttgcatttctctgatggccagggatgatgagcattttttcatgtgtcttttggatgcataaatgtcttcttttgagaaatgtctgttcatatcctttgcccactttttgatggggttgtttgtttttttcttgtaaatttgtttgagttcattgtagattctggatattagccctttgtcagatgagtaggttgcgaaaattttctcgcattttgtaggttgcctgttcactctgatggtagtttcttttgctgtgcagaagctctttagtttaattagatcccatttgtccccatcaagctaccaatgactttcttcacagaattggaaaaaaatactttaaagttcatatggaaccacaaaagaacccgcattgccaagtcaatcctaagccaacagaacaaagctggaggcatcatgctacctgacttcaaactatactacaaggctacagtaaccaaaacagcatggtactggtaccaaaacagagatatagatcaatggaacagaacacagccctcagaaataatgccacatatctacaaccatctgatctttgacaaacctgagaaaaacaagcaatggggaaaggattccctatttaataaatggtgctgggaaaacttgctagccatatgtagaaagctgaaactggatcccttgcttataccttatacaaaaattaattcaagatggattaaagacttaaatattagacctaaaaccataaaaaccctagaagaaaacctaggcattaccattcaggacataggcatgggcaaggacttcatgactaaaacaccaaaagcaatggcaacaaaagaaactgtcttaaggttttatatttgcattctgatgcctaacagagcacagcatggatcatttgatagatacatacatacatataaaaatacatacatatatacatacatacaaaatggagacactatggctatctgctcaaaacaaatgtttgaatgaaatagttggataattattaggacttggaatgagacccataaaaagacagagaaagattttgccatagcccttggcaggtcattcctgcttcctcaccaaacccaaataccaactctcaagatacccccatcccctggacattgggagaagcaataaccttcctgcagaagaaaactggttccttgcctctgagatcagaatsactcagagagagagagagagattaaaaaaatgttatcaggctaaaaggttactgtttaaatcataagtgtcttagatgaaaaccagttcagaataagtaactattttacttttcacaaccagtcattctctcacctcacatagttctacatccccagcccccaacttactcatcatctctaaaataaagtatcacacctcagtagattgtctcagcaccttctaaagcctcacaaggtgggattacagtggtccagcatgaggaagttggagataaatgtcacattgtatggcaaatgtatttacatggaagaaaaagttgccatgagctcacagctgtggatgtggaaagattatggactgtagtaattggtacagatttcctcaaggaataacgtttaggatgatcagtgtatttggctcctagagggtttttaaaggccactatcgtagtatgggaagaacattgcaataaaaggcttgtagccctcgttctgccttatgtgaacttggacaagtcccctttgccattctggcctaatttgtaaaatagaaaaacaatttctgctttgcctaccccacagattgttatgaagtcagatgaaatagttattataggataattttaaaacaataaagcagaggtcagacaaaagttattataaaataatttttaaaacaataaagaaaaatacaaataaaagaaacattctactctaatgtcttcattttacagaggagacaatttcgaagctaagatgttacagtactgtttacaaatacatagctagttagtagcagagccaaaacaaggactcattctcctgactgttagttaagtgatttctccactgccctaatttctcttcttcactaactcggtatatgtgagaactcaattgacttgtcgctgcaagacactgcaagaagcttccccagagggaaagaattggacaaggccaaacaacttgagtggatactaagaagtactgatactgataggcttagagagaaagaaagagccacattccagagcatttatgtgatctcactttttatagtgcacttttcataaataatagaggccacactggaataaaggctatgagcacaagttctagaaccagagacagacctgggttcaaatcttggatatattatttactagctgtatgactttgagcaagttactttattacttttgctcccgtagccatcaaatggggatagtaagaaaaactattcattaggtagctgttagaaataaatgagataaacgatatcacgtgttttaacatgatgcctagtacttaagttctcaataaattagctattcttattattcgttttggtgttgttcttattcttattcagccctaaaacttcaaaggaatgcctatttcactatgagagatggccatagtcatgcctatcaccacatggttcatagaagtatcagtgccatttaaaatgccagagacagagtggacaacctcagaccagccacaagattacttccttaaagaatgaaaatagacagtttccttccaattctaaggtactagaaatgtttatcatgaacagatatttagtttcaccaagtgctttttgctgtttattgagatgatcctataatttttcaccttaaattggttaatacaataaattacattccctaattttgaacatgccctacttgctcattatagcttattttataatacatcacttgattcaattgtctaatgttttattaattttgaaaaatctgttagtgagattaatctacagggtttttattgctctgttttgttttgttttatactagctgactttgttatcaaaattatactatactcacagaatgatttgggaaactcaatgttttttctctgtgttctagaaataaacactacaagttaggggaaggataagaaggaatgatttatttggcaaaattaatggtaaaactaataagagaattagtaaggtggctatacaaaaaataaatataattaaaatacacttaagtaatataaaacagaaaatgttgagaactctataacttctgaatggtaacacttttaaggtggaagtaattatacatttggaaaatatgaatgtggtatagtattataattttgattggtaaccttgaatggtttaggactttatttacatgatagtatcagtttggctgaagaaacttcttagatatgaatttcattattattgtagcattttatatcctctctggtgaactgggtgtagttaccgtaagtttaaagatgagcatataagcatagagtgcctaattcatttagaatgataatctacatatttgcattcacatttcagtggaacttattgaggaatgttaaagaacaatcttcagtaagtacccctgagcccttgracctttataacatgaacaattctaaatcatggaacagggaagagggcagaaatagaatatcctaagagccgatagttatggcttggaacatagtgactggaatattcctataagattggcctaagcgaaaaagaaagtggaaaaaggatcagcaatakaacaggaaagacacagggacaatatgggccccaaggagaggaagttcctctaggaatctgaggatggtgttgaatttcatggtttaaagcaggctcaaaacaaaggagttaggagaaatgtaatataagaattacctcaggagcttaaaattttttaattaagatataagtacataaaagtgcataaagaacagtaatcttaagtgtaaagctaaataaaattggatatatggatataagcctgtgtaacccctatatagatcaagatatagaacacatctggcaccctagaaagttccctctggccctttctgattctatattccattaatctcttcccaagaggtaacccctattcagmctttttcttatcatagattagatttgccttttctataaatttatataaatagaataacacggtatgtactcttttgtcttactttttcactcagtgtaatgtttttgagattgattcatattattgtacatgtcagtagtgtgtaaagttttattcattctactactgatgaayatttgggttgtttctagtttggggctattataaatgatgctttttggatcattaatatccacgtttttgggtgaacatgcacatttgtttttgttggttatgcatttaggagtgaacttgctaggttgtaggtattcatactttcagctgtagtagatactgtcaatttttttaaaaagttgttccaattaatactcccaccagcaacgtataagattccaaatgttcaacaaccttggcaacacttggagtctattgtttaatttcagtcattattgtggatgtagagtgggcacattgtggatttaatgttcatttcttgatgaataattatgttttgtgtcttttcatatgttaattggtcatttggataccatcttttgtgaaatatctgctcaggtctttgacccatttttaattaggctattgtcctttcttattgattcataagagatctttatatattctgaacacaagtcctttgtcaaatgtatgtattgtaattatcttctactctgtgacttgccttttctctctattaatggtatgttttgatgaaaagaactactacacacacccaccaccatcactaccaccatctccctagcagtcaaacttacttcctactttataggtataacaaaaggcaccagataggagtttcctcattttcttgccaccaaccctacactttctgcctctgtgcctattctatcttcctttcaacttattatagtagaggggttgtcctttctcctagttaaggccaatctcttcctctatgctttgaattccattcactcttaccatttggagtcccagacattaccaatttccccctatttgtcctgtatcttcagactgttccctgaaatggctccttcacatcagcatttaagcatttccatttttctcccacttttaagaaaacaacaaacaaaatgcccccttgacttctcatcctcctactgtatcccttcccaccccattcacagccaattttttcaaaagaattgtccttactttgttttgttcattttatctgttcttttctttatttctactcactacttaaccctctcaagtctgatttccaccccatctctctacaaagatcactaatgacttcaatatcactaaatgtattttacacttataaaatctcgttttgctggatttcgtagtggtagttgacagacttgaccaccacatgctatacaaaacactctatctttaagtatagtacaccacagtctcttggttttccttctgcttatcttgcagctccttatcagtatcctttgctggctactccacttccaccaagccattaaatattgaacctcctcaaagctctattccagcctctctcctaacttccattagctcctaagtaatttcacccactcccaaggctttaatcatccaaattgcaaagtcttccaggtccatatttccattccagtcctctctcctaagctttaaacatgtataaatccaaaataagctcatcattttcatcccacacgttcaacacaaatatattttacctccgttgttaccattgttagcaatatagatcaatgatcaactctcaagtcggaaacctgggagtcttctttgattcttagcactctctttcactccttgccaaaaatctgtttacgcttctgcttccccattgttatcaacttggtctaagcccatattatctcttttttggattatagctcctaactggcctataggacaactctcagcgttgtagtcagagcagtgttttaaaaacacaacccagttcaagtcattatttcatttaaaaccctcaaatggctccatcaaattcaggttaattcagttcttaccctggtttaaatatttgcatgatctatcccataaatatacacaattattatcaattaaaaataaataaaatattttaaaacaacaaaatacttgcatgacctggctccctgctacttctgtgccctaatctccaattgttcatctcattgatcagtctcctccagttacatttccctccttgattctccttgaacagcccaaccatgttcatacctcagagcctttgcacttgctgatccttcagctggaaatggtgtaccccaccaaccttcagatggattttactcatatttcaggattcagcttaaatgtattttattagggaagccttcttcaattgtccaagaattcacaccaccatataatcaatttgcacatctgtaatatcccagtgatttttaaattttaaaattgtaattatgaaatatttcaaacatacagaaaatttaaaaagcacctatatatccactattgagattaaacggacaccaaatttttgttaattttactttatatcacttaaaaaaataaaacattacagatagagataaaccctacctccattccttcatcccccacttctcactgatagatgaccactagcctgaagttggcatgtatcatcccaatacttgtttttgtactttcactaaatgtgtacgtatccattaagatgtatttgattgatttcatgcttaaaatttggggatcaagtgtttcatactgtacataccttttgcatcttgctttttcccccctcaatgttatgattttaagatttatctatattggtacacattgatctagttcatccacataacgacttcatagtattctattgaataaatgaaccatgctagcttttttcttcatttctctgatgatgggtagttaagtacattccaatctttatctattcaaatcgtttgcaatgaacatccttcaccatatctcctaatgcatatgtacaattttcaagactataggcctagaagtgggtatgtatatctctatatttattagatattgctaaattctttctaaagcagttataccaatttacaattagtaacaatgaaaagctcctatttctcctcatttctcccaaagttggtgttatcagagtaaattttgccaatccggtgaatattaaataatatctcattgtgatgcaacctctgtgaggttgattttcttttaacatgtttactagtcattcaagatccttcctctagtaactgctgattcatattatatctatatttttgatttggttatttgtctttttttgtttatagaaattctttatatattcagaattttaaacgtttgtcatttgtgagttgtaaatatcttctgtcagtctgtaacttgcctttacctttgcttatactgaaatattttaaattttaatatatttaaatttatctttccctttatggcttgtgtttttatgttttattaaagaactcctcccatctagatatcataaagacttcctactgttctcttttttcttactttcttcttactaatacacaaacacacacacacacgcaccccacaaacatatgtattctactcttcttattatttttacttagggtttaaacctgccagaaattaaattattaaatttttataaatkgtgtaaagtattgatctaattttatctgtttccataagggtaaccaaatatcctaacaccatttattggaaagtccatcatttcatacactgatttattatatactctatatgtcatatactaatcatttattcttgtatatttgtaagttcattgtgattctccaccatttatttgtctatttatgctataatattacactttttaaaaatattatggctttatggtaagtttcactatctagtaatgtcagttcttcatgcttattcctcaaaatagtcatgatcattattacctattttcaattttatatgaattttagtatcagtatgtcaagttctgtaagaataatatccttaatccatatttattrttgatatcttgattaaactttcatttaatgtatggaataacttgagaataatcatttatgttcacaaatctttccctcaggaacatagtataactctacgttcatttaggcctttaaaatagattgtaattaaagttttatcattttcttcttcaagaggaaacacttttaaattattgcattttataagagttatttctatacactttgtaatttttgttgcccttataaatgcttgaggggatggatactccatcttccatgatgtgattattatgcattgcgtgcctgtatctaaacatcttatgtaccccataaatataaatcccctactatgtacctacaaaaattaaaaattaaaaaaatagtagctatgggagcagggggtgtccattcttgcatattgtatgtgtatgtgtcttatacccataaataattcactgtgtttgcattggtttttaattttggtctatcttttgctatttagaaaaattgtatttttgctctaatgatatcttgattctagtggttttcaaacttttagcatacctcagaatctcctagagagctgttacaacacattgctgggccccaattccaaaatttctgattcaacggttctggagtagggtatgagaatttgtatttctaacaactttccaagagatgctgatgatagtggtctagtacaacatttgaagagttattatttcatgctaatatctttatataatgcttttagctccattttaaagaaactgtctattgtttcccctcatgagtcataatgaaatttgctggtaacctctttttgcctttcctctctttctgacctagcctctgatttaaacctatatccttttactcccagttaatatttacaaggctatcctctttctatagccatttttattatttgtagtatatttatatttcagaccatataatgtttaactctattctgtcattccatccccattatttattcttagctttacaggtaaatatagttactgctcaccattagaaatgtcccaagcttctcctatagtttcttgcttatttgaagcttgtcctctattaaatcccttaggaaggaataatgacaatatttcttgagttcttgcatattcattacagcttgtcttttaacttggttggatgtaaaatctttggtatgctgttgcttatccatctcatttataagtagttttcctacatcacaatctttgcacatttctctgagcagtttttttctgaagcttttcttctggaagaactctaatactacattaaacaaatacacacaaatagcctttttatgtatacttagaaatctggtgctcataggtaagcagctccttggcaaaagaagtgcagtagtggccagctgaaatggccacttctatccagagcttttcagaactgaacatttcttggggaattaggtgatgtcaccagtgtaccctgtgctgaacttcttccacttttccacgtttatatccacttttgatctcccttacaggcatttgaacccacatcctagttaagacctatttatagtccatagccagaaaatttctttgaatgcataactattctgttggtggtagagttttttttttttttttttttttttgccaaactacactttcacatggcaagcaggtcttttagaaatccaattatatgccttccaaaggtccaaggccttatttctagtcaacttgtacagaccattacaacttcagcyaacacaactgcacattgctcagctggcttttatctgcaagcaccacctactggcctggaagtaaagctgcacaacccaatacaatgcctgttgacaaaatgcttgtgccggagaatgagataagcttcctgagacctccaagtccctatctctacagtaggcagtgagcttgttcacatccccagtacaccactactataatcagataatcagcatttcagaaaaccaccacattaagcctatttatatccctggcattcgtacagagtcctgttcccctgaaagcactcagaaaaattgccaaatgactctactgaacatacactacagtcacacactcaagggggtggggggaaacaaaaagtctcatccaaatgaaaataaattcaaaaatgagaagtgacagcttatccagataagaaggaaccagtgtaagaactctggtagtataaaaaatgaagtgtttcaacaaccccaaagaatcacactagctctctagcaatggattctagtcaaaatgaaaattctgcaatggcaaataaagaattaaaagtatgaattttaaggaaacccagtggaaatcaagagaaagttgaaaagaacagaaagaaatcagaaaaataattcaggatataaatagaaatttactaaagagacagaaaatttttttaaaaamccatacagaactactggaaatgaaaaattcattggagaagttccaaaatatagttgaaagctttaacaatagactaaacaaagcagatgaaagaatttcagagcttgaagacaggtcttttgaattaacctacttagacagaaataaagaaaaaagttttaaaaaaatgaagaaagcctttgaaatatatggcattatgtaaagtgaccaaccatacaaggtcatagatattcctgatggagaagaagaaaaagtaaaaagtttggaaaacctattgaggaaataattcagaaaaaaaaatgcctggtcttgttagagatttatacatccagatacgataatcttaaagaattcctggaagacagactacaggatgaccttcaccaagccatatagtcttcagactagccaaagtcaaagtgaaagaaaaaatactaaaagcagcaagggagaagcatctaatcacctatgaaggaaatcccatcagactaacaccagacttctcagcagaacccttataagccataagagaatggggtcctattttcagtcttcttaaagagaaaactgccagtcaagaattttgtgtcccactaaactaagcttcataaatgaagaagaaataaagtatttcccagacaagtaaaggctaaagaaatttgtcaccgctagaccagtcctacaagaaatgctgaaaggaattttcaacaaggaaacaaaagaatgatatccaccatcataagaacacacaaaaagtataaaacacatagttcttataaagcaattacacaatcgagactaaaaaacacctatataacaattaaaattattacagaaacaaaacctcatatatcaatattaatcttgaaagcaaatggaataaatgctccacttaaaagatattgactagtggaatggatttaaagaaacaagatccaaaaatatgctgcttacaaaagaatccacctaactggtaagatatttacagacttgaagtaaagaagtggaaaaagatactccatgcaaacaggaccaaaagcgagcaggagcacctctacttatgtcagataaaacagacttttaactagcaacagtaaaaaaaaaaaagacaaagaaggtcagtatatatatgataaaggaatcaaatcaacaagaagatatgacaatcctagatagatatgcacacaacactggaacactcagatttataaaaatgaatactactagacctaagaaaagagatagacagcaatgcaatagacagcaattcaacacctcattgaaagcactagacagatcaccgaggcagaaaatcaacaaagaaactctggaattaaattggactcaagataaaatagacccaacagacatttatagaacattccacctaacaacagcagtatatacattcttctcatctacatctagaactttctcccaaatagaccatatgctaggccacaaagccagtctcaataaatttgaaaaatcaaaatcctgttaaatatcttctcagaccgcaatggaatataactagaaatcaacaccaagaggaagtctcaaaactattcaagtaaatgaaaattaaacaatctgctcctgaataatctgtgggtagatgatgatattatggtggaaatttgaaaattttgaaacaaatgaaaatacagacacaatgaaccaaagatcctgggatacagcaaaaacaccgctaagggggagtttatagtattaaatgcctacattcaaaagatagaaaggcctctaattaacaacctaatgtcacacctcaagaaactagaaaaacaacaaaccaaatccaaagctagcagaagaaaagaaataacagagatcatagcagaactaaatgaaattgaaaccaaaaaattatacaaagaatctataaaattaaaagttggttctttaacaaaataagcaaaattgatggactgctagctagattatccaggaaaaaaagagagaagatacaaataaggacaatcagaaatgataaaagtgacattacaattgatatcacttaaatacaaaagatcatcagagactactataaacatctctatgcatacaaactagaaaacctagaggaaatggatatatttccagaaacatrcaacctccaaagattgaactacaaggtagaaaatgtgaacagaccaacaaccagtagtgaagatgaatcagtcataaaaatctttccctcaaaaaaggctggattcacagctaatttctaccagatgcacaaagaaggaatggcaccaatcttactgaaatagtttccaaaaatcaaagaggaaggaatccttcctaattcattctataaagccatcatcaccctgacaccaaagcagagtaaggacacaatgaaaagggaaaactacaagccaatatccctgatgaacataggtgcaaaaatcctcaaaaaataaaggctgggtgtggtggcgcacgtctgtaatcccagcactttaggaggccaaggcgggcggatcacgaggtcatgagatcgagaccatcctggctaacatggtgaaaccccgtctctactaaaaaatacaaaaaattagccaggcgtggtggcagacacctgtagtcccagctacttgggaggctgaggcagtagaatggtgtgaacccaggaggcggagcttgcagtgagccaagattgtgccactgcacttcagcctgggcgacagagcgagactctgtctcaaaaaaagaaagaaagaaagaaagaaagaaagaaagaaagaaagaaagaaagaaagaagaaagaaaaaaagaaccctagcaaaaggaatccaacaacacttyaaaaagataatacatcacaatcaagtgctccttattccagggatacaagggtggttcaacacatgcaaattaataaatgtgattcaccacatatatagaattaaaaacaataaccatatgatcatctagatagatgcaaaaaagcatttgataaaatttagtaccctttcatgataaaaccctcaacaagctaggcatcaaaggaacacacctcaaaataattaaagccatatataataaacccatagccaacatcataccgaatgggtaaaagttgaaagtattccccctaagaacaggaagaagtcaaggatgcccatttttaccactccctattgagcatactactggaagtcttagctagagcaaaaaggcaagagaaatgaataaaagtcatccaaattggaagagaggaagtcaaattatctctgtttactgatcatatgatctcatacctagaaaacactaaagactctttcaagagactcctagatttaaagatgacttcagtaaagtttaaggctacaaaatcaatgtacaaaaatcagtagcatttctatacaccaaacagtatcaagcagagcgctaaatcaagaactcaatgtcatttgcaatagctacaaacattaaaatacctaggaatgtatttaatcaaggaggtaaaacatccttacaaagcgaactacaaaacactgatgaaagaaatcatagatgacacaattaaatggaagataactcatgtgcatgaattgaaagaatcaatattgttaaaatgactatactgcccaatctacagawtcaatgtaattcctatcaagttaccaacgtcattttccacagaattagaaaaaaaaattataaagtacatatggaaccaaaaaagagcccaaatagccaaagcaatcctaagcaaaaagaaccaagctgaaagtatcacattacccaagtgaaaattatgctacaaggctatagcaaccaaaacggcacagtagattctgctggcaagaaggccaaataggaacagctccagtctgcagctcccagtgagaccaatgcagaaggcaggtgatttctgcatttccaactgaggtacattattcatctcattggaactggttaggcagcgggtgcagcccacrgagggtgagcagaaccagggtggggcatgacctcacccagaaagtgcaaggggttggggaactccctcccctagccaagggaagccatgagggactgtgatatccagcccagatactatgcttttcccacggtttttgcaatctgcagaccaggcgattccctcatgtgcctacaccaccagggctctgggtttcaagcacaaaactgggcggctgttcgggcagacactgagctagctgcaggagtttcccatcctcctcccctgcccagtggygcctggaaccccagggagacagaaccattcactcccctggaaagggggctgaagccagggagccaagtggtctcactcagcgggtcccacttccgtggagcccagcaagctaagaactaatggcttgaaattcttgctgctagcacagcagtctgaggttgacctggaaagattgagcttggtagcggggggcatctgccattactgaggtttgagtaggcagttttcccctgaccacactaaaaaggcctagaaattcagactaggcagaactcaacacagcatggcaaagcggctgtggccagactgcctctctagattcctcttcactaggcagggcatctctgaaagaaaggtagcagctccagtgaggggcttatagataaaactcccatctccctgagacagagcacctgggggaaggggtggcagtgggtgtagcttcagcagacttaaacattcccgcctgccagctctgaagagagcagcagatcctgacaaggagggttcccccagcacagtgctcgagctctgctaagggacagactgcctcctcatgtgggtccctgacccacgtgcctcctgactgggagagaccttccaagaggggttgacagatacctcatacaggagagctctggctggcatcaggtcggtgaccctctgggacaaagcttccagaggaaggaacaggcagcaatctttgctgttctgcagcctccactggtgatatccatgaaaatagggtatggagtggacctccaggaaactgcagcagacctgcagaagaggggcctgactgttagaagaaaaactaacaaacagaaagcaataacatcaacatcaacaaaaagaatgcccacacagaaactccatccaaaggtcatcaatctcaaagatcaaaggtagataaatccatgaggatgagaaaaaaaccagcgtaaaaaggctgaaaattccaaaaaccagaatgcytcttctcctccaaatgactgcaattcctctccagcaagggcacaaaactggacagagaatgagtttgacgaattgacagaagtaggcttcagaaggtcagtaataacaaactcctctgagctaaaggagcatgttcaaacccaatgcaaggaagctaagaacgttgacaaaaggttacaggaactgctaactagaataaccagtttaaagaatataaatgacctgatggagctgaaaaacacagcacaagaacttttgaagcatacataagtatcaacagctgaatcaatcaagcggaagaaagaatatcagagattgaagatcaacttactaaatgaggcatgaagacaagattagagaaaaaaagattaaaaaggagcaaacaaagcctccaagaaatatgggactatgtgaaaagactaaacctctgattgattggggtccctgaaagtgaygggaagaatggaaccaagttggaaaacacccttcagtatattatccaggagaacttccccaacctagcaagataggccaacattcaaattcaggaaatacagagaacaccactaagatattcctcaagaagagcaaccccaagacacataattgtcagattccccaaggttgaaacccaggaaaaaatgttaagggcagccagagagaaaggtcaggttacctacatagggaagcccatcagtgaatgtctctggagaaatgcaacaagccagaagagagtgggggccaatattcaacattcttaaagaaaataattttcaacccagaatttcatatccagccaaactaagtttcataagtgaagcagaaataaaatcctttacagacaaggaaatgctgagggattctgtcaccaccaggcctgccttacaagagctctggaaggaagcactaaatatggaaaggaaaaacyggtaccagtcactgcaaaaacagcacggtagtggtataaaaatggacacataggtcaatggaagagaattgagaatccagaaataaagccacgtatccacaaccaacaaaaatacacactggggaaaggtcagtctattcaatatatggtgctgggactatttaatcatcatacgcagaagaatgaacctggacccatatctctcaccatatacaaaaattaactcaaaacggagtaaatacttaaatttaagaccttaaactataaaaaatcctagaagaacacctatgaaaactctttagactttggcatagacaaagaatttatgactaagtccccaaaatcaaatgaaacaaaacaaaaaatagacaaatgggaatgaaactaaaaagcttctgcacagcaaaagaatcagcagagtaaacagaaaacctatagaatggaagaaaatattttcaaactatgcatctaacaaaaggctaatatccagaatctacaagaaactcaaacaactcaacaagaaaaaaatcccaaataaccccattaaaaatggccaaaggacacaacagacatttttcaaaagaagacgtacagccaacaaatatatgaaatcatgctcaacatcactaatcatcagagaaatgcaaattaaaaccccaatgagatatcattgtataccagtcagaatggctattactaaaaagtcaaaaaaacaacagatgttggcaaggatttagaggaaagggtatgcttatacattgttgatggaaatgtaaattaatacaacctctacagaaaacagtgtggggattctcaaagaacgaaaaatagaactaccattcaatctagcaatctcactattgagtatctacccaatggaaaagaaatcattaattaaaaggatacttgcacttatatgtttattgcagcactattcacaatagcaaagtcatggaatcaacctaagtgtgcataaacagatgattagataaagaagattttatattatacacacacacacacacacacacacacacacacacacacacaccatggaatactatgcagccataagaaagaatgaaatcatgtcttttgcagttgcatggatggaactggaggtcattatcctaagtgaagtagctcagaaacagaaagttgaaaactgcatgttctcacttgtaagtgggaagtaaaaatgagtacacatggacatacagagtgaaatagtagacactggagattctaaaaggtgggatagtaggagggggtgagggttgaaaaattacctaaggatataagagccactattcaggtgatgagtaaaccaaaaatccagactttatcattatgtaatatatccacataacaaaaatatggcacttctatctcctaaatctataaaaattttaaaaatgtaaaaagcaacagaaaatagttaccaaatatggtagatatacattttaaaaatcaataaccactttaaatataaatgatctaaatgcaccaattcaaaaaaagattgccaatgtaggtttttaataaaatccaactacatgttgtctacaacaaacccactttaaatatatagactcagttttatgagccatattagcaaattaatctaaactgagggaaaggtcaaaggaatcctgatttatagctagttgtcagaagtataggtgacaagctactacttataactggcatctgaatatacacagtattgcagggttgagcccttaacctgtgggatctgacattgtttccaggcagatggtgtcataatttaatttaattataggacaccaagtgggtgtccacaggagaatagattgttggtgtggagaaatccccatatgtaatttggtgaccagaagtggtctgtgctaagcatgagagtaggaaaaacagttggttttcctattatatgtaaagtcccaataaccttttctatagatatggaaatgacaatactaaaattcatatggaattgcaatgagtccaagtagccaaatcaatttagaaaacaaaataaaaagttggaagactcacactttccaatttcaaaacttattataacactacagtaatccaaacaatgtggcactagcataaggatagacaatggcatctataaatcactgaaatggaattgagaatccagaaataaacccaaacatctatgtataattgattttcaaccaggatgccaagaccatacaatggggaaagaacagtctcttcaacaaatggttctgggaaaactggatatccacatgcaaaagaatgaagttggacctttacctaacattatgtataaaaattaactcaaaatagttcaaagacctaaatataagagctaaaactgtaccaatattagaagaaaacttgggaataaatcatgatgttgaatcaggcaatggtttcttagatatggcaccaaaagcacaagtaacaaaattttaaaaaccataaaatggacttcatcaaaattcaaaaccttagtgcatcaaaagacattattaagaggtgaaaagacagaatgagagaacatatttgcaaatcatatatctgataactagataagggtccatatatctgataactagataaggatctagtgttcagaatatatgagtaactcctacaactcaataataatgagaaaagcaacccaatttaaaaatgagcaaatgacttgaatagacatttctctaaaggagatatgcaaatggccagtaagcacatgaaaagaggctcaatattaatcactggggaaatgcaaatcaaaacaacaattagatatcacttcacacccattaggatgctaataataacaataatggcagaaaataacaaatgttggtgagaatgtagataaactgaaccatcaacgagaatttaaaattgtgcaatcatggcaaaaaacattctggaagttactcaaaagcttacacataaagttactatatcatccagcaattccactccaagatatttactcaagagactcaaaaacaaatatccaaccaaaaatatgctcacaaatgttcatagaaacactattcacagtagcccaacagtggtaacaacccgagtgtcccttaatagataaatgtataaatgaaatgtggtatatatacacacaatggaatactattcagccataaaaagaaataaaacaggtcctgtcatttgcaacatgaaataaggcaggcaagaaagacaaaacattgtgtgttcttacttatttgtgggatctaaaagtcaaaacgactgaattcatggagatagagagtagaaggatggctaccagagactgggaaaggttgtaatgggctggggtgaaggaaggtggggatagttaatggataaaaaaaaaatagttagaaagaatgaatcagacctagtatttgatagcacaacagtgtgactatagtcaataataatttaattgtacattttaaaataactaaaagagtgtaattggattgtttataacactgatatggtttggatttgtgtccccgcccaaatctaatgtcaaattgtaatccccaatgttggaggaggggcctagtgggagattattggatcatgggggcagatttcctcctcgctgttctcctgatggtgagttctcatgagatctcgttgtttaaaagtgtgtagcacctctacctccctgtttgctctcttccttctgctccagccatgtaggacgttcctgcttcccctctgccttctgccatgattgtaagtttcctgaggcttccccagccatgcttcctgtacagcctgtggaaatgtgagccaattttaaacctcttttctttataagttacccagtctcaggtagttctttataacaatgygagaatggactaatatgaacacaaaggataaatgcttgagggaatggataccccattttacatgatatgattattatgcattgcatgcctatattgaaacatctcatgtaccccataaatatatacatatactatgtacccataaaattaaaataaaaaatgttaaaagcatgatacataaaatgaaaattggtaagttagacctcatcagaattttaaagccttttgctctgcaaaaactctaaggataaaatgacaagcaacagactgggatatttgtaaatctaggactagtatctagaacatatttttaaaattcaaaattcaataattaggaaatggacaaaagatatagacatttcattgaaaggagtatgcaaattgcaaataaggccatgaaaagagaaaatacatcattagccaccagggggaactgcaaattaaaagcacaatgagatacccctataaacctaccagaatgtctaaacttaaaaatacctgggctgggtgagctggctcatgcctgtaatcccagcactttgggaggctgaggtgggcagatcactcgagaccaagagtttaagaccagcctggtgaaaccccrtctctactaaaaatacaaaaattagccgggtgtggtagtgtatgcctgtaatcccaggaggctgaggcatgaggatctcttgaacccaggaggtggaggctgccgtgagccaagattgcaccactgcactccagtctggaaaacagagtaagactctgtttcaaaaaaaaaaaaaaagtgataacatcaatggtggttaggatgcagagaaactggatcactgatacattgttggtgggaatataaawtrgtacattctctatggaaaacagctttgtgttttcttagaaaaataaaaatgtaattaccacatgcccctgaaactgtgctcttgagaatttatctcagagaaatgaaaaatgatgctattgaagaattctgtacttaagtgactgtagaagaatgctgcattgggtagaaatagccaaggtctagtatcttcatagtgctcagtttttgtctgggaactttccagcaagaatttggcactccatcaaaccgcatgtcagatccccaaactgctgcagctgaaggctttcagctaaatgcacctactgtggaggtactttcctgaagggagagcaaggtggyacaccacacggctgctgcacaaatgtacaaaaaattcaatatgtagaggacttgaaaaacccaattaataaacttgatctaattgacatatatagaacgctgcatccaattactgcagaacacgtatagctttcagatacatataaaacatctataaaagttgagcatatgctgggtcataaatcaatttataattctattgagctcaaaattaaaaatcgctaaaaatctacatttgaaatttaagcaagaagcttccaaagtaattaaaaaattaaagaagaaataaccatgagtacttaacaacacactgaactaaaggactataacaatatatcatagttttgtttgcttaggattgtcttggctatacgggctctattttgattccatatgaaatttaaaataattttttctaattctgtgaggaaagtcaatggtagcttaatgaggatagcattgaatctataaattactatgagcagtatggccattttcacgatattgattcttcctatccatgagcatggaatgtttttccatttgattgtgtcctctcttatttcctcgagcagtgatttgtagttctccttgaagaggtccttcacatcccctgtaagttgtattcctaggtattttattctctttttagcaattgtgaatgggagttcactcatgatttggctctctattattggtatataggaatgcttgtgatttttgcacattgattttgtatcctgagcctgctgaagttgcttatcagcttaaggagtttttgggctgagacgatggggttttctaaatataaagtcatgtcatgtgcaaacagagataatttgacttcctcccttcctatttgaataccctttatttccttctcttgtgtgattaccctggccggacttccaatactatgttgaataggagtggtgagagagggcatccttgtcttgtgccgattttcaaagggaatgcttccagctcttgcccatttagtatgatattggctgtgggtttgycataaataggtcttattattttgagatatgttccatcaatatctagtttattgagggtttttagcatgaaggggtgttgaattttattgaaggctttttctgcatctattgagataatcatgtggtttttgtaattggttctgtttatgtgatggattacatttattgatttgcgtatgttgaactagccttgcatcccagggatgaagcctacttgattgtggtggataagctttttgacatgctgctggatttggtttgccagtattttattgaggatttttacattgatgttcatcaaagatactggcctgaaattttctttttttgttgtgtctctgccaagttttggtatcaggatgatgctggcatcataaaatgagttagggaagagtccctctttttctattgtttggaatagtttcaaaaggaatggtaccagttcctctttgtacctctggtagaattcggctgtgaatctgtctggtcctgggctttttttggttggtaggctatttaattatgcctcaacttcagaacttgttattggtctattcagtgattcgacttcttcctggtttagtcttgggaaggtgtatgtgttcaggaatgtatccatttcttctagattttctagtttatttgcatagaggtgtttatagtattctctgatggtagtttgtatttctgttggatcagtggtgatctcccctttatcatttttcattttgtctatttgattcttctctcttttcttctttattagtctggctagtggtctattttgttaatcttttcaaaaaaccagcgcctggattcactgatttttttgaaggctttttcatgtctctatttccttcagttctactctgatcttagttacttcttatcttctaaagctggaggcatcatgctatctgacttcaaactatactagaaggctacagtaaccaaaatagcatggtactggtaccaaaacagatatatagaccaatggagcagaacagaggcctcagaaataacaccacacatctacaaccatctgatctttgacaaacctgacaaaaacaagcaatggggaaaggattccctatttaataaatggtgttgggaaaactggctagccatatgcagaaaactgaaactggaccccttccttacacattatacaaaaattaactcaagagggattaaagacttaaatgtaagactaaaaccataaaaactctagaagaaaacctaggcaataccattcaggacataggcatgggccaagacttcatgactaaaacaccaaaagcaacggtaacaaaagccaacattgacaaatgggatctaattaaactaaagagcttctgcatagcgaaagaaactatcatcagagtgaaccagcaacctacagaatgagagaaaatgtttgcaatctatccatctgacaaagggctaaaatccagaatctacaaggaacttaaacaaatttgcaagaaaaaaacaaccctatcgaaattgggcaaaggatatgaacagacacttttcaaaagaagacatttatgaggctaacaaacatataaaaaaagctcatcatcactactcattagagaaatacaaatcaaaaccacaatgagataccatctcatgccagttagaatggcgatcattaaaaagtcaggaaacaacagatgctggagaggatgtggagaaataggaacacttttacactgttggtgggagggtaattagttcgaccattgtggaagacagtgtggcaatttctcaatgatctagaaccagaaacaccatttgaaccagccatcctattactgggtatataccaaaaaattataaatcattctactataaagacacatgcacacatatgtttaatgcagcgctattcacaatagcaaagacttggaaccaacccaaatacccatcaatgatagactggattaagaaaatgtggcacacatacaccatggaatagtatgcagccataaaaaagaatgagttcatgtcctttgcagggacatggatgaagctggaagccatcattctcagcaaactaacacaggaacagaaaaccaaacactgcatgttctcactcataagtgggagttgagcaatgagaccatatgggcacagggtggggaacatcacacactggggcctgtcagggggtgggggcaaggggagggatagcatttggagaaatacctaatgtagatgacatgttgattggtacagcaaaccaccatggcacatgtatacctatgtaacaaacctgcacattctgcacatgtataccagaacttaaagtataataataacaaaaaacaaaatacaatgtaaaaaaaaaagaaagaagaagaagatataacaattgtaaacatatatgcactccaaattggagcaactaaatatacaaaccagatattaacagaactgaagggagaaatagagacaatacaataaaagtaggagacttcaattcccatattcagcaatggataaacatccagatagaaaatcaaaagggaaacattggacttgaacaaaactatgtggacagcatgaaggattaaaaaaatatacgatcatctcaacagaggcagaaaaagcacttgacaaaattccacactccttcatgataacaatgctcaacacactaggtggagaaaaaaatgtaccttcacataataaaggctatatatgacaagctcacagatggtatcatacttaatagtgaaagactgactttttttcctctatgatcagaaacaagacaaggataatcactcccaccacttgtatccaaaatagtggtggaaatcttacccagagcaattaagcaagaaaaagaattaaaggaaataaaaagaagctgagtaggaaaggaagaaaaactattcctgttagcagattacatagttctacatgtagaaaaccctgaaggcatcacaaaaaactgttagaactaagaaattaagtaaagttgcaggatacaaaatcaataaacaaaaaagttacatttctacacactaagaacaaaccatccaaaaaaggaaactaagaaaataatcccattacaattatgatggtattaaaaagaaaaaaaagtacttagggataaatgtaattaaggaggcaaaagtcttgtacactgaaaactagaaaacattgttgaaagaaataaaagaagacacaaataaatgkaaagacacttcatggattggaaattttaatattgttaaaatatctataccatgcaaagctatctacagattcaatgctatccccataaaaatcacaataacattttttacagaaatagaacaaacaatcctaaagtttagatgagaacacaaaactatctggaatagcccaagaaatcttcagaaagaacaaatctagaggcatcaaactttctgatttcgagacatgttacaaagctacagtaactagagagtactggcataggaacagacatatagcccaatgcaacaggataagaagcccagaaataaacacatgcacatacagtcgattaactgatgtttgaaaagtgtgccaaaattacctaataagggaagaatagttttttcaacaaatggtagtgggaaagctggatatccacatacagaaaaaataaaattggacccttatcttacatgaaacacaaaggtcaattaaaaatggattgaaaacttaaacagaagagtgaatctggagaggggagggacaagatggctaaacagaaggccccactaatcatcccctccacaaggacaccaatttaacaattacctgcacacaaagaagcaccttcataagaaccaaaaatcaggtgagcactcagagtacttgcctttaacttcaaatcactgaaagaggcactaaagagaataggaaagacagtcttgagtcactgataccacccttcccccaaccctctggcagtggccatgtggtgcagagagagaatctgtgcatttgggagaagaaaagtgcaacaactgtgagacattgcattgaactcagtgctgccctgtcacagcagaaagcaaaactaggttgaattcagctgatgctcgcccatggagagagtdcttaaaccaggcctagctagaaaggaatcacccatcccagtagtcagaacttgagtactggaaagcctcaccagcatgggctgaagtgctctggggaacataaataaatctgaaaggtcacctaggccacaaggactgtaactcctaggtgactcctagtgttgaaatgggctcatagacactgtacttggtgacacacagcctagtgagataccagctgcggcagctaaaggagtgtttgtaacctgaggcagtacagtttgtgcctccagaggagacccctttcatctacttgaaaagaagagagggaaagtaaagaggatgttgtcttgcatcttgaataccagttcagccayagtaggatagtgcaccagtcagagttgtgaggccctaactcccagatgacatttctagacaaacgctgggacagaagggaacttgctgcattgaagagaaggacccagtcctggcaggatccatcacctgatgactgaagagcccttgggtcctgaataaccagcagagatacctaggtagtatatgggcattgggtgagactctgagacttgtgggcttcaagtaagactcagcacattttcagctgtggtggctacgggaagtgattcctctgcttgagaaaagtggagagaaaagtaaaggggacttgtcttgcaccttaggtatcagttcagccacagaacgatacagcaccaagtggactcttggggtccctgattctaggccttggctcttggatgtatttctggacctgccctgggccagaggggagcccacattcctgaagggtgaatctaaggtgagacagcactcaccacaagctgactgaagagcccttggtccttaagggaacatcagtagtagcctggcagtactccctgtgggcctgtgctggtggccataaggtgaggctcctctgcctatggaaaggagagggaagagtgggaagcattgtgacttatgggttgagtgcggggtcagacacagtacaatagaacaccaggtagaattggacagactttgatgccaatacctggctcctggatggtacctcgggacctgcctggggcctggtggaacgcactgccctgaaaggaaaaacacagggctggctggctttgccatcttctgattgtggagccccagggtcttgaacaaacatacacagtagccaggtaggtagtggttacagcaggccttgggcaagacccattgctgtgctggcttcaggtctgatgcagtgtagtctctgtggtggtaaccactggggtgctcatgggatgccatccccagctccagaagactcagaacagaaagagagactccatttgtgtgagaaggaaaaaatattttcaccctagaatagtatatctggcaaaaatatcattcaagcttgaaagagaaataataactttcccagacaaacaaaagctcagggatttcatccacaccagacttgcccgacaagaaatgttaaagggagtacttcaagcagaaagaaaaggacgttagtgaacaataagaaatcattggaaggttcaaaactcattggtaatagtaagtacacagaaaaaacacaaaatattacaacactgtaactgtggtatgtaaacaagtcctatcttaagtagaaagatcaaaagatgaaccaatggaaaataataactgcaacaacttttaaaggtataaggaagaaaggaagaagatagaaatagaaacaacaaaaaatttaaaagcaggggaataaagttaaagtgtagagcttttattagttttcctttcacttttttgtttatgcaaacaatgttaagttgttattagcttaaaaaatggattataagacagtattttcaagcytcatggtaacctcaaatacaaaaccatacaatggacacattaaaaagtgagaaattaaataataccagcagaaaaaaaaatcaccttcactaaaagaaagaaaggaaggaagttaagacgagagaaaagactacaaaacaactagaaaacaaataacaatatggcagtagtaagtccttacttatcaataataacagtaaatgtagatggactaaactctccaatcaaaagacacagagtagctgaatgaataaaaacaacacccaataatatkctgcctacaagaaacacgcttcacttacagacacacacagactaaaaataaagggatagaaaaacattccatgccaaaaaaagagcaggagtagttacacttacatcagacaaaattgatttcaagacaaaaactatatgaagagacaaggaaggtcactatataatgataaaggggtcaattcagtgagaggatataatgattgtaaatacatatgcacccaatactggagcacccagatatataaagaaaatattttagagctaaagagagagagatcccaatacaataatagctggagacttcaacacacaactttcagcattggacagatctyccagacagaaaatcaacaaagaaacattagacttaatctgcactatagaccaaatggacctaatagatttgtacagaacatttcatccaatagctgcagaatacacattcctctcctcagcacatgggacattatcaaagataaaccatatcttagatcacaaaataaatcttaaaagatgcaaaaaattgaaataataccaagcatcttccctgaccacagtggaataaaactagatatcaacaacaagaagaattttggaaactatacacatacatggaaatttaaaaatatgctcttaaatgaccagtgagtcaatgaagaaattaagaaggaaattgaaaaatttcttgaaacaaatgataatggaaacacaacatactaaaacctataagatacagtaaaagcagtcctaagtgggaagtttatagctataagtgcctacattaaaaaagaagaatttcaaataaacaatctaataatcaatcttaaacaactagaaaagcaagagtaaaccataccccaaattagtagaagaaaagaaataataaaaatgtgaggataaagaaacaaatttgaaatgaagaaaacaatataaaaaaagaaacaaaaaatggttttttggaaagataaacaaaattcacaaacctttaggcagactaattaagaaaaaaagagaagacccaaataaataaaataagggataaaaaggagacattacaactgatagacgtttgaaggatttttagtggctactatgagcaactatatgccaataaattggaaaatcttgaagaaattgataaatttctagacatatacaacctactaagattgagtgataaggatatccaaaacctgaacagaccaataacaactcaaactattccaaataatggaggaggaggaacttattctctgaggccatattaccttgatatcaaaaccagacaaagacattgaraggaggtgccagctgggcttcctgggtctagcaggggctcagaaagctatgaaactcattttctgcaacaggacttactttggtcctggatgaataatattgaagatatatgcttaaaatattcctaacatcagaatttgtgcatgtgttttcttccccaagaaagctataaacagcgaaacttttgctgtaagcttccctgtgtcctcgctccctctctcccttccccctcccctgaaactgaaaggaatgttaaaagcccgtttttctgtgaccagcaaaccttatctatgctcccaattccgattccttgtaaacacagtttgtaaaatcctgtgagatcctgtctcctttgccatgccgctgcaaggtcataaagtagataaaccttaagttacaattccggttttcctcaagatctgatacatgttaattgtctttgtttctcgctctggtaacatcttcccgccgcacgtatttcccgccttaaagggtttaaagggtgatcaaaaaatctaacactggctaccggcccaggaccccttccacgctgtggaagctttgtactgccactctgctcaataaagcctacagcttttttctctcagtctgatccgtgtctctctctcaccgcgggctgccgccacatcaattctttggtgtggctaaggcaagaatctttggcgttacaacatcacaaaagaaaactataggccaatatcactaatgaatattgatgcaaaatttttcaaccaaatactagaaaaccaaattctataaaacattaaaaagataatttatcatgaccaagtgggatttatcacacggatgcaaagatggtttaatataggcaaatcaactaatgcagtacatcatatcaacagaaagaccaaaccatatggtcatttcaattgatattgaaaaagcacttgataaaattcaacacttcatcataattaaaatcctcaaaaaattgggtatagacggaatatatctcaacataataaaagccatatacaacatacccacagctagtatcatactgaatgggtaaaactgaaagcctttcctctaaaatcaggaacacaagcatgcccactttaactactggtattcaatatagtactgcaagtcctagctagagcaatcagacaagagaaagaaataaaaggcatcaaaaatggaaaggaagaagtcaaattatccttgtttgcagatgatacgatattaaacttggaaaaacctaaagactttactaaaaaaactattataactggaaaacaaattcagtaaagtttcaggatacaatatcaacatacaaaaatcagtaccatttctatatgcccagtgaaaaatctgaaaaagaaattaagaaagtaatcccatttacaatagctacaaataaaatgaaatacctaggaatcaacttaaccaaagaaattaaagatctttaccatgaaaactataaaacactgatgaaagaaatttaagaggacacaaaaatagaaagatattccatattcacagattggaaaaaacagtattrttaatatgttcatactacccaaagcaatctacagatttaatgcaacccctatcaaaaaaagttgagttgcttgatattttctatagattgaggtctgcagctgtggttgcccaccatttcagacagacaattaatcttgcaaatagatgatgtacacttatggtattgacaaatacagtaaagtactatacatttattttctctttcttatgattttcttaataacactttttctctagcttattttattgtaagaatacagtatataatacattaacatacaacatagtgttaatcaactctttgttattgaaaaggcttccagtcaacagggagctattactggttaagtttttggagagtcaaaagttacatgtagattttcaactgtgcagggagttggtgccccaactcctgtgttgtctgaaagtcaactgtatataagaaactcctgcaactcgatagtgaaaaacaaataactcaattaaaaagtgggcaaaggacttgaacagacatttctccaaagaagacatacaaatggccaacagataatgaaaagatgcccaacataattaattatcagtgaaatacaaatcaaaactacaatgagatatcacttcatatttattaggatggctattatcaaaaacccaaagataacaaatgttagtgaggatatgaagtaactggaacccttgtatactgttagtgggaaaatgaaattatgcagcagctatagaaaacactaaagagtttcctcaaaaacttaaaaataaaactatcatgtgatccagcaatcccacttctgagtatatacccaaaataattgaaataaggatcttgaaaagatatctgcactcacacattcattgcagcagtattcataatagccaaaatatggaaacaattcaaatgtccagatgaatggataaataaaatgtggtgtatacatacagcagaatattattcagccttaaagaggaagaaaatcttgccatatgtgacaacatggttgaacctggatgatattatattaaatgaagaaagccagtcacataaggacaaatactcctatatgagaaatctataataatcaaactcacagaagcagagattgttaactacaacttcgaaatttgttaagagggtagatcccatgttaagtgttattaccacaaacaaaccaaaaaacccaaagggacacaaggaaactgaaagtgtttgatgcatttattacattgattgtggtgatggcattatggatatttgtatatactcaaacatcaaattatacatattaaatatgtgcagytctttgtatatcaattatgttttaataaagctgttgttaaaattagaataattctggagggtttgttttcaaagtaagtatttataaatgtatggatatattgtagaggaaacgcamagggtaatataggacctagggataatagcagtggagtagcagttaccaagcttagtccagtagggacaaaaggaggaagcagttgtcagaacccaaaaggagtgagtcctgtagagatagatgctttgaaataagcagtgagcttcagttgaggccaacccaagacaatctttcaaggagagacccagagaaataaatactctgacctcaccctcctctctcattctgatttccttctggggttctggccaaatctaaccagaagccatatggcaagggatttcattaatgtagtccatattcctggaacatagggtagggtgaaaaaggatgatgggtctggatgagaagatatctagcactatcgtattgatgggcttaaagacataatatgacaaagatgttctccccaaattgttctacaggtttagtcacaaccaaaatttccacagatttattttgcgacttgacaagctgattctttaatgtagaaatgcacatggccaaatcatccttgaagaagaagatgtaatacagaatagcaggaaagatggtgaagctagtttaattaggacttgatgtatagtgcaagaatagaccaaaaaaatccattagaataggatggagagttcagaaacaggcccatacacatatggatactggatttattacaaaggtggcactgcagagcagtacagaaagggtgacattttctttcctcttttttaaaactttacatatatatatatatatatatatatatatattagaggaggcaggggctcgccatgttgcccaggctggtcttgaacatctgggctcaagcaatcctcccgcctcggcttcccaacatgttaggatcacaagcatgagctactacgcccagctgggtgatcttttcaataagtggtgctggctgggatacccacttgagaaaaaaaggcaacccaataagaaactcagacactccattaaaaataaaaaagtttcttgactttataaatattctggaaattttaaattaaaacccaatggggttaccttacacacccatgaaaatggctaaattaaaaaaaaaaaaaacaaccctgagaattactaacacttccttctgttgtaaggactgtggaacaaaggacatgcttttacactgctggtgtgcctgtaaattgcttgtgtcaatcaagttccagtcaggagacagaaaacacaccaattgttttagcagaggaaactaacataaagaattgttaactaggcattggaaaaataaaaatgcaaaaagaaaacaataaattaccatggatatggtaacagcaggaagcagctaccactcctaggggggaacaaagggaagagtttgaaattattaaatcccagaaatttggaggaaaggctttgcaaatgtgaaatgcagacttcttaggagggagcacaggcctgatgatgctcatctgagtgcacttgaggagggtcttccaatggaacacttctggggagggggtactgccaactggtggtggagtatctgaggaagtgcaataaggctaattctggaaatgctggggaaactgcaaactggattaagctgctgctactggcaggaactgacactgctctagcaccttctttaggcaaagactaccagggaggtagcaggcagagcataaatgtggtttacaaaatctgagcctcaacatcacagagcataacacacagtgtggcctgagtctcagagactattaataaccagtacagcataccaatttggatactaagtattcatatatatccttttacatgtatcttcacttctatacaccaacaaaaataactctttgtattttaatattattaatttttttattaattattattatactttaagttttaaggtacatgtgcacaatgtgcaggttagttacatatgtatacatgtgccatgctggtgtgctgcacccattaactcgtcatctagcattaggtatatctcccaatgctatccctcccccctccccccaccccacaacagtccccagagtgtgatgttccccttcctgtgtccatgtgttctcattgttcatttcccacctatgagtgagaatatgtggtgtttggttttttgttcttgcgatagtttactgagaatgatgatttccaatttcatccatgtcccaatattattaattttaattaataagttgtcactatccttcacacaaaaacactctcacaatctccccaaaatgagaagtgacaaagtcacaatagttactgtatttgcctctgaactatgttgatttctcttcaaattcacttacagtcccatctgaaaatttttacataaacactaaactgtaaagttaacttccaaaaatgattttatataaaataataaggggaaagaagagaaataaaaataaattagtcaatatatgcatacagtttatatataatacgtacatacatacatacatacatacatacctacctacataaaaacaaggaagagactgtctcattgctacatatacaccatatggttttgggttgtagttaatatctaaaacatccttcttcaactaattcatatatccttagcccattttgtgttacctggtagggagacccacagctttattcctgaatggtctgaatccttaaaaatcttgcctatttcctgcttaatgtagttttctattaaccttcactattcagcatagaaatacaaagaggttccccagagaatttcctaagtgcaagcatagtcctctctgaccccactgtgggacagcaayctaatttctttggagatctggatcaatcactccagcctgtagagtagcctttcctgattyttggttcactggcataagaacttccaaatagctaatagcgggtggcagtctcaacttccaattcaatggaatcattgtgtccccgattaaagcattcctcccctggtaagtaaaacctgtaagccagcagtgctcaaatttaccagaacaagaaccaaaattctttaagtgagttattgaggagccacttccactttgatttcttggttcttaaaagcaaaatttaagtgttttctcccaactcatgtcacagtggatcttcagcagtctatccattgttcagtcagtccagatgcttctgggtgatgtggtatatggtaagtcaaattaattccatggtatggagccacttccactttgatttctacttctagatccctgaggaatcgccacacctatttccacaatggttgaactagtttacagtcccaccgacagtgtaaaagtgttcctatttctccacatcctctccagcatctgttgtttcctgactttttaatgatctccattctatctggtgtgagatgatatctcattatggttttgatttgcatttctctgatgaccagtgataatgagcttttttcatacgtttgttggctgcataaatgtcttctttggggaagggtctgttcatatcctttgcccactttttgatggggttgtttgtttttttcatgtaaatttgtttaagttctttgcagattctggatatttagccctttgtcagatgaatagagtcctcaaggatctagaactggaaataccatttgacccagcaatcccattactgggtatatacccaatggaatataaatcattctactataaagacacatgcacatgtatgtctattgtggcactgttcacaatagcaaagacttggaagcagcccaaatgcccatcaatgatagactggataaagaaaatgtggcacatacacaccatggaatactrtgcagccataaaaaaggatgagttcatgtcctttgcagggagatggatgaagctggaaaccatcattctcagcaaactaacacaaaaacaaaaaaccaaacacaacatgttctcactcataagtgggagttgaacaatgagaacacatggacatgggaggggggcatcacacgctggggcctgttgggaggtggggagctggggaagggagagcattaggagaaatacctaatggagatgaagggttgatgggtgcagcaaagcaccatggcacatgtatacctatgtaacaaacctgcatgttctgcacatgtaccccagaactctttatatactttatacatatactatatatattatatatataaagtgtacatatataatatatatatataacttaggcccaggagccctaagttatcttgcgacctcaagaggagaggagtttacccaactcacaggtatttgataatacaaatccatggctgggctcagctttaaaaaagtattgtttgaggatccttctatggaacaaagttccatcaaagctaatttaaaacacctatgtaaaaaataattatttttgctgcactttacacaaataatctggccaagtataatgcaacaaaacaaaaccctacaaaatttaggagttgtctcccaactcatgtcacaactggatcttcagcagcctaaccattgttcagtcagtccagctgcctttgggtgatttggtatatggtgagtcaaatgaattccatggtataagcccatttctgtgcttcatttgctgtgaattgagtttcttattaagaatcaatgtcattagaatatcatgatggtgcataagacatttcacaagtccacacatgataaaggtagcagaaatattatggtaaatccatactcagagccagtgtctatttcagtgaggaaaaatcatttactactccttaatagaggctatcctacgcagtcaacttgtcaccaggtggatggcttgctctctccaagtgttcctctcctatcttggcaggctaggcactcaacagtaacaatatccaggtaaggcatgtgagaagatatatcaaaatgctcctgtcctttggatcccaagaaaacttcaccgaagcgatagattctgattttttttttttttgatggagtctcgctctgtcgccaggctggattgcagtggcgtgacctcggctcactgcaacctccgcctcctgggtttgagcaattctcctgcctcagcctcccgagtagctggaactacgggcgcatgccaccacgcccagctaatttttgtattttcagtagagacagggtttcaccatggtggtttactattctgttactaatgggaagttcttgaggcttatacttgcctcctcctacaataataactctcatttcatggatcagagagcaaatgtgaagattctgccactgtctgaatgtgtctactccaattatatattcaagagcttgggggaataaccatagggtgggtaatctgatttacttgtcacaaacataggtcaaaactccactatcatcttacctccataagcccacatttaagctcgtgaaccagtgtaataatgtgggttctcagaaattaacatcaattcagagctagtgtctaatatcccccaaaagatctggctatttccttttccctatgctgtcaccacggtaaatggctataggtccctttggagaaggtttgggataaggtttacagtatatatttatggcagtgctccggggtgtttcatcaaggggacctatcctctcctttgatcacagagctctaggtctatgaactttttttttttttttttttttttttttagtagagacggggtttcaccttgttagccaggatggtctcgatctcctgaccttgtgatccgcccgcctcggcctcccaaagtgctggaattacaggcgtgagccaccgtgcccggcctggtctatgaactttttaggtgttttagaactgggtttgaggagccatgaatttccattttagtgattcaagtcaagtttctatcaaacctagattcttgttgtttagatcaaatatcattttagtaatctacccatctatttcattccaaaggacactgtgatgaattagctgccatcaaaaattgttgaggaccaaaacattgtgataatcactttgtccttatttccagttaaagtacttactctcatctcttgtagttaagggctgacagttggcctctgctactcagggataccawcatactgactgatatcagggcactcatctcagtgttgtaactttccactgtcatacctggcctacgtaagacaaccatcacagaactttacaagggcactgattgtagtagattgaatagatggccacaattctttactcctccctgtatccatgctcctttgctctgtggcgaataacctcctatcaagaggtagaatatatttccccatgccttgaatctagtctagccttgtaacatgctttgaccaatagaatgtgacagaagtgacattgcactagttttgagctcacgcctcaagagccttgtacactttcactttctcttttggaaccttattcacagtcatataaacaaccctaagctagcctgctggaggatgagaaaacaatggggaatagagatgagccatttaagctgagttctttcaagaccagccagccctcagatgacctgctggctgatgtcacaagcatgagtgagtcttgtcaaggtaagctgagcctggcacaggacagcagaaccactaggtcaatctgtaaacttgtgatctaaataaatgttttttttaatcttccaagtttgaggatggtttgttaatgtagcactaggcgactaatacagtggtgctcttctcactaatatatttctcaaaaccttagtgaaaggaatattttctgggccatcttgggggatacagtgtgtgtgtgcgtgtgtgtgtgtgtgtgtgtgtgtgtggtggctgtggaaatcacatatgatgaattcactccatcattcctatctccctaagctttcatattccttcctctacattatgtcacgaaagttctaacatctcaactgatttaaatgtaggctgccattcagtccaaattttagtcaactagccaaagaagctgttagagttacttccttctgtacaagctaatgcactaaatccataatctctaataagtgtacctatattaataactttgtcaataataattaaattgaacatttaaaaataagtaaaagagtgtagttgtattgtttataacacaaaggataaatgcttgagaagatggatatcccatttaccctgttgtgattattacacattacatgcctgtatcaagatatctcacgtaccccataaatatatacaccaactatgtacccacaaaaattaaaattaacaataaaaaataaatcctataactaaaaatgcaattaataaaataaaaaatgcaatagagagaatcaacagctgaattgatcaaacagaagaaagaatgtgaatttgaagaaagattattcaaaaatatacagtcagaatggctattattaaaaagtcaaaaaaacagcagatgctagtaaggctgcagagaaaagggaatgcttatacaccattgatgggaatgtaaattagtccagccctgtggaaagcagtctggagacttctcaaaaaacttaaaaaacagagctaccatttgatccagcaattccattactgggtatatatccagaggaaaataaatcataaaccaaaaagacacatgcactcatatattcatcacagcactattcacaatagccaagacatggaatcaaccctggtgcccatcaatggcagattggataaaaaaaatacagtacatatacaacatggaatactatgcagccatattgaagaatgaaattatgtcctttggagaaatatggatacagttggaggccacaatcttaagtgaattaacacagaaacagaaatccaaatactgcatattctcacttaaaagtgggagccaaacactgagcacacatggacataaatatgacagcaatagaccctgtggactactggagcagggagagaaggaggggtgagggttgaaaaggtacgtactgggtactatgctcactacctgagtgataggatctgtaccccaagcctcagcatcacacaaatccccatgtgacaagcctgcacatgtacccccgtatctaaaataaaagttgaaataaaaaaaaatacaatcaaaggagaaaaaagaaaaggaataaaaaggaataaagaaagcttctgagatttatgggatagcatcaaaagagcaaatgttcagattataggggttcatgaaggggaagagaaagagaaagggatctaagcttattcaaagaaataatagaaaaatttccaaatctggagaaagatataaatctccaggtacaggaaggtgaaaagtctccaatcagattcaatccaaataagaatactatgaccaaactattaaaaatcaaagacaaaaaaaggatcctgaaatcagcagcaagaaaaataaagcaaataytatataagggagttccaatatgcctagcagtgaacttctcagaagaaaccttgtaggccagcatagaatgggatgatatattcaaaatgctgaaaagaaaaaacaccactgtcaaccaataatactataccagcaaaactatccttcagaaatgaaggaaatataaagactttctcagacaaacaaaatctgagggagtttaacaccatcagacctgtcatacaagaaatgttaacgggaattattcaagctgcaaaagaaagaactctaatgagtaacatgaaaacatttgaaagtatgaaattctctagtaaaagtgaggacatagtcaaattcagaataatatggtaatggtggcatgtaaatcactcatatgtttagtatggcgattgaaggactaaattatcaaatataataactatgataacttgttaagggatatgcaatattaaaatatgtaaatggtgacatcaaaaaattcaaaatgtgggagtgaagaatggggtaaaactgtaggtttctgtttgtttgtttgttttttggctatcaaagttaagttgctgtcagcttaaaacaacctgttataactatatgatgttttttgtaagcctaacagaatgaaactatgaaactactagaagaaaacatatgggaaaagctacacagtggcctcaaaagcacaggcaacaaaagtgaaaataaacaaatgggattacatcaaactaaaaagttgctgtatagcaaaggaaataaacagagtggagagaatgagagaaaatatttgcaaactatgtatctaataaggaagtaaggaactcacacaagtcaatagcaagagaacaaataacctgatttaaaaatgggcaaaacatcagagaaatgcaaatcaaaaccacaatgagataccacctcacaccagttagaatggcgatcattaaaaagtcaggaaacaacaggtgctggagaggatgtggagaaataggaacgcttttacactgttggtgggactgtaaactagttcaaccattgtggaagacagtgtggtgattcctcaaggatctagaactagaaataccatttgacccagtgatcccattactgggtatacacccaaaggattataaatcatgctactataaagacacatgcacacgtatgtttattgcagcactattcacaatagcaaagacgtggaaccaacccaaatgtccatcaatgagagactggattaagaaaatgtggcacatatacaccatggaatactatgcagccataaaaaaggatgagttcatgtcctttgtggcgacatggatggagctgtaaaccatcattctcagcaaagtatcacaaggacagaaaaccaaacactgcatgttctcactcataggtgggaattgaacaatgagaacacttggacacaggatggggaacatcacacaccggcgtctgtcatggggtggggggaggggggagggatagcattaggaggaatacctaatgtaaatgacgagttaatgggtgcagcacaccaacatagcacatgtaacaaacctgcacrttgtgcacatgtaccctagaacttaaagtataataacaaaaaagaaacaataacaaaaaaacaaaaaagaaaacaraaaaaagaaaaaaaatgggcaaaagacctgaatcagtgtttctcaaaaaaagacatacaaatggtcaacaggtatgtgaaaaaatactcaacatcattaccatcagggaaatgcaaagcaaaaccacaatgagatattgcctcattcctattaggatggctattaccaaaaagacaaaagataacaagtgttggtgaggatgtggaaaaaaggaaaccctggcacactgttggtgggaaggtaaattagtatactaactatggaaaataatacagaggttcctcaaaaaatttaaaaaagccttgccagcatctgttgtttcttgaccctttaataatcaccattctgactggtgtgggatggtatttcattgtggttttgatttgcatttctctaatgatcagtgatgttgagatttttttcatatgtttgttggccacgtaaatatctccttttgagaagtgtctgttcatgtcctttgaccacttttttatttttttcttgtaaatttgtttaagttccttgtaaattctggatattagacctttgtcagatgggtagattgcaaaagttttctcacattcttaggttgcctgttcgctctgatgatagtttcttttcctgtgcagaagctctttagtttaattagaccccacttgttaatttttgcctttgttgcaattgcttggagaaataggaacacttttacactgttggcgggaatgtaaattagttcaaccattgtgggagacggtgtggcaattcctcaaggagctagaaccagaaataccatttgacccaataatcccattactgggtatatactcaaaggaatacaaatcattctgttataaagatacgtgtacgtgtatgttcagtgcagcactattcacaatagcaaacacatagaatcaacccaaatgcccatcaatgatagaccgtataaagaaaatgtggtacatatacaccatggaatactatgcagccataaaaaggaatgagatcatgtcctttgcagggacatggatgaagctggaagtcatcatcttcagcaaactaacacaggaacagaaaatcaaacactgcatgttctcaatcacggtgggagctgaacaatgagaacacatggacacagggaagggaacaatacataacgggcctgttggggggtgggagggagagcatcaggataaatagataatacatgtggggcttaatacctagatgatgggttgataggtgcagcaaaccaccatggcacacatttacctatgtaacaaacctgcacgttctgcacatgtatctcagaacttaaaattaaattaaattaaaaaaattaaaaaagaactagcttatgatccagcaatcccactattgggtatatatccaaagaaaatgtaatcagtatgtcaaagagatatctgcatacccatgtttatcgcagcactattcacaatagccaagatatggaataaaactaagtgtccatcaatgagtgcatggatttaaaaagtggcatatataccacttgaaatattattccagtaccactttggaatattatttagccataaaaaaggaaatcatgttatttgtcacagcatggatgaacctggaggacattatgttaggtgaaataagccaggcacagaaagacaaatactgcatgatctcatgcgtgtgaaatccacaagttaatctcattaaagtagaatagaatggtggctacctagagggcagggtggttggttacagggggcaggtggagagatgttggttaaagaatagaaaattacagttaaataggaggaataagttctatcgtacagtatggtgactatagttaataacaatatgttgtattcttgaaaaatwgctaagagaktggatgttgcattctcactacgaatatgataactatgtgtgataatgcacttttsttaattatgtagattttaccattccacaatgtatatatccttcaaaacatcatactatacacaataaatacatataattttatctgtcattttaacaaaagaaagatataccagctctggcttcagatgaaggagctttggggtagaatgatttgaaacctctgctccctatcaaattctaatgctttctcaggtcatattgagttgagataattgaactgagggaacacttacttacgtggtaatttttggctaaaaaaacaggacactgaaaacatgccgacagtataaaagaatgaagttgaacccttacatctcatcatatataaaaattaactaaaaatgtatcaaagatataaatgtaagagctaaaatataaaactcttagaagaaacatagatgtaactccttatgactatagtttgggyagtagtttcttagatataacaccaaaagtacaagcaacaaaaggcgaaaatagataaattcaacaacatcaaaattaaaaactagtatgcttcaaaagacaccatcaggacagtgaaaagactactcacagatgggaaaaaattttgcaaatcatatatctgacaagatcttgtatctagaatatgtaaaatgctcttacaactcaacaataaaatgaaaaataagccaatttaaaactgggctaaggatttgcataggtattcctccaaataacatattcaaatgaacaataagcaaataaaaagaagctcaacatcattagtccctagagaaataaaaatctaaactataatgtgataccacttcacctcctctaggatagttacaataataataaggaaatcaactaaaatgagtgttggagaggatgtggataaattggagacctcatacgttgccagtaagaatgtaaaattgtgtagccattgtggaaaatagtgtggcagttcctcaattggttaaacatagaattaccatataatccagcaattccatccctagaaaaatgagaatgtatttacacaaaatatcttgtatatgaatgttcatagtggaattactcacaaaagccaaaagtagaaacaacacaaatgcatatcaaccaataaaaagataaacaaaatgtggtttatccatataatgaaatactcttcagccatgaaaagaaatgaaatgaaacatgaattgaccttaaaaacattatgctcagtgaaataatacagttacaaaggaccacattgtattatttgatttatataaaatgtctggaataatagacagaaaatgaattagtggttgccagtggtagggagtgatgttggggtgtcatggctaagggatgcagggtttgtttttggggtaatgaaaattttctaaacttgattgtgatggtggatacacaactctgtggatatactggatttactataagtgaattatatctcaacaaagttgtttaaaaacattttcacaggcaaaactgactgtgggaaacaaaaaaacccttcaacawataaataacaagaaaaaaagtaaggaaggagaggaaatatctattcaaagagatttaaaaaacataatgaccaattaagatactgactatatatttgatatcaggggaaaattgttgtaataattgcatgtggttatattgaataaaacagtttttatcttttataggtacatcctaaacatttacagatgaaaagataaaatataagggacttgcttcaaaataatctagatgaaacaaaatttgccattaattgaatagttgaagctgaatgataggtatatggggatcagtgtatcattctctctagtacaggtttagaattttccattttaattagcttgattgaatctttctacaatgtatacataaatcaaagcatcacattgtacctcataaatatacacaattatttgtcaattaaaattwaaaaaattgatcaaaaaagtgttttaaaaagatgcctcaaagctgtgaaatgtggaataaagttaatagctccttttattttcctgtttccttttatagtttagtgacttagatgaattgactcaactattctgtgtttcatttttgcattgcatcacattgtattaagagaagaaatttacgtttgtactagaatgtaactttcttgccagtagccatttctatctgttattccgtgttctattctcagaataggcatatagtaggtgtttaataaacatttgttgaatgaacaaaacaaaaaggaagaaatactctgctgtagtctattaagttcattatcctggactatgaaattactgtcaatgcacaatttaaattgtctacttcattaaaatttatttgctattatacactgttatcaggcctgctaaataacatatgaaactaatcagtgaaaatactacattatgaagtctcttgccagagggaaactgatcattttaaaagggattttgtagtgttgctatggccacaaatagatgtatagatgatagatgatagatagatagatagatagatagatagatagatagatagatagatgatagataaatagatgatagatgcaaatatagattatatagatacagataggtaaataatgtatttctgtaagaaagtggtaaaagtataaatatttaacttttcttcatttgtgtttttctgtaatttctagtttttcatctaaaacatacattatttgtataacaattttgttaaaagatttgtagatatgctcaggttacctggtgtatggtagttagttgaaaaggaaactcattgtaaataaatgccagatgaatccctggagagaagaggcgcattaattgaattgctaaagtagctgaggaactctcttaaacaggcaaatgccaaaaataaaccattttgctgcacattttcccacatttttatttgcactgaagattcaaaaaggaaaaaagcagcctcctatctaacaaggaatgttttttaaaaagccatataatgcttttcccaatattgtgtttaatagataagaaaaactgcaatgatttattacactctaaatctgagccaggtgctttacattcactatctcacttaattcacacgttaatcctgcaaggtatgtgtcattaaccttatctcccagatgcaaaaactaagacacagagaggttaagtaacttgcctaagcttacacagctattaattaaaccaaattttgtttcacttagagtgagagcttttgatcttcttcatgaaatgtctggtactagacaggttttgaaatgcagaaatcagcaaagctgtctcttcaagagcaagtggaaagaaaataaaccacctgcaagttcttctgatgcatattggactagcgtctggacccacgagtaagcaatgacaagttctaactaaaacatgaaaaattcagggcgagtcagttctactgaagacaaaaacagcatcagatagagcagtaactggtaacaggtgaatacaggggcaaaattgttcataatattttggagtatgagtttccacatctgtaaaatgagagagcttaactaaatcaaaacaagttcaataaaaagtgcataaagttcctttttctctaaaattctataattctaagaaatgatttaaataaggtatcttcacatattttgtgtaactgtatttcaatatgatatggcttattttcagaaaagtgcccattcctctgttgaaaaaaatgtggactttcattttggacactgtaattcaggaaaatgattctaagaagcaatgaagttcatggataaatagagtcatagaggacaatagccataaagaaaagaagatcctaggtaatctgaatatattatttacttttatatactcaatccctgaaatgggccattaatttgtgaaatttggcccagtatcctttaagttgctagaggtctgtgaggccacaaacatataggtaaggatgtgacagcaatcaatcagctgcacatcagaagtcagccccactgtgaggttcagtgatgggaatcaggatataggattctgtttggcctagctggggattccaaaacaattggttgatatttctcttagctcttgatttcatatacttggggaaagcaatcctaatatatgatgaaaaatgcaatatcatatgtatggagttctagcaaaggcagtggtttaattgagaccccttaatgaatgctggatatctgttataaatgtttctttatggtcccacttgggtctttgcttccaaatttacagacccatctgttggtctgcttgactcaagaagttactgataaaagtatcatcttcagataatttaacattttgagagactgctatcttttaaatatgaagaaacttggagggggaaccttccaggacactgtgatgatccacattattattttctcctcttctaattcttgatttgtagaaatttgtacaagtactgctttctgcacaaactgcagcattttcagcctgtagtgcaaagtcatgccctaggtatctccatttttatttttacttagcagacatggctccaatagataggatcctatttgggttccactacagaatgaaggtggggttggctgtgcaaacttgagggatacagccagaataagccgctgagacagtgaattatggagctcaaactctaattaagacaaatcacataagtgtaggatgtctggttaacactgattttacagcatggagttctcactttaactgcaggtagtggtttgttttcaatacccacaatccttcagggatgaaacatgccctagggccactagaacctattttccaaaagcagtgatattataatttcttgttagtcctctgaaagttactatactttgcatcacatatattttatagccccaacagtctgactttagagtgtgaaaagtgcagagtgagggtttttctgaatgcccatcatgctctgacaagcacaggtgttggtttgaaattgcttctacatgaagcctgttgaccttaatgcctgtacaggaggtggccctatactccagagatactgacttgatagtgaggaccacccacctgccctttgcgggtagcctttggcttctgtgagtttgtagtaaaagcagggcagggaacccatgtcggggtcttctgcactgctctgttggtgaagttcctttctcagatgcatagaygttgtgtaataagatacggtataaatgaagagacccttgaatacctttggctgctctggagccccagatatattgagtctcttgctcaggaagtcagtcatactagagaagttgggccaagcattgctggtaatacactgaatttcaaataaatctttgaccatactgaaatgaggggacctttgctgatatcaccctgactaccagagtggagaggacatcatttggtaacttggcctacagacccttgaagacacattttttcctgttggcatatgatgatagcccaactcattttatgagaaatagttgaaacaaaaaggaatgtttagggagaagaaaactcatggaagtgggagagtggtagaacaaaggaaaatccaggaaggatggagtagacaatgtgagtagaccaggattaaaacctatgtttgtctgactccagagcccagggttcttgcctcaccaacagtaagactggaaaaaatgtaataggtaatatgagaaaaaattaatatggtttgatgactagaatatacttcattgttgtatgcatttcttgacttaaatccaaaatggatttaagctatttatagtacaagacgtgcatagaatgtctgctaaaacaaaagttaaaaacaattcagaatcacataagcagaataaactgaagataatgatagtgacagagtttgatcacaaaacttagctgttcttgcatrttcttgcactcatactgactctgtgaacaataatagttggtaaatcgggtttccagcatagaagcggcagccattggcattactggctgcagtaaagttgattttctgttgtagaaatagcactggtatatatagtagcatctagtcctttgtggtagtaaaagaggtttcctcgtcacaccagttgtgcagtgaatttttggttggtggtcctagacacccagcccatgcctggttctccacgattcatgataattctgttagccaccaaatatctgttttttctaacttaatttttattgaagtatagtttatatatagttaaatgtacagatcttaactatacaagtcaacgagttttgacaaatgtatacactgtgtaaccaacaacacaatcaagatacagaacattatcatcactccgaagggttttgtcattactccttccagtaaatacacaactcctctgctccaggaaaccattattctactttctaccagcataatttaattttggaatttctagaattttatataaattgtcatacagtatgtattcttttgtgtctagcttctttagctgagtataatgtttttgaggttcatctacgtttgttgctttcgagtaattattttatatgggtgagtagtattccattttatggatgtatagttwattatcaatttgcatgttttgaattatttgcagtttggagctattacaaataaaactgctgtaaaaatttgtgcagaagactgtatgagtatatatttccatttctcttgggtaaatacttaggagtggtattactgagtcatagggaaagtgtgtttaactttataagaatctgctaaagtgtgtttaactaagaatcttataaagtgtgtttaactaagaatcttataaagtgtgtttaactttataagaatctgctaaagtgtgtttaactaagaatcttataaagtgtgtttaactaagaatcttataaagtgtgtttaactttataagaatctgctaaccagttttctaaagcaattgtgccattttattttgccatcagcaatgtatgagaactcaaaatgctccacatcatcatcaacacttggtagtatcattcttttttaaatgttatagcttgtgtgaagtgttgtgtctttgtgatttaacttttccttcagttcaagagtaaatgatgttgaacatcttttcatatgtttattggccattcgtacatcttcttttgtaagtatatgtttaaatctttttcccatttctaattgggtttgtttgtgtttttatgtttgattttaagagttctatatgtattatagataccttacttttgtaagatataggtattataaatattttgtatttagtccatggcttatattttcattttcataacaatgtctttggcatgcagaagtttttaatgttaatgaagtttatcactttaaacttttatggttaatgattttttttctattttgagaaacaattgcctaacacaagatcatgaagatattctcccatgttttcttccttatgcttaacaatttcagcatttacgtttaggtctatgattaattctaagttgagttttttttatggtatgaggtagagtttgaggttcattttcttcaactttcagtggtttaagagaatttccctgttcaaaggcattggtaatgatataaaaaaattaaagtaataagacagcattgtattggctgaaggatagacacttagatcaatggaaccaaatamaaaaaaacagaaacagaccctcacaaatttgcccaactgacttttgacaaatgtgcaaaagcaagttaaaaaaaaagtaaggatagcctttcaagcaatagtcctggagcaactgaacatctataggcaaaagtatgaacttcaacctaaatttcatactttaccaaaaaaagtcactgaaaatggataatggacttaaatgtaagccacaaaactataaaactttttttaaaaacatgataaaatctttggatataggtttcagtaaagggctctaagacttgacatctaaagcgcaatccataaaaaaacttggtagattggattcctcaaaattcaaaacttttactctgcagaatattgtcttaagaggatgaaaagacaagcaacagagtgggagaaaatacttgtaaaccacatatctaacaaagaattagtatgttaaatatataaagttctcaaaactcaaccataaaaaatgctgaacaatccaagtagaaaatgggcaaaagacatgaagaaacctttcaccaaagattatatacagatagaaaataagcacatgaaaatatgttcaatatcattcatcatcagagaaaggcaaattaaaatcacaattagatatcaccacagacctgtcagaatacctgacataaaaaatagctaagataaaaaatacagtacaaaatgctggaaaggttgcatggaagctggatctttcatacattgacagtgagaatataaaatggtacagccactctggaagacggtgttgtagtttcttaaagtattaaatatgcaaatagcatataacccaggaaacatacttttggacatttaggccagaaaaattaaaactggtattcccaaaaaaaacacatgtgtacaagaatgctcatagaagcttcactgataatagaaaaatactgaaaacagctcaaatgttcttcagtgggttattggttgaacaaactctgatacatacataccatgaaacaccactcaacaataaaaaagaatcaactattgacacacacaacttagatggatctaaagggagttaagctgagtagaaaaaaagccaatcccaaaaggttacatattgcctgactccattaatatagcattcttgaaatgacaaagttatagagatggagaacatattaatggttgccaggtgttgaggaggagaaagggaagtgagtgtggctataaaggggcagcatgagaaagcttgtggcaatggaaatgttctacattttaattgtggtcgtcattatacaaagttacacatagaatattttatacaactacacacacacacatatgcatgtgtaactggtaaaattcaaatatgctctgtggattttaccaatgtaaatttcctggattgatattgtaccagagttaggcaagattttaccatcagaggaaattgtgtaaagggtacacgaggtctccctgtattttttggaaacttcctgtgaattgacaattatttccaaatagaaggttaaaaccaaagaaatatatgaccataatatatgtcrgcctattactggattctgagctattttattgacttatttgttatttcttactctaataccacactgttttgataagtgtagttttatagttagtcttgaaaccaagaagttctataactcctcctctttttaaagttttgctggaaaccccaagacatatgtttacccgtcccaacatctgcacagattgtcttctctaatgccttgctccatagatttcagatgcttctgctaccctgagctctgatcttttcctccttcgttcaatgagactgcaagctcagcttggaatctagctcttgatgctgggatcagaaaatagtcaccaggcaaagagctaaggcagtcttggggcttgatttgtgagtttctcttttcctggggatcataatcatgggctgactattgctcaatatctttaaacagtttccttgcatattttatgcagttttatgatgtttctaacggcaagagtgctgatccagtgtcattcccaacataactttttttcctgcttaaatcagtcagcttcagcttctgttgcatgcaactaagaaccttgactgatacaagcccctattttatgccatgtcctatgatatgtgcttggcatttattatgtgatttaatcttaatttagagaaataattccaygtggaaactagagaaatgggcaagaagcatttctaacagtgaggacaaggttgaggagagggaggttgcagtgagaggagcattctagatggaggaagaatgtataaatgcacaagggaaccagcatgcaagaattaaagtatgaaatttttgtcatcttcaagggaattcttctgagacctttataaattatcctaatccaataaaaccactatacatagaatttcctccataaatacagtaaagtacaattgtttatatagtaggatattactggacggttttaactttcccacccctattaacatgggtactaataaaataactaagcatcctagtttgccctgaactgttgtggttttagcacattacagggaattcctcagccccaggaaaactgagaaaattatcctttggtatatgtgacatcgctcacctagctacagttgattggtcttaggtggccaccagtctcaaacttggccaataaatccctcatagatttatggagataggaccataaaggtctatggtaaccagggagtgcctctcagatctttcaagggaaaacctactatgaggagtggagtcagctaacagtctccagctggagcacttttgggattatttttgcatcatttgatccaaggccattcccttcccaggcatctccagccaatctctgagcacaagaggtgtactagggctgtttctgtctaacgcaggattcmtctaattagcagtctctgttggggtggttgagacttccatagagctgtactgtaatctcctctttatcttgccagccattacccacgatagatctgtagatttgcttttcagaggacctgatatggcttagtgtctctcttcagtggttgaatctgtaatatgaaaatctaggaaggtgtccgtaaccgtatctactgttacatggacttgggaaacaaaaagagcttgagaggagtggggaggaaagcaaggaagggaacgaggggatgagagagagagaagagagagagaagagagagagagagaggagagagagagagagagagagagagagagagagagagagagagagagggagagagaccccagataaatgtgcagggaaraataggggtaaaagaatgatagagtcaatgtcactggaatccttgtttttgacgattcttgaggcctaactataccttgcctttttaaaagttttgattgttctaatccttcttgagttctgtgaaacaccttattatcttcccataaatttctctcttttgcttgttagtttcaggtaggttttgataacttttaactaatgagtcctaattaatacttcttcactgcaaaattaattgtataggttactacgtttatgctgaatcacatttctgttgagagtcagaaatgttcatatccccagagtcagaaatgttcataaaccgaaacacaaattaatatacccttcagctttaccaaatttttgtccatgaataggtgaggaaaattttgtatggtctagatgatttctgaaaagttttagcatttatttgtttctctatagaatacctagcaggattcttgtcatagaccaaagcttcagccaaattcaacattgcactgtgtccagaatatttattttctggctaaaagtcactacttttataataaatcttccttctttaattttttaactctttcaaagatcactagtagttcttttaaagaccatctttgataaatcgaagttcamaatcacaattaacacatagttttaaccacctttcaagaactcaaggttatgaatatgattagagatcactaaagcttcactgagaggctgataaaacaaaggtgtagatgttagtcaaagatgatggctctcagacatcatttaatacagtagtccatgcaagagatggtgataatttggcctagagcaagagtctaaaaattattgcccacagggcaaatcctgcctcttgcctgtttttgtaaataaacttttattggaacatacctacacgcattcatttatgtattgtctgtgaattctttcactctatgaaagcagaatttaatacctggagacaaagactgtatgtgactcaaaaagcctaaaatatttaccagctgacccttcacagataaaaaaaaaaagccaaactctggtccggaatgttagcagtacagtgasggacaaatgcatgagcagattatattttggaagcagaacaagaacaagtttggtgtgttctaggaacagctggtgtggcgggaacataaaaagacccagatactattgtttttttctattttgttttctagcacatttgtacctattgcttttattcagctattcattcattccaaaaatattaagaagttccactctgtgccatacaccatgtgacctgctacacacacacacacagagagaggaaacagtaaaatatctgacttttattttattacaagtaaaatttatattttattaaaagtaaaatatccaggctccctagagtctggagccaaattacctaggtttgaatctcagctctgaaatttawctgccatgtgatcctggtgaaaattgcttaacctatctgtgcctcagttgccttatccttaaagtagaaataatatcatctaccttaagtgtttgatataaaacaaacacttagcccagtgtttagcatatagtgcacattttataaatgttggttactattattaaggaaacttgcttcttttactgactcaaacaaacaggtattgtctatcaacctgttgccttttctgagtactttgtgttgatttcagcttagctttaagtgagctcattcactctaattgctacagttatgatcttcctgttacaggacattggatcatgctgttctttctgcccaaaactttttttgttttcccatttgcctggccaactccaatttgttctttaaacataagggcataagggcatggactatatctgggctttgtttatcattttacacccagatcttagtacagtgcctggcatacagtaggcactcattaatgtttattgcatgaatgaataccagccagactaaatctagattctcattgtacttagtttttcctctttatgttacattcacactctggatatgtccttttgtttacacactggttctagaaattttttaacaaatatttattaaatatatagacattttagactctgtgcttggagaacaaatatgaaaaacacaagttttctgctctcaagaagctacttattcattagaggacaaagacatgcagaaagagaaattataatctagagtaagtggtactcttgaggcctgtacgagatccattgggcatactggacctagggaaaaaaaatatacaaacttatctgggaaagacagggaaggcttcacagaggaggtgctatctaaattgagtcaaaaataacgagtagccgttttccaaataaacaagtgccgggtaagagcattcatggcagaaggaattccagggcaaagatgtggaggctttttcttcttttgttgatcctgacttctacaaaccaattcctttattgcttttttgacattagattaacacttttaatctcgaataaatataatactgcacaatttcccattttcagtatatatgcatttgattttttttgttgttcttactctcattttttaaatctgccttggatttccattgcatatactatttcagtatactttttggtccttctttgtaatatgtatcgttcttaaatttttacctgcataaggtgttcattcctaatgggtattcccttctagtgctcactgtatgtagcactgtatctggaccctgggttcaagatgctcagctgaatcgatgggagtaatgagcggtatatgacttccataaactcaagaaaatggtggaaaggtagtagaattttacttctagtaaacctggataaactaccataaatagaagcgtagtgggaggactcgggaggagcactgaaatggcaggcaggggacccaggttttatagctttatgggcctgttttttctcatccctgcacctatagcttcaagtatgttcactaaaggcgattgaatagagtgccccggcccagtccttccgaatgggagactgacgccctagcaccgggcgaagtcccrggcgccagaggcacccaccctgcacggccggaaggagtggggcggggcctacaggctctccgctgggcccgagcgggctgggggaggggagcgtggggccgacagttttgggggtgaaaaggcaaaaggcgggtgaaaggctgcctcccgagactctccttgcttggaattctgcccactctgcggagttagcagtcacgacctccagcacaggtgggttccgtcccgtgggtcagggaaggggtgtccccatgggtgctacgggtgggtttacccaggcgctcgctttcaggcctgtcgcagtgggcggcggaggctctcacccgggctgctgggcccaagggcggtggtactcaccttaaccctggcggagaggaaggccactcctgccttgccgcagggttgtcgtcacgatctgtgccagttgcgcgacagagtctgcccggagatcagcgtgaggccggatgggcctagcgctcaggaagagctggaagagctggagcaagctcgcgttgggactgacgcccagtgtacattgtttcaatctcggtcggactttacagccctggatctgtcactgacttggtgtttagctttcagcgagtccctaccctcttcctgcctcactttgttcggcagtagagtggaaggtggaactcagctgtctgcaagatcttgcagcactttctttcgttctcatatccactaatgttctctgcccagattttaccctttgtctgccccctctggagcaaggctctgggtaagtaagttaggctaggaagttttctttctcttccgaaaacaatggaaaagcctttaaatactcctgactgccctggaaacgacattcaaaccattaattgaatgtcaactctgaagaatgggtttgtgaatgccatactattaaacgttttaaccagatgattgcctaaaatgatgtgtgttgagtggacatagtacactgcctagcaaaagtctcatgataaatgagttgcgtgctttaactcagtcgctgaaagaaaaacttgagctctcatatttaagaaacactttcataatccactcccatacagtagtagtcttttagagttgcttgtagcttggtttgccctttcaggacacactgtagtaaaaattacatacagtttattttacattaactataaagacaaagaaggactataaacattatggatcaacattttggtgtcaacttctggtttctcctcattaaggaactggtggtaatgataatggtgaacatatattttgcaaaatactataattttcacaacaaccagaagacgttaagtaaggttatttataataaggcttaaaaaacttatactttatctcataaccagtgtgatgaagggaatgtttactggggtggttgagtctgggggcttgtttagtgtgccccacctagttctttatttcttggaagcttggactggaacagatcacttccttgttttggcctctgtttcaggaaccaccatttgttctgtatttctgcttgtcaaccctgggaacaacagtaaaaccagccaagtggatcactgggtgtttacaatgtttctgacagctgtatctgatgcctccaggggctgggagggggaccccaggattaacaaacctctttggtgggaagagtctcttcctgcaaactgaacacggatccatcagttgggcaccactgtgatcccctttctataataccaagcatcccctgggctcatatgggctgtacatgcacctgccattgccctgtgtaaagatttacaggataagaggctcttgaaaaaacccagcctgctccatacctgtaggttctagggaaggagtggctgatatgtaggtgagtgttcttctggatgaggaaaatacctcatgatttcccaaatggtttgaaaggtgagaaaaaaattatgctggatatctgctgagccaacctgaagggtgagttttgcattggctatttggcaggacctggtgtctgccttgtttagctatattttcactctattcatcatactctgttcattcactccaaaggcaatcaatgaatgtcaactctgtgccaggatgctgatccattcactgagattggcagcacaggacagccagttcgggaggacaacaggaattcaactttaagcatactcagtctgaggcctcctcacctttccccactccctatatctaactgctacaaaatcttgtcacttctacatcctgaatattttaaaaaatccatccacttctctttgtcccatgactactccaaatttcaagccagcaatattcttttttaattgatttaaaaatttttattttaaaagaccaaatggttgcatgaccctcgactctcatgggaaaaccacaacccaccaccaccacagcaacaacaacaaacagcctaatgacctctgtatgatccctaataaattgtcaaagtaaggagatgaaagttctctttttttcttgatgctcacagtgtttaaatattgtatttaggataatttacatgccataaaatttgcatatttaaagtgattttataaatttattgggtggtgcaaccatcactacaatctaattttaaaacatttgcatcacgtcagtgacatcttccttgcccatctgcagtcagtcttcattactactcccagcatcagacaaccactaatctactttctgtgcctatggatttgcctatcctgaaaatttcatctaaataatgtctccaaagtttattaatgttgtggcatatataaatacttcattcctttttatagctgagtaatattccattgcatcagtatactacattttgtctatctagtcatcagttgatgaacacttggattgtttctatcttttggctattatgaataaagctgctatgaacgtttgtgtgcaagtttttgggtggacattcgttttcaattctcttggttaaacacctatgagtggaattacttggtcatattataactgtatgtttaattttctgccaaactgttttcccaaggggctgtactattttacagttactagatttatatgaaccaccagcaatgtatttcttcacatcatcaccatatttgttatttccccgttttgttttgtttttttcaaatgtgtagctattcttgagggtgtggagaagtatctcattgtgatttagatttgcatttccttaatggctaattgagcatctttttatttgcttgttagatatttgtatatgttctttggagaaatgtctcctcacatattttgcccatttctgattaggttgtttgcttccttactattgagatgtaagagttgcttatatacaagtcctttatcagatatgtagtttgaaaatattttctccaagtctgtggtttgtcttttcattttcttactactgtatgttgaagggcaaaggtttttatttattttacttttattttagtttcagaggtataggggcaggttggttctatagataaattgtgtgtcacaggggtgtggcgtacatattatttcatcacacaggcaataagcatagtacccaataggtagttttttgatcctcaccctcctcccaatctccatcctcaagtaggcccccgtgtctattgtccccttctttgtgtccatgtgtactcaatattagctcccatttataaatgagaacatgtggtgtttggttttctgttcctgtgttactttgcttagaataatggcctccaactccatccatgttgttgccaaggacatgatctcattctttttgtggctgcatagtattccatggtgtatatgtaccaaattttctttattccatataccactgatgggcatttaggttgactccatgtcattgctgttgtgaatagtgttgtaaggaacatatgcatgcatgtgtctttatggcagaacgatttatatttctttgggtatatacccaataatggatggctgggtcaaatggtagttctgtcttaagttctttgaggaattgtcaaactgcttcccacagtggctgaactaactgacattcccaccaacagtgtataagtgttcccttttctttgcaccatcgccaacatctgttatttttgactttttagtaatagccatcctgactggtgtaagatggtatttcattgtggttttcattgattagtgatgttgagcattttttcatatgcttgttgaccacatgtatgtcttcttttgaaaagtgtctgttcatatcctttgcccactttttaatgaggttgtttggtttttgcttgttaatttaagtgccttatagattctagatattagaactttgtcagatgcctagtttgcaaatattttctcccattctgtgtgttgtctatttactctattgataggttattttgctgtacagaagctcttcagtttaactaggtgctatttatcagtttttattattattgccattgcttttgatgtctttgtcatgaaatatttgacagggcccatgtctagaatggtattgcctaggtcttcttcaagggtttttatggttttagttgttacatttaagtctaatccattttgggttgatttttgtatatggtgtaaagaaggcgtctggtttctatcttctgcacacagcaaccagcaatcctagcaccatttattgaatagggagtatctatcccattacttgttttcatcagcgtcaaagatcagatggctgtaggcacacaaccttatttctgggctctccattttgttccattggtctatatgtctgtttttgtaccagtaccatgctcttttggttactgtagacttctatagtttgatatcaagtaatgtgatgcttccaagtttgtatttttgcttaagatttctttggctatttgggctcctttttggttccataagaattttagaataattttttttaattatgtgaagaatgccattggtagtttgataagaatagcattgaatctataaaatgctttgagcagtatggctattttaacaatattgattcttcctatccgtgagcatggaatgatttttcatttgtttgtatcatctccgatttctttcagcagtgtcttgtaattctcattgcagatatctttcatctcccaggttagctgtattctcaggtattttattttttttatgtctattgtgaatgggattgcattttttatttggttctcagcttggacattattgatgtatagaaatgctactgatttttgtacattgatttggtagcctgaaactttgctgaagttgttgatatgatctaggagatttttgtcagagacaaaggggttttctatgtataaaataatattgtctgcaaacatagatagtttgacttcctttcttcctatttggatgccttttttttctttcttttgcctgattgctctggccaagacttccagtagtatgttgagagtgggcatccttgtcttgttccagttctcaaggagaatgcttccagttttgctcattcagtatatgttggctgtgggtttgtcatagatagctcttattattttgaggtatgttccttcagtgcctagttttttgagggtttttaatatgaatagatgctgmaatttatcaaaaggcttttctgcatctattgaaatgaacatgtgatttttgtttttagttttgtttatgtgattaataacatttattgatttgcatacattgaaccaaccttgcatcccagggataaagcctgcttgatcttggtgaattagctttttgacatgctactttcttcacggatattggcctgaagttttccttttttgttgtgtccttgccaggttttggtatcagcatgatactggcctcaaagaaggagttagggaggagtccctcctcaattctttggaatagtttcaataggaatggtaccagctcttctttatatgtctggtagaattcagctatgaatccttctggacctgtgtttttttctggttggtaggcttttcattactgattcaattttggaactcgttattggtctgctcagggtttgtatttcttcttggttcagtcttaggaggttatatgtctccaggaatttatcagtttattctaggttttctagtttgtgtgcagaaagatgttcataatagtctctgatggggttttttttttttttttttgtatttctgtggggttggtgatgatgtcccctttatcatttctgtttttggttacttgtgtcttctctttttttctttgttagtctagctagcagtccatctgtcttatttattctttcaaggaaccagcctcattgatttcattcattttttttatcattgaatgctataatctttcctcttgatgctgttttagctatgtctttgagattctgacatgttgtatctttgttgtcattagtttccaagaatttattgatgtctgacttaatttcactgtttactcaaaagtcattcaggagcaggttgtttaatttccatgtaattttatagttttgaccaatcttcttggtatagatttctatttttattgtgctgtggtctgagaatgtggctggtatgatttttgtttttgttggttttaaaaatttttaatttgctgagaattgtcttatggctgactgtgtggtcagtagagtatgtgttatctgcagatgagaagaatgtatagtctgttgtttttgggtggattgttgtgtagatgtctgttagctccacttgatcaaatgctgagttcaggtcccaaatatctttgttagttttctgcctcgaggatctgtctaatactgtcagtggggtattgaaatctcccactattattgtatagttatctaagtttcttcataggtctctgaaaactggttttatgaatccgggtgctcctgtgttgggtgcatatatatttaggatagttaagtcttcttgttgactctttaccatttgtaatgtccttctttgccttttttcatcattgttggtttaatgtctattttgtctgaaattaaaatagtaatccctgcttttttttgttctttgtttgctttgtaggtttttctccatccatttactttgagtctatgggtgtcattgtatgtgatgtatgtgagatgggactcttgaagacagcataccaccgggtcttgcttctttatccaatttgccgttggataccttttaattttggcatttagcccatttacacttaagattaatattgatatgtgcagatttgatcctggcatcatgttgttagctagttattatgtacacttgatcacgtggttgctttatagtgtcagtggcctatgtctttaagtgtgtttttgtggtggccagtaatagtcttttgtttccatatttagcattcccttaaggacctcttgtaaggcaggcctgatggtaatgaattcccttagcatttgcttgtctaaaaaaaagatcttatttctcctttgcttatgaagcttagtttggctggatatgaaattcttggttggagtttcttttctttaagaatgctgaatctaggcccccaatctcttttgacttgcaagatttctgctgaaaggtcgctgttagcttgatggagcatctgatgactatgtgtcttggggatggtccttttgtatagttcttgcagaggttctctgaatttcctgaatttgaatgttgtcctttctagtgatgtttgggaaattttcatggacagtattatgtttttcagctctatcatattagtttggttctttcttaaaatggccatttcatctttcagctcctgtattgttttattataatccttaaattccttggattcagtttcmactttctcatggatctcaaatgatcttaattcctatccacattctgaattctatatctgccattttagccatttcagcctggttaagaatccttgctggggaactagtgttgtttggaggaaaaaagacactctggctttgtgggttgccagagttcttgtgctggttctttctcctgtgtgtgggctaatgtttctttaactgtggtgtgatttgagtatagtcagttgacctcatttctggacattgtcagagtgctggagctttgtgcggggtctttatttgtagctgaattcttgttcttcgtttcacagagggatatattaggtaagtatttttggtgtcaaaatttgggctgtgatccagtagatggtgcttaagtgtaatggccattaggtaggctcttgctcagccacatgactcctctatttccttgtgtttgcggccatgctccctcttggtgctctgagggtgtgggctcctctcccacttgagtgctggctgcagagcttggcttgacactcttgggcttcacatgcagccttcagatgagctcaggctttgtgttccctccccagcttgggagcagcaggggcagggaccttggcagtggcaattgcagagggcctttcacttgtcttttgggtctccactccagagaaatgcagaactactatcatttggagcattcatcctggggtggagtggctgcattgtgggcccgagccagggagccctgcctggtgatgaatggggagggggagaagggagctcacagggaagacagactagcctcttcttaggttggctgtggcatgatggaggtatgagtacagcactcagggtctttgttccttccccaatccaagggcagcaaaggcagtaccactgcagtggcagtctcagagggcatttcatttgcctctgggagctccaccccagagcaacacagagccactgacaatgggtatgttcagccacgaggtagggcagctgttctgtgggcccaagccaggggccctgcttggtgaagaccagggggttggaggctcacagagatgagagacttggctctattctgtatggcaactgtggcatgttggaggtgcaagtaaatccctcaggctctttattccttccccagtcttagggcagcaaggacagagctgctgcaatggcagtggcagaggggctctcggttctttatttttgataaagtccaagttattttttttcttttgtcaattgtgttttttgatgttgtatctaataattctttgcccaatccaatatcatgaaggttttcctatgtttctaaaagttttatacttttacgtctttcgtttatgactctgattcattctgtgttattttgtgtatggtgtaaggtgaaggtcttcattaatctttttgcatatggatatccaactgtactatcatcatttgttgaaaaactaaccttttcctgttgaattgacttggaaccttttttgaaaaccaattgaccataaatataagggtttatatccgacctctcaattgtgttccattagtttatatttctattcttatgccagtccctactgtcttgactattgtggcattgtaatatgtatttaaattgagaaaggtgaatcctaaaattttgttcttctttttcaacattgttttgggtattctgggttctttccatttccatataaatattaggatcatcttgtcactctttctttctttctttctttctttctttctttcwttcattctttcttttcttttcttctttcttttctttctttctttcgacagggtcttgctctgttgctcaggctggagtgcagtgacacagttgcagctcattgcatcctcaacctcccaggctcaaacgatcctcccacctcagtctcctgagtgcctgggactacagatgtgcatcactatgcctggctattttaacaatatttttgtagagatgtggtctccctattttgcccaggctggtctcaaactcttgggcttaagctatcctcctgccttggcctcccaaagtactgggattataggcatgaaccatcatgcccagcctctgctttgattttggtagcgattgcactgaatctatacatcagtttggggagaactgccaactaacagtattggatttttcaatccatgaacttgaaatacctctccatttattcagatcttctttaattttcctcaacaatgttttgtagttttcagtgtaaaaatcttttacttttttgttacatttattcccaagtatttaatttttggtactattgtgaattattttttataatatcactttatgattttttgcaagtgtatagaaatacaaattgactttgtgcatgttgatttggtatcctgtgactttgttgagtagaattattagttttaatattgtgtgtgtgtgtgtccatgtgtatgtgtgcatgtgagtgtgtgggtatattccttagggttttctcattcaggattatgtcaaggacagtttgacttattttttttccccagcctggataccttttacttgttttccttgcctaattcccctggctagcatctccagtataatgttgaataggaatgacaggagtgaacatctttgttttttttctggtcttaggggaaatattcaatccttcatcactaaatgtgatgttagctgtgcatttttcgtagatgttctttatcaggttgaggaagttttactaattggttaagtttttatgtttgatcatgaatgactgttagattttgtcagatggcttatctgcatctattgaaatgatcatgtggtttttgtcctttattctacacaatacattattaactaatgtaacatagggtattaccttaatttgggggtgttaaacgaaccttaccttcctggaataaatctctctttgtcatgatatataatcctttttgaaatactggtggatttgatttgctaacatcttgttaaggaattttgcatttgtattcataagggaagttgaattgtaggcttcttttcttataatgtatttgttttgtttgatgtcagagaccagcctcatagaattagttggggagagttttgttgtcagatgtgtatatgtttatagttacatatcttcctgatgaatagaacctttcatcattataaaatgtccttctttttctataacatttttttcttaaagtccattttgtctgatactagatatcagtttaaccactccagctcttttatggttgctcttttttttaatacaattttttcattcttttattcttttaacctgtttatgtcttcacatttaaagtgtgtctttccattattgtagatggcatatccttggagtgtgtttttcatccagtctcacaatgtttgttttgattggactgtttaacccatttatacttatagatgtacatctggctttattcatttatttcattaatgtttcttgacttctttgttcctccgtttctcctttattaccttcttttatgttatatagctaatttcttgcataccatttaaatccttttttgatgtttttactgtaatttctagagcttttttattgaatgctctggggattgcaatatgtatgtcaacttgaaataacctactttagattaataataatttaatttcagcaacacagggaagttttctccacccatcctttgtgctattaatgcagtatattttacatcttaatatgttataagcccaacaacacagttttaaaaatactgttttatgtagttttcctttaaaagaaagtaagaaaagtatgtattttctcttttatgtttacttacataattacctttactaatcctctttatttcttcctatggattcaagttaccatctggtgtcatttccttttagctcaaggactttagtattttttgtagggtaggtctgttagcaatgaattctctgtctttgtgtattgtggaatttatttatttcacattgatttttgaaggataattttgctggatatagaattcttacctgaaaattttgggtatttttctttcagcattttgctattccactgccttctggcctcccccacagggtgtggcctctgatgcttttactcagtgtttttggttgttgttgttattatgctagcttccagggggtcactgctgggccatattttagtggtcatccagtgattgttcatatgttatgcttaaacaccttctgccagtgagggttccacaatttgctgaaagtatccatgtgtgggctggggcgtacattccagattcacgcagtttagaaatctacctttgctattacttgctactgtataacaccacacatttaggcaaagactagtagataagtgaggcactgttcagtttctcccaagcatgtgcacagacttggagacccctagggatatgtaggaccttatttaaagcccagtatagctgtctcgtgcagtagattactctgttaaattttaggctggtctcatttgcttcaactagtattgcaacttttgtcagctgtgatgttggtcgttcccagttgattggttcttctttgtggaggagtcaagtgtcwtgtgcctctagtcagccatcttgaaagactctaccaattccctttttgtaacaaatattttgtaccaatttctttattaaccagaagtgaaattcatagatagcataacctacctatacacatatttaaaatatgagcacaatgtcctaactagaatttaaaggaaaaattaaatgcgagtgatttataataatgtatttaaatatgtaaatgctgaaacatgactacctgaagtagccaaatatttacacctatacattgatcgccatgaatgtgacggctacaaatataataccacaaagtgtaattatcattggtgacatgattttctaaaaaaattattttggataaatttctgaacaaaagaaaatatactgttctctcaatttacttggtagatttactcctagaaaattcagtatatagtaaattcatgcaaaaataccatgtttatatgtaacaaaaggaggtaggttctggcctctggtaattataaacaggtttttcatttgtaggcatgtcaaggttaatattaaaaagtttaggcaggattctccattgcctgggactgtcctgaacatttcaggatgcctaatatctctgatgccactaaatgtcaataattcccctccaatcattgtgataaccaacctgccccatacacatttccaacacactccctagacatggcaagatgccggttgatggtggcaagatgcctgttgaaaaccactactttaggataaagtgtatgcatatcctcaactctactagataaaaaacgtcaaactcattttcaacatggttgtatcaatttttgtctcactatcaataaataaatggaaatgcttttatatcttactgttaagtatgtttgttatgttttagtaccccttaacaggctaaggaagttccattctatgcctaatttactgagagacttttaaaatattgtgaatggatatattatctatttttttctgaacatgttgaagtgagtgtattttgcttctatcacctattaatttgttgaattctataatatactttctaaaatttaagcaaccttgaacatgattcatgtctttactttttttcttggatttgttctgctaatatattttgtttgtgttcttgacaagcatgtttgtgagtgagattggtctgtaagtgtgttgtcttggtttgattttgatataaagattatacttgccttaaacatgagtatgggagtattttctctttatttgttctcaggaagagtttgtataatatggaagtacagttgacacttgaacaatgtgggggttagggcttctgactcttgcacagtcgaaaatccatgtgtaattttttattcccccaaacttaactactaatagcctactattgaccagaagcttcactgataacataaacagtcaattaacacatactttttatgttatacatattatatactgtattcttatgtgaagatgagtaggctgagaaggaggaggactaggaggggttgacctcactgtctcaggagtggcagaggtggaaggggtggaggaggtggaacgggaggcaggagaggcaggaacactcgttgtaactacagaagaacatcataatttctgtctgtattttttgctttatcatttctctaaaaatgttcctatatggtaccaattattccaccatttgctttagtttcagtgcccatatcatagaaaagtccatattgtaaaagaagtaaaaaagcagtcttgaataatcagaacccttcttctgtattgtctagtgtcaatttctttattattattattattatactttaagttttagggtacatgtgcacagcgtgcaggtttgttacatatgtatacatgtgccatgttggtgtgctgcacccattaacttgtcatttagtgttaggtatatctcctaatgctatccctcccccctccccccaccccacaacagaccccggtgtgtgatgttccccttcctacgtccatgtgttctcattgttcaattcctacctatgagtgagaacatgcggtgtttggttttttgtccttgcgatagtttgctgagaatgatagtttccagcttcatccatgtccctacaaaggacatgaactcatcattttttatggctgcatagtattccatggtgtatatgtgccacattttcttaatccagtctgtcattgttggacatttgggttggttccaactctttgctattgtgaatagtgccgcaataaacatacgtgtgcatgtgtctttatagctggcactgcttcatctacatcttctttctcataatctggcactggttcggaagcactcatctccatcaagtcgtcattttaaaattttaaaattcctgtggcatggtatctattagctcttggacttttccaatattcctatcttgaaacccttcacccttccacctgcttttgccatatgtgcaatctacttcatgattaacttaattggctctgtcataagtctatgaagtcatgtacaacatctggacacagttttctccaacagaaatttattgtttggggctttatggctttcatgccttgttctataacaatgatggcatctttttttttttttgaaaaggattttattttgaagaatgtacaggttgagtattccttatctgaaatgcttgggactagaagcatttcagattgttttttttggaatatttgcattacatgcttaccagttgagcatctttaatccccaaatccaaattccaaaattctccagtgagtatttcctttgagctcatgtcagtgctcaaaatgtttcagattttggatttttgaatttggaatactcaacttgtattagcttaggtaaaaaaatgcttaagaaacactgagcctgtcattgttggacatttgggctggttccacgtccttgctattgtgaatagtgccacaataaacatacgtgtgcatgtgtctttatagcagcatgatttataatcctttgggtatgtacccagtaatgggatggctgagtcaaatggcatttctagttctagatccctgaggaatcgccacactgacttccacaatggttgaactagtttacaatcccaccaacagtgtaaaagcgttcctatttctccacatcctctccagcacctgttgtttcctgactttttaatgatcgccattctaactagtgtgagatggtatctcattgtggttttgatttgcatttctctgatggccagtgatgatgagcattttttcatgtgtactatgcagccataaaaaatgatgagttcatgtcctttgtagggacatggatgaagctggaaaccatcattctcagcaaactatcgcaaggacaaaaaaccaaacactgcatgttctcaytcataggtgggaattgaacaatgagaacacatggacacaggaaggggaacatcacacactggggactgttgtggggtggggggaggggggagggatagcattaggagatatacctaacgctaaatgacgagttaatgggtgcagcacgccaacatggcacatgtatacatatgtaacaaacctgcacattatgcacatgtaccctaaaacttaaagtataataataatagaatttaaaaaaaaagaaacactgagcctatttcaatgagttcgtatacttagaagaaatgtattcctgagtatagtcactgtcaggaattatggaaactacagaaaacataagaggcgccaaaagattggggaactgacaaacatatattttgaagagtaaattctgagaagttggacaacaacccttgaaagtattagataatgttagcatttaggggacagtgtattgggcaactgactgaggttcctaagaataagtcatgtcaaaatagcctcatttctttcttttgatacacatgggggaattctttaatgttgtaatccttccagactttcatgatgttctctttattggggttctctttcatagcattgacaattstttctatagagtactgggtgtaatgagccttaaaggcccttatgaccctctgatctagggactgaattagagacattgtatttggaggcaagtagaccccttaaacgcctttggtgttgaactcatgggggttctgggtgtccagggacattgtccaatatcaaaagaactttaaaagtcagtatcttactgataaggtactttctgactgcaaggacaaagcatcaatggcaccaatccagaaaaaggtttcttgttgtccaggctttgttgtacaatcaaaatactgacaactggtgtttatcttttcccttcaaagctcggagattagcagttttatagataaggaaaatcctgatcataaacctgactgcatttgcacaaagcggtagagttagcctatccattcctgccttaaatcttgatattcacttctcttccttactaataaatgtccttcatggtatctttctttcagtatagggcacatttattwacattaaaaccttgttcatatagatagcctttctcttgggtgattttcttaatggtatctcagaaatcatctgctgcctcttagtcagtagaagctgcttctcttaacatttttaatgccaaacctctgtctgaaattgtcaaaccatcctttgctggcattaaattttccagctttagatccttcaccttttcgtttgccttatcttgtcatataatcacttcagttttcctcaaatcatattagaatctataggtatgcctttctcatagaaatcctgtacccatataaaaactacattttcaaaatgagataaaaaggtatttcacaaaaggtacaaggtttttgtgcctgctggcatagctgcagccacagcttcatgaattttctttatttacaatggtccttaactgggtttatttatcttgaaatggtggacaaccacagttgcagacctcaatctacatacagtacatatcaagtaactaaacatttccttgtaatgtcatgacttttctctgcttcttggaagcacttccaacatcacaagtggcactttgtatggatcccatgatgtttaaggtttatggcattgcactaaatacaatgaaaaatatgtgagaatcatgagagatcacttcttactatgatatgcaatttactgcagacatgaactgctcttgtggagatgattagcatcacacagctttttaggtggatactcataatacctaagcccacccacaatggcaacaagaggtgtctatgaaattattatagtagtataactacagtaaattttatgcagttatgatttaatactgcatctttatatttgtttacatttatcttgaccgtgaatggcatcatgtacagtctgtgtttgtaaattttgacaaattttaactttttataacatatttgtatatattttgtggtagtaaatgataaaatggactagcatctaaatatattttatgcattcgtgacatacccttttcttaaatttttatatttctaggccacatggtttgtaagtttttgtagattgttgcaaatttcaaaaaatttttcawatatgttgaaaaaattctgtgtataagtggacccatgcagttcaaaccatgttgctcaagagtcagctgtactatagatttttcactttgttgttatcrtaaggcttacataaaacatcttataataggtgaatttaagctgataagaacttaacttttatcacatatagctctacacttttattcccctgaacacacacattttggttttggtgtcaaaatttacagcattttgtaatttatatcccttgataatttattttaattatagttatttttcatagttttgacttttagccattgtacttgaggtaaaattgctttacacaccatcattatactcctattctatatgtaactgtattacttataccattaagttttgcattttcatatgttttatgttattaattagtggccttctgttttagcttaaataactccctttagtaattcctgcagggcaggcctagtggtgatgaactctcttagcttttgtttgtctgagaaagcttttccttctccctcatttttttcttttttttaaaaattgcttcctcatttttgaaggacagatttgccagttaaagtaatcttggttgctgggtttccccctccccactttggcactttgaatttatcatcccattttctcctgacctgcagagtttctgctaaaacatctgatatgctgatagccatattgatattcccttgtatgtgatgtgtttcttatatcttgatgctttcagaactttttatttgtcttcgaattttgacagtttgattattgtgtcttggtgagctcctctttgggtttaatttgattgcaggtctgtatgcttcctttgccagacttttggcatcttcccccagatttggaaaggttttagccattatttccttaaatagcctttctggctcttttcctctctgttcttcttcatgtattattattatgcaaatgttaagtctcttgatggtgttccataattctcataggctttctgcattcttttttctttttgctctctgactgcattatttcaaatgttctgtctttgagctcactgattgttttttttttcttggatttatagagcctgctgctgatatattctattgaaattttcagttcattcattgagttcttcatctctaagatttttatttttaaaaaattgtttctatttcttcgtcagccttcttattttgttcatgtattgttttccaaatttcatttaattttttatccatatattattgtagttcactgaactttttaaagaggattattctgaattctttgtcagtcattatatagatctccatttctgtaggacccattgttggagttttatkagtttcttttggagatgtaatgattccttgattcttcttaattcttgtttctttatgttggtgtctttacatttgaggaggcaaccacctcttccaacctttacaggagttctttggcagggatggaccttcactattgtctagcctgtgatactggacggggccatctggtaacaagcctgggaagtcagagcttgctgttgtattttctagcttggtgggctgctgcctttgctctgaggtcatatgaggctgctggctgggcttcaatatcttatggcatcactggctgagctctgaaatcaggcagagttgttggctgggctttacaatcacctctgatcaggctggawcacagggtgtattccttggctgggcattaccaccatttgatttctgtggttgggccaggggtgcaggctggtctccaagattaggcagagttgctgcttgggatggttgggagtatcttctatgctcagtagaaatgcatagttgaggtttgcctccctgtctgggtggggttttcagatggggtttgtggctgagccaagctgctgtttgttctcccagatgggggcaggcctagcccctgtgctttgccaaaatgtgctgtgatgggcaactctctccctggaaggggccttggggagtctgaggctgggcatggaggctggccatcctagagacttaagccagattgaacttcccactgtgcttctgggagcaatcagctctactttgtgggtgggctatgccattggctggtacatctgacagggcaccactgctagcaggagcccagagctatcaccaagattcacacactggtggttatgagctctgcctcctttctttgtttctacttgacccaaggcagtctagctgtgtcattattctttctgttccccatgaggtgagactagagtgggcttcctggggagcatcttggaatgctagaaatctagttgtctgcctctggttctcttttcccactgtagaaactgtaagcccaggagaactgtctctgtatggcactgtgccaacttaggggagtaggagatgccttgaagtcaaagtgggatcattcctcttatccttctaatgggtttttatttagttctgtggtccacatgggtgtctcaggcttttcccaagttttggggttttcacaaagatgttttggtctgttgatagttgctagttgcactttctatggagagaagtaaagcctggaatctcctattttgacatcttgctaataacagtacattgttatcaaatatagtcaccatgtgtcttgaactcctttctcctgtcaaattgaaattgtttatcatttgaccaacatctccccagtcccctcccctgcacccagcccctcagaagcaccagtttattctctgcttctatgagttcaagttatttagtttacacatataagtcagataaggtggtatttgtcattttgtgcctggcttagttcccttaacataacatcctccaggttcatccatgttgttgcaaatgacaagattttcctctttcttaaggctgaatagtatcccattgtgtatacataccacattttctttacactttcacctattgatggatacttaggttgatttcatatcttgattatagtaaatagtgttgcagtgagcatgggggtgcagatgtctcttcaacagactgattttatatgttttggctataccagtaagtgagattgctggatcaaatggtaattccatttttaatttttttaggaaccattacaatgttttccataatggctatcctaattgacattcccaccaaaagtgtacaagggttcccttttctccacatccttaccacacttgttatctttagtctttttgataatagccattctaataggtgtgaagtgttccataaattttggtatattagttttattttcattcagttcaaaaaaaatttccccttggtttcttctttagctcatggattatttatatgtttttcttaatttttaaatatttgtggatttcccaaatttctttctactattgattctaatttaattccattgtgattagagaacatgctttatgatttcagtcttttaaatttatggggaattattttatgaccttgcatattgtcttttctgtataaagttacatgtgtgcttaaaagaatgtgcgttttggagtgaagtgttctattgatgtcaggtagtccataagtatatagtgttgtctaagtcttttatttcttcactgattttctttttgttatatccattattaagagtgggattttgaggttttcatctattattgttgcattatttctttctttctttaattctatcagtttctttcttcttcatgtaccatggggctctatttgttagatgcatgtatcattttacttttcacatttccctgaggaattgaattactgaattataaaatttttctcttttaaaaagtctatttagtataataacagtgtagtcactctagctctctttaaggcttacctggtatatctttccccatcctttccctttagcttgtttctttgactgtaaagcgtgtctctcatagtatagttagatatatattttttcatctagtgtttaaaatccagcctgatagtttctcccttttgatttgaatgtttaattattttatacttaatgtaactgtttacatttagtctgtttcaatttctgcctgccagtttactatttttcatctacatataccctgtctttttgttcctctgttcttcctgctctagttttttgtgttaaatagctatattctaatatactgttataattaatttttgatgtctttatcatatacatgtatatttttaattattttcctactggtttctctagggtttataatgtgcatcttattttaccacagtttacagaagattaatgctgacttcatttcagtagcacgtagaaacttcagaagagctccattttctaccttcttttatgttattaaagtaatgtatattatgtctatatgtgatataaacccccaaatacagttataattatgaatttgtaaaattatgtttttaaagaagagatggaagaaaggagaaaatacatttataaagtcttttagattaatttatatatttatcatttatggttgtcttcaattctttctgaggatgcatgttatcaatggcatcattttcttgctccaatataggtctattttatccacacatattttggtaagtatgatgtatcttgtagctttatatgttgtaagaccaaccatacactttcataaattattgttttatacaattgtcttttagatcagttaagcaaaggaaacagaagtacatgtgtatgtacacgtatgtaccatgttttatatttacccatgtaataatctttacctttattactttgtgattattttattaccatctggtgtcatttcctttcagcccaaggaactttctttagtatttttgtacaggagttctactagtaataaattctctcaatttttatccatttgggaatgtctttatattaccttcatttgaagtacagtcttgctgcaaatagaattttcggttgacattttcttctttttcttaccgatacaaaatattttacatatttttggggtgcatatgagtatttgttacatgcataggatggataaagatcaagtcagggtatttggggtatccatcaccttgaatatttatcatttctatgtgttggtaacatttcaagtcctctcttttagctactttggaatatataatacattgttgctaactgtagtcactctggtatagattattggarcttatttattctattcaactgtatgttggtacccactaaccaatctttctatatcacttctcccatccacacatccttctcgacctctaatatctatcattctggtctctatcttcatgaaatcagtgattttacctttcataaattagtgagaacatgcagtatctgtctttctgttcctggcttatttcacttaactccagttccatccatgttgctgcaaatgacatgatttcattgtttttttgtttgtttgtttgagagagtctcactctgtcacccaggctggagtgcagtggtgtgatcttggctcactgcaacctccgcctcccgggttcaagcaattctcctgccttagcctcccragagtagctggaattataggtgtccaccaccacacccagctaatttttgtatttttagtagagacagggtttctccatgttggccaggcaggtctcaaactcctgacctcaggtgatctcccctcctcggcctcccaaagtgctgggattacaggcgtgagccaccacacccagccgatttcattcttttttatggtgaatagtattccattatgtatatataccaaatttttctttatctattcttcaatagacacttaggtttattctatatctttgctattatgaatagtgctgttataaacatgtaagtgcaggtattcttttgatatacagattttgtttcctttagataaatacccagtactattataggattgctagatcatatggtaattctatttttagttttttgaaacatcctccatactgtttccatagttgtgctaatttacattccaccagcagatgagagttcccttttatccacatcctcatcaacatttgttcatttgttgttttttaaataataggcttcctagctggggtatgattatatctcattgtggttttaatttgcatttccctgatgattagggatgttgagcatttttttcctacagctgatggcaatttgtatgtattttaaaaagaaatgtctattcatatcctttgttcactttttaacrggatttttttttttattgttgagttctttgagttccttctagattctggatattagtcccttgttggatgaataatttgcaaatattttctcccattcaatgggttgtctcttcactctgttgattgtttcttttgctgtacaaaagctctttagtttaataaagtctcatttgtatgtttttattataattgtgcctttgatgtcttagccatgaaatctttacctagaccaatgttttctctgtgttttgttctactgcttaaacggtttgggtcatgcttaagactttaatccttcttgacttaattttttatatggagagagaaagaggtccagttttattcttctgcatacaggtctcccattttctcagaatcatctattgaagagggtttcctttcaccagtatatgttcttggtatctttgtcaaaaatcagttggatataagtacatggatttatttctagactctctattctgttccatttgtctatgtgtcatctgtttttataccaatgccatgctgttttagacactatagccttgtaatataatttgaagtcaggtaatgtgatgcctccatctttgttctttttgcttagtattgctttggctactcgggctctgttttagttccatacaaattttaagattgttttcactaattctgtgtaaaataacattggttcttagatagggatcacattgaatctgtagattggtttgggtaatttggtcattttaataatattaattattccaatacttaagcatgggatgttttccagttgttctgttctcttaaatttcttttgtcagtattttttagtttttctgtaaagatttttcacctcgattaaatttattcccaagtattttattttttgtagctattgtcaatgggattgcctgctttctttcttggctagatcattgttggcatatataaacactactgatttttgtatgttgactttgtatcctaaaatgttactttatttatcaaatgtaggagttttttagtagagtctctagatttttttagatataagatcatatcatcagcaaagagagtgacttgacttccttgtttccaatttggatgcgttttatttctttctcttgcttggttgctctggctagcacttccagtattatgttgaacaggagtggtgaaagtgggcatccttgtctttttccatttcttagaggtaaggcttttagcttttttccatttggtatgatgttaactgtgggtttgttatatatgacctttatgtttttgaggtatattccttctatactagtttgttgagagtttttatcatgaaaggacgttgaattttatcaaattctttttctgcatctattaagatgaccatataatttttgtccttcattctgttgatgggttgtagcacatatattggtttacatatgttgaaccatccttccatccctgggataaatctcacttgattgtggtgtattatctttttgatgtgctgttggattttgtttgctagtattttgttgaggatttttgcatctgtgttcatcaggaatatcagcctttacttttctttttctgttgtgtctttgccagattttggtatgaaggtaattctggcctcattaaatgagttagggatagttctctcttcttcaattttttagaatagtttcaggagggttaatattagttgttctttatacacttgatagaattcatctgtgaatccatctggtcctgagctttcttctttgggagactgtttattactggttcaatctcactacttgttattgatctgttcagcttttctatttcctcctgactcaactttgacacattgtgtatgtcaagggatktatccatttcccgtaggttttccactttgttagtgtatagatgttcataatagtctctgatgatcttttgtatttctgtttggtatcagttgtaatatctcctttttcatttctaattttgtttatttgggtcttctctcttttttgatttgcttagtgagttgtttataaaacttgtttatcttttcaaaaaaccaaattttcattttgttgatctttgtattttttgagtctctattttgtttaattctgctcttatctttattattttttctctttctgctaattttgggttttgttcatatttttctagttccttcaagtgcgttgttatgttgcttatttgaaatatttgtactttcttcatgtagccatttattgctataaactttcctctgagcactgcttttgctgtaccctgtacttttgcgtatgtgttgttttcattttcacttgtttcaggaaattttttgctctccctaatttatttcttgactcaatgccatctaggagctttttgtttaataaccatggatttttttttttttttgagacggagctttgctcttgttgcccaggctggagtgcaatggcatgatctcactcactgcaacctctgcctcccaggttcaagcaattctcctgcctcaggctcccgagtagctgggattacaggcatgcaccaccatgcttggctaatttttttgtatttttagtagagacggggtttctccatgttggtcaggctggtcttgaactcacaacctcaggtgatccgcccgcctcggcctccccaaagtgctgggattaaaggcatgagccaccgtgcctggcccaataacgatggatttttacagtttctaaagttcttcttgctattgatttctaattttattccattttggtctgaaatacttgatatgacttcagtttttaaaaagttgttgagacttgttttgtagccagcatatggtctatcctgaagagtgtctcatgtgcctgtgggaagaatgtgcattctgtaattgttggatgaaattttctttaatatctgttaggtccatttggtctaaggatcagtttaccagtttaaatccaatgtttctgtgttgattttctgtctagatgatctgtctaatgctgagagtgggctgttaaagttccccattattattgtgttggaatctttctctccctttatatctagcaatatttgctttacaaatctgtgtgctccaggattgagtgcatatatgtactccaaacatacaaaacattttgtttattttcatggagcacacagattcataaagcatatatatatgtgtgtgtgtgtgtgtgtgtgtgtgtgtgtgtttgtgtgtgtgtataatttatatcctcttgcttgattaatttaccattatgtaatgaccttgtctttttactgtttttcacctaaagtctgttttatctaagtatagctactcctgtttacttttagtttccatttgcatgtaatgtcttcattatccccctttgtctatatgtatccttgcaggtaaagtgctcttcttggaggcagcatacagttggaccatgtttttaaaatccattcagccagtctatatgtttaagtggagaatttagtccatttgcattcagggttatcactgctatgtgaggttttgttcttatcatattgttaattgttttctggttgttttgtatattttttgttccttttgttttctcttattgtttgttattttggtgtggtgattttctgtagtggtatcatttgagtccattctcttcctcatttgtgtgtagggtttactagtgggttttatacttttgtttgttttcatggtggtaaatactgtcattttgctttcaggtttaagactcgagcatttcttgtaggactcatctagtggtgaaaattctctcagcatttgcttctctgaaaaagacttcatttatgagggaaatcataaatttcccttcatttatgagtgaaaacgttgctggggatagtatccttggctggcagtttttttttctttcaggacattgaatacatcatctcattctttcctgtcctgtaagacttctgctgagaaatctgctgttagtctgatgagagttcttttattggtggctagacatttttctcttgctatttttagaatcctgttttatctttgactttagagagactgactataatgtggtggggagaaaacctttatgcattgtatttctggggatgtttgagccccatatagacatatggatgtcgaartctcttgctagacttgggaatttttcacctattatttcattaaataggattccatcattttgttctctcttcagccttgagaacactgataattcaaagatttgatcactttatggtatcccaaatgtcatgaaggttttgctcattctatttaattcttttttatttatttttttttctgactggattatttcaaaagacctgtcttcaagttctgaaattctttcttctgcttgacctaatctattgttgtaactttcaaatgtattttatattttattcaatgaattcttcagtttcagaatttttgttgggttcttttttaaaaaaatatctatttgaaaaatttctaattcatatcttgaattgtttttctgatttatttttgtttttcagatttctcatttatcttgctgagcttctttaaaatttgtattttcaatttgttatctgggattttgtgaatatctttttgattgggatctgttgctggaaagtcattgtgaatttttttcttttcctctttttatttgtataaatatatgaggtacaagtgtagttttgttatgtggatatattgcctagtaatgaagtctgggattttagggtaaccatcacctgaataatgtgcattgtactcattaaataatttctcatccctcactcccctcctacccttccaagtctctgatatttatcattcctcactctatgtccatgtgtgcacattacttagttcscacttataagtgagaacatgtggcattttcttttctgtttctctgttgtttcacttaagataatggcattcagttacatccatgttgctgcaaaagacaattttattattttttatggctgaatagtattccattttgcatatgtactacattttatttagtcatccattaacggacattcaggttaattccatacctttgcctttgtgaatagtgcttgatatggtttggctgtgtccacacccaaatctcatcttgaattcctacatgttgtgggagggtgggagggacctggtgggaggtaactgaatcatgggggtgggtctttcccatgctgttctcatgatagtgaataagtctcacgagagctgatggttttatttattttatttttttgatggtctttcttcttttctttttttttattatactttaagttctagggtacatgtgcacaacgtgcatgtttgttacatatgtatacatgtgccatgttggtgtgctgcgcccattaactcatcatttacattaggtatatctcctaatactatccctcccccatcccccaaccccacgacaggccccagtgtgtgatgttccccaccctgtgtccaagtgttctcattgttcagttcccacctatgagtgagaacatgtggtgtttggttttctgtccttgcaatagtttgctcagaatgatggtttccagcttcatccaggtccctacaaaggacatgaactcatcattttttatggctgcatagtattccatggtgtatatgtgccaaattttcttaatccagtctatcattgatggacatttgggttggttccaagtctttgctattgtgaatagtttcgcaataaacatacatgtgcatgtgtctttatagcagcatgatttataatcctttgggtatatacccagtaatgggatggctgggtcaaatggtatttctagttctagatccttgaggaatcgccacactgtcttccacaatggttgaactagcttacagtcccaccaacaatgtaaaactgttcctatttctctgcatcctctccagcacctgttgtttcctgactttttaatgatcgccattctaactggtgtgaaatggtatctcattgtggttttgatttgcatttctctgatggccagtgatgatragcattttttcatgtgtctgttggctgcatagatgtcttcttttgagaagtgtcttcatatctgttgcccaatttttgatggagttgtttgattttttcttgtaaatttgtttaagttctttgtagatactggatattagccctttttcagatgggtagattgcaaaaattttctcccattctgtaggttgtctgttcactctgatggtagtttcttttgctgtgcagaagctctttagtttaattagatccatttgtcagttttggcttttgttgccattgcttttggtgttttagtcatgaagtccttgcccatgcctatgtcctgaatggtattgcctaggttttcttctagggtttttgtggtttcaggtctaacatttaagtctttaatccatcttgaattaatttttgtataaggtgtaaggaagggatccagtttcagctttctccatatggctagccagttttccaagcaccatttattaaatagggaatccttgccccatttcttgtatttgtcacgtttgtcaaagatcagatggttgtagatgtgtggtattatttctgagggctctgttctgttcccttggtctatatctctgttttggtaccagtaccatgctgttttggttactgtagtcttgtagtatagtttgaagtcaggtagcatgatgcctccagctttgttctttttgcttaggattgtattggcaatgcaggctctattttggttccatatggactttaaagtagttttttcaatttctgtgaagaaagtcattggtagcttgatggggatggcattgaatctataaattaccttgggcagtatggccattttcatgatattcattcttcctgtccatgagcatggaatgttcttccatttgtttgtgtcctcttttattttattgagcagtggtttgtagttctccttgaagaggtccttcatattccttgtaagttggattcctaggtattttattctctttgaagcaattgtgaatgggagttcactcatgatttggctctctgtttgtctgtaattggtgtataagaatgtttgtgatttttgcacattgattttgtatcctgagactttgctgaagttgcttatcagcttaaggagatttggggctgagacaatggggttttctaaatatacatcatgttgtctgcaaacagggacaatttcacttcctcttttcctaatcaaataccttttatttctttctcctgcctgattgccctggccagaacttccaacactatgttgaataggagtggtgagagagggcatccctgtcttgtgccagttttcaaagggaatgcttccagtttttgcccattcagtatgatattggctgtgggtttgtcataaatagctcttattattttgagatacgttccatcactacctagtttattgagagtttttagcgtgaagggctgttgaattttgttgaaggccttttctgcttctattgagataatcatgtggtttttgtctttggttctgtttaaatgatggattacatgtattaatttgcatatgtcgaaccagccttgcatcccagggatgaagcccacttgatcatggtggataagctttttgatgtgctgatagatttggtttgctagtattttattgaggatttttgcatcgatgttcattagggatattggtctagaattctctttttttgttgtgtctctgccaggctttggtatcaggatgatgcttgcctcataaaatgagttagggaggattccttctttttctattgattggaatagtttcagaagaaatggtaccaggagagctgatggttttataaagagtagtttccctgcacaagccctcttctcttgtctgctgccacatgagatgtgtctttcaccttctgctatcgttgtgaggcctccccagccacgtggaactgtaagtccattaaacctatttcttttgtaaattgttgagtctcaggtatgtctttatcagcagtgtgaaaacggactaatatagtgctgcaataaacatacaagtacatgtatcctttttatataatggcttttttacttttgggtagatacctattagtgggattgctggatcaaacggtagttctatttttacttatttgagaaatctccatactgtagaggttatattaatttacattcccatcaacagtgtataagcattcccttttagcatcctcaccaacatctgtttttttttactttttagtaatagccattctgactggtgtaagatgatatctcattgtggttttaattttcatttctccagtgattagtgatgctgagcattttttcatatgtctattggtcatttgtatgtcttcttttgaaaaatgtctatttatgttcttcacccactttttaatggagttatttgttttctttgttgttgttgagttgttcatgttccttgtgaatttgagtgctggctgctgagaactaggttcatgttggatgcatcgtttgcaaatatttttctcccattctccaggttgtctgtgcacctggttgattaattattttgctgtataagagctttttaatgaagtcccatttttctatttttttttttttgttgcttgcgattttgaggtcttagttgtgaattctttgcctagaccaatatccagcagtttccctgggttttctgccagtatttgtatagtttctggttttatattgaagtatttactccatcttaagttgatttttttatgtggtgagagataggagtccagtttcattcctctgcatgtggcaatccaattttcccaagaccatttattgaaaatgatgtcctataaagatgggaacaatagacagacactggggactgctagaggtgggagagaaagagggggctaaaggctgagaaactacctattgggtactatgttcactaccagagtgacagatttagtcataccccaaacttcagcattatgtaatatacctttgtaacaaacctgcacgtgtaacctctrattctaaaacaaaagttgaaaaagaaaaataaagggtgtcttttccccattgtgtgtttttgtcacctttgtcaaagaccagttggttgtagatatgtggttttatttctgtgttctctattctgttccattgatttgtgtgcctgtttttataccagtaccatgctgtttggttcctatagctttgtagtataatttgaagtcaggtaatgagatacctccgtctttgttctttttgcttaggattcctttggctattcaggctcttttttgtttacatatgaattttataatttttttctaattctgtgaaaaatgatgtgggtaccttgatagggattgcaatttaatctgtaggttactttgagcagtatggtcattttaacaatattgattcttttgacccatgagtatgggatgtttttccccatttttgtcatgtacaatttctttcaccagtgttttgtagttttccttgtagagattcttggttaaatatattccttactattttattttttgtagctattgtaaatgggatttccttcttaatttgtttctcagctggataattactggcatatagaaatgctactaatttatgtatattgattttgtttcctgaaagtttactgaaatcaactctacaagttttttggagaaagtctttagggttttctagggcaaagtttttctggggctgtgatgtgaagtgtgccagttttggggccccagtggtggcagcagtgggctgagcttgcctgtccttgaaccccagagccatgtattctggctctggtgttaacaggtgaaggcaggccaattcttgggcctccgggtggcttgttcagatgtcagcagtgacaatgtttggccgggtttatgggcaggttctcaggcccctgtgcagtgggcatgatgtgggcaatggcaatagcattgatggggcatcctcctacaacctatgtggttgaagctcgtctttgccgtggcagcaatgggttgggtgggccaatctcctggcacacaggtgatatgtgttggtgtttgccagcagtggtggtattggtatgttgggtcagcccaacttcagaccctgggaagagtactcaggttccactggtatggactgggctgagagatccccaggcctctggatagcatacttgagtactgggggcataggactgggttagtgtacttgccctcagggaccctggttagtgtattcaggctatagctgtgataggcaggggcagggttgtctccaggctgccggcaggatattcaggtgggggcagtggtggctgcactgtgggcctgccatctgggaggatggggccattgtcattgtcagcagtgcaagcaggcacttgtggggcacacagcctgctcataccttggtcctacagcctacagcagcactagtacaacttttccttggggcatgtaaaagtgccaggcctcccccatctccctcctgggcctgatggtggcagtggcagcattagccccagggcaggatgcagttctttggggactgggctctcaatggtagcagctgtagtcctgtcaccatatagggtgggaccactatcagtgggagcaacataggcaggcacctgtgtgttacatggttttctttctctttcgtttcacagcagcctgcagcagcagcagggatgggattcgtcctcagagtgtgtgaaagtgcctgatctcttctttccctccttggccagtggtggcagcagtggcagtggcaccagggctggatgtgttaaggcaaaaactgcaattacttttgcaccaacctaatagttctttgagagctgggctgttagtattatctccatggaaggggcatatactagctacatctaatcagccactatgaacctgactggtgtgagatggtatctcattgtggttttaatttacatttttctattttttttttttttgagacagagtctcgctttgttgcccaggttggagcaccgtggtgtgatctcagctcactgcagtctctgcctccttggtttaagcaactctcatgcctcagcctccctgagtatctgggactacaagtgcacaccaccatggccaactaattttttttatttttagtagagatggggtttcaccatattgcccagcctggtctcaaactcctgagctcaggcaatccacccgccttggcctcccaaaagtgctaggattacaggtgtgagccaactgcaccaggccttaatttacatttttctaatgatttggtgatgtttagcacttttttatgtgcttgttggccatgtgtatgtcttcttttgaaaagtatctgttcatgtgttttgcccactctttaatggggttgtttggtttttgcttgttaatttaagtgccttatagcttccagatattagacctttgtcagatgcatagcttgcaaatatttgccccattctgtgtgttgtctatttactctgttgatagtttcttttgctgtgcaaaagctctttagtttaattaggtctcatttgtcaatttttgttgtcattgcaattgcttttgatatcttcgttatgaaatctttcactgggcctgtgtccagaatggtatttcttaggttatcttccaggggttttgtagttttaggctttacatttataagtcttgaaaccatcttgagttgatttttgtatatggtataaggaaggggtccagttttaatcttctgcatatggctagcagttatcccagcaccatttattgaatagggaatcctttcttcattgcttgcttttgtcaacttcattgaagatcagatggttataggtgcacaactttatttctgggctctccattctgttccattggtctatatctttgtttttgtaccagtaccatgctcctttgcttacagtagccttgtagtgtagtttaaagtcaagtaatgtgattcctccagctttgatctttttccttacgattgttttggctagtcaggctactttttggtttcatatgaattttagattttttttctaattatgtgaagaatgtcattggtagtttgataggaatagcattgaatctgtaaaatgctttgggtagtatggccattttaacaatattgactcttcttatccatgaacatggaatgttttcccatttgttggtgtcatctatgatttctttgagcagtgttttgtaattctcattgtagatattttttaccttcctggttagctgtattcccaggtattttattcttcttgtggctgttgtgaatgtgattgcactcttgatgtggctctcagcttagatgttgttggtgtatagaaatgctactgatttttgtgcattgagttttgtatcctgaaactttgctgaagtgctgatttttttttaaatcagatctaggaggttttggcagagactatggggttttctaggtatagaattatataatctgcaaacagagatagtttgacttcctctcttcctatttggatgccttttatctcttactcttgcctgactgctctggccaagactcccagtactatgttgaataggagtggtgaaactggacatccttgttttgttctggttcttaaggggaatgcttccagcttttgctcattcagtatgatgttggctgtgggtttgttatagatggctgttaactattttgaggcatcttcctccagtgcctaatttgttttaacatgaacagatgctgaattttatcaaaagccttttctgcttctattgaaataatcatgtagtttttgtttttagttctgtttatgtgatgaatcacatttattgatttgcatattttgaaccaaacttgcatcccaggggtaaagtctatttgattgcggtggattagctttttattgtgctgctggatttggtttgctcattttttcttttgtttctttgaaacttgcttattttctttggctttcaacagcctattgtgatttttcagtatgtagatttctttgtgtttatcatccttggcgttgagatccttggatgtgtagattaatatttttcatcaagtttgggaaatttctgacaattatattttcaaatattttgtctgtccctttttgtctctctgctttttcttggactccaatgactcatatgttacgatatgcattgaattttgtccctccaaaattcgtatgttaaagtcataaccctctatatctgagaatgcaaccttatttgaagataaggtctttacagaggtaatcaaattaaaatgaaattatttaacttatattcttataaaaagggaaaatttggagacagatacatgcagaggggaaatgatgtgaagacagggagaagatggctatccacaagccaaggaaagtggtctggaacatatctttccctcatagcccttagaaggaaccaacattaccaacacatggtctcagacttctggcctccagaactgtgagataatatgtttctgatggttaagccacccagttcgtggcacttttttatggtagtcttagtaaactaatacaggttgttgtgttcggtgctatcccacaggtctctgtagctctgttcatttttcttaaattttttctttctgttctacagatcaagttatctctattaatctatctttaagcttgttgattccttcttctgtcagagcaatctgtgtagtctccctagtgaatttttcatttcagttattatacccttcaattccagagtttccatttttctttttttataatttctgtctctttgttgatgttctgtgtgctaagtaattgttctcctaatttcctttaattcattaaacatggtttattttgttcttttgttctttgagtacattttttgtccttgtctgttgtgtgcaacatctgagcccctagaaatggtttttgttgactgctgttttcaccccatgtatggaatacacactcatgtctaatattttttaaggaaaactggacgttttagacaatattacctctgtatcagcatagcttagtggtcagttaatggttggtcagagattgcaattaaaatctttaaccagtaaggctaagtttctaccctttgaaaagtggatctgcatgtgggatgggaaacaaattcaaagttcaggctgtttacaagcctgtctcactcttactttctgtgtggacaaggactcatgttctcccagggacaagtgcatatctaggatccactctgacctttcataagcaagtgtgcagtttgtaaatatacgtagtctgccaaacccccagtgatatgtcagaacttttcaaggcctactttggctgtctcattacctggatatccctgttaaatttcttgctggcaggccttctgcctgtggctctctacaaccattatggaggctttaggctagctgtcatattggccttccttgattgcttgccactgattttgctattgttttcagcaatgccactggatatgagtttcgtgtgtgtgtgtgctctgttgtattattttattttattttattttattattattatactttaagttttagggtacatgtgcacaatgtgcagatttgttacatatgtatacatgtgccatgctggtgtgctgcacccattaactcgtcatttagcattagttatatctcctaatgctatccctcccccctccccccaccccacaacagtccccagagtgtgatgttccccttcctgtgtccatgtgttctcattgttcaattcccacctatgagtgagaatatgcagtgtttggttttttgttcttgtgatagtttactgagaatgatgatttccaatttcatccatgtccctacaaaggacgtgaactcatcattttttatggctgcatggtatttcattgtgtatatgtgccacattttcttaatccagtctatcattgttggacatttgggttggttccaagtcttcgctattgtgaatagtgccgcaataaacatacgtgtgcatgggtccttatagcagcatgatttataatcctttgggtatatacccagtaatgggatggctgggtcaaatggtatttctagttctagatccctgaggaatcgccacactgacttccacaatggttgaactagtttacagtcccaccaacggtgtaaaagtgttcctatttctccacatcctctccagcacctgttgtttcctgactttttaatgattgccattctacctggtgtgagatggtatctcattgtggttttgatttgcatttctctgatggctagtgatggtgagcattttttcatgtgtctgttggctgcataaatgtcttcttttgagaagtgtctgttcatatccttcgcccactttttgatggggttgtttgtttttttcttgtaaatttgtttgagttcattgtagattctggatattagccctttgtcagatgagtaggttgtgagaattttctcccattttgtaggttgtctgttcactctgatggtagtttcttttgctgtgcagaagctctttagtttagatcccatttgtcaattttgtcttttgttgccattgcttttggtgttttagacatgaagtccgtgcccatgcctatgtcctgaatggtaatgcctaggtnnnnnnnnnnnnnnnnnnnnacttttttgtcttctttgttcactggtatatccctagtgcctaaaacaatgtctagcacaaagtagacacccgacaaatatttgttcaaatgattaactaattaattagttaataagagtgtcagcgaaggtttctcaatgaattgatatttaatctgagacctaaggaacgagcaggaagaatgaaggggagagcatggtaagcagagaaggcagtatatgtgatggtcctgacatgggtggggcaagatagattatgtaacgccctgagtgcaattgtaaagagatggctcaaacctttgcctctcctcaaggagctcatagcaattgaggtaagaaaaataattaaagaaatgattgtcatacatgttttaagtgcactaataaggttatgcacagagacctgtgaaaacactgagtaggcagttgctaactcttcctaagggagctgggaatattttacgaagaaggtgacatttgagctaagtcttaggcaggagaatggcatgatgaaagtgttttaagaagattaatctggcaatagtgtatggacaatggattggaatacggatggactgaaggcaaggaaaccatctagtctatggcaataggccaggtatgaggtgatgaaggaatctataggaatggaaagagaaggacaaatctgaaagacatttggaaggaaaaattgacaggagctaaatgcactcttggctttaagcctttcaggaggtaatgcttcttccttagtaataaccatgaaaagattcagattgacctattatgtaattgcctactctgactagaatttctagctatggctgatctccaaaagtttctgttattatgattgatactttttggaccttaatttacattacgatggctttagactctaaaggttgggaagctctcaaaaacataattttgacaatgaaacagcaaattattctattaaaggagaaaagaggaaaaccatggggccacataggaagttttacaatgagttcatactttcttttttttaaaagataatatataagaaataggaaaaagggcacaaacacaaggataaatataactggtgacatgtgcctaaagggttagtatttggaaggataaggtccaaaattacctcaggcttgtagaaatgcatatttgtaaagacaacaagaacaatattttaactatactctcagaaagaaaaagtacatgtgtcctggaatgggtaaattgtaactcagttgatattactaaactactctcagtaatcgaaggcattaaggaaaataggaaaggtgctttaagattggatttatataaatatattactgaggctaacaaagaaaaagggggagtcttcaatcttctaatcagtgagctaaatgtctcttaagttagcttctaaaacaaattttcaaataagcgagtacttaaaaaattacagttatcaacaaagccattcaacacaaacctggttcttatttctgacaaggctattagaggtagtttatggaaatatggcagacataattacatatcttaaatgaatgaatgaaatttcagcaagactaataagtcatttatgataaccttctggacaagataatatgggttataaaagtaatataattatgtattaattaattaaatcaccatattcaaagagtgctgattaacatatcataggcaaaggatgaattttttgatgatctgctgtataccctacctttggattgacccagtcaatattatttacttaagcaaaatatcttaagcagacattaagattaagcaaacattttagatttaaaggggctatgatgctggaagaataataattcaattcaattttcacaaacatttatggagttctgctaagtactaggaaccatgctagatgttagggtatcaaaatgaatgagacagataggccttcctattgaggaacatccagcattattagggggaaagacatataaacatatcatttcaacataatgtattaagaagaaacacataaagactattatgagagaacaaaagaaagctactggtttattctgggagtttagagaagacttcttagatgagatgatatctagactgattcttaaaagatgaataaaaggcagaataggaagggaagggcttccagtttgaacaaagagcatgaacatgagtttcttcaaatatgaaagaacatggtaaatctggggttaagcaataaagtacaaggaggtaagtagcaggaagttaggctgagaggtagctcagaaccaggtagtagaaggcattacattaaggacattggattttacattgaaaagcctagggagatattcaaatggagtgacacactgacatattttagttaactcttcctaccatgtgcaaaaagtttgaagggagggcaagagtggataggtcaattagaaggctgttgcagtctttaagtgagaaataatgatgggcctggacaggcatgttggcaagtagagatacactacggtgggtgaagtttgagaatcatttaggggataaaagttatcatgacttgataattgactggggggaaaactttttttaatgaagtattgagtttgaagcactgatttttgagttacgcaactggttgaatgagactagaatttactgtgaggaggaactctgtgggaggaaacagtttaggtgtaggggggatcaggatgtcattaaaaggtgcttcatgaggataggaatatttttggttgctgatatattttcagcacctttaacagtgtctggcacctaatatgtgtaaagatctgatatatgtgcaataggagtcctagaaaaaaaggagagagaatggtacagaaacaatatttgaagacgtgatgatgaggaatttttgaaaagtaatacagcattgcattatttttctatagctgcatatcaaattaccacaaacttagtggtttaaaacaacatccatttagtagctaacagttctataggttgttgcaggaagtgaggggccccaaacggagggaccggctgaagccatgacagaagaacgtggattgtgaagattttatagacatttattagttccccaaattaatacttttgtaatttcttatgcctgtctttactgcaatctctaaacataaattgtaaagatttcatggacacttatcacttccccaatcaatacccttgtgatttcctaggcctgtctttgctttaatctcttaatcctgtcagccgagaaggatgtatatcgtctcaggaccctgtaataattgcgttaactacacaaattgtacagcatgtgtgtttgagcaatatgaaatgtgggcaccctgaaaaaagaacaggataacagcagttgttcagggaataagagagataaccttaaactctgactgccggtgagctgggcagaacagaaccatatttctcttctttcaaaagcaaatgggagaaatatcgytgaattctttttctcagcatggaacatccctgagaaagagaatgcgcacctaggggtaggtctctgaactggcccccccggggcgtacctgtctcttatggtcgagattgcagaggtgaaataaactccagtctcccatagcgctcccaggcttattaggaagaggaaattcctgcctaataaattttggtcagaccggttgatctcaaaaccctgtctcctgataagatgttatcaacgacagtggtgcccaaaacttcattagcaattttaatttcgcttcggtcctgtggtcctgtgatctcgccctgcctccacttgccttgtgatattctattaccctgttaagtacttgatgtctgtcacccacacctagtcatatactccctccccttttgaaactccctaataaaaacttgctggtttttgtggcttgtggggcatcacggatcctaccaatgtgtgatgtctccccaggatgcccagctttaaaatttctctctttcgtactctgtccttttatttctcaagccagccgatgcttaggaaactagaaaagaacccacgtgattatcggggcaggtcccccgataataggacagaagtccaggtgtggcatgactgagttctctggtcacagtattaaaggctgaaatcacaatgttggccaggctacattcctttctggaggctatggctaacaatccacatgtaacctcattcaggttggctgaattcagttccttgtaaccataggactgaagtccctgtttcattgctgcatgtcagctgtaactcactctcatcttctagagactgcctgccttacttgccacgtagttatctccatcttcaaagccaatgaaaaatcttcctggcatcaactccctttcttgcttcaagtctctttcactaagaagagaccaattcaagatggattaaagacttaaacgttagacctaaaaccataaaaaccctagaagaaaacctaggcaataccattcaggacataggcatgggcaaggacttcatgactaaaacaccaaaagcaatggcaacaaaagccaaaattgacaaatgggatctaattaaactaaagagcttctgcacagcaaaagaaactaccatcagagtgaacaggcaacctacagaatgggagaaaatttttgcagtctacccatctgacaaagggctaatatccagaatctacaaagaactcaaacaaacttacaagaaaaaaacaaccccatcaaaaagcgggcaaaggatataacagacacttctcaaaagacatttatgcagccaacagacacatgaaaaaatgctcatcatcactggtcatcagagaaatgcaaatcaaaaccacaatgagataccatctcacgccagttagaatggcgatcattaaaaagtcaggaaacaacaggtgctggagaggatgtggagaaataggaacacttttacgctgttggtgggactgtaaactagttcaaccattgtggaagacagtgtggtgattcctcaaggatctagaactagaattaccatttgacccagtgattccattactaggtatatacccaaaggattataaatcatgctgctataaagacacatgcacacatatgtttattgcagcacagttcctaataccaaagacttggaaccaacccaaatgtccatcaatgatagactggattaagaaaatttggtacatatacaccatggaatactatgcagccataaaaaaggatgagttcatgtcctttgcaggacatggatgaagctggaaaccattctcagcaaactatcaaaaggacagaaaaccaacaccgcatgttctcactcataggtgggaattgaacaatgagatcacttggacacagggtggggaacatcacacactggggcctgtcagggggtggggagctggggaagggatagcattaggagaaatacctaatgtaaatgatgagttgacggatgcagcaaaccaacatggcacatgtatacctatgtatcaaacctgcacatggtgcacgtgtaccctagaacttaaagtataattaaaaaaaggaaaaaaaaaagaagagaccagtctctttcaaaggattgctgcattaggtaatcccaaccaagggccattcccctttcttaaagtcagctgtcccatatacataatgtaataatgcaagtgaaaccttatcatattcataatccctctcacactccaggggaaaagattttacaacagcaagggtaactggaggtcatcttagaaatctgcctgtcacaagcatcagttcgtggattcaaaaagtaccataacccgaagcagaataaataaataaaaaaccctcatctaggtgtatttagtaagaactgccaaaaaaataaagaaaaaaaagtcttaaaagcatttggagaaaaaaaaagtattacctttcaaggaatagcaattagattggctttgacttttcaaaaaaacaacatgaagacgatagaactacattttcaaaatgctgacaaaattaactgtcaacctaaaattttatctggtaaattctatatccagccttttaaaatggaagtaaaatagatgtttttagatggtccataacttagggaacctgtcaccaaaaaccaaaggaaatattaaggatcttcaggcagaattaaactgatcctaaatgaaatcttggaaatatataatgaatgaagtgcaggggggaggttaaatatgtgggtagatctgaatgttcattgatcatatttaaaaaaatagtaatgtcttggcaaagcaaggtagtgcatgcctgtagtcccagctactcaagaggctgaggtgaggatcttgagcccaggagtttgaagctgcagtttgccatgatcatgccactgcactccagcctgggtgacagagcgaggctctgaatctataaatgaatgaatgaatgaatgaatgaatgaatgaataaaaatagtaatgtcatgtggcgtgcatgtgtatgcaattaaaatacacaataatagcacttgagggaggaagataaatggagttaacataaaccctctaatttgtgctacactttaatatgtcatatatatatgttattattcatagaataatcactaaaaacagtaaaagaatgtataacaattaaacaaggagtaaattgaataatacaaattaccatattagtacaaaacaaagcaaggagagaaaagataacagaataggcaagacaaacagaaagtaaatagtgatatagtagagttaaatatatcagtaattataataaatgtaaatggactgaatacctcagttaaatgacaaagattattagaatggttaaaaaatacaaaatctacatcttgtttataagagatatataaaatgtaaagatataggaagattgaaagtaaaaggatggaagaagtatagaatgcagatactacccaaaagaaagctgatatagctatattaataccagacaaaggtgactttaaggtagaaatatttactaaatatagagctattttataatgataacaggggcaatccaccaagaagatacaattattctgatttgtatgcacttaacactcaaaataggcaaagcaaaaatttactgatgcccaataaattcacaatcataatcagagatcttaaaatatatcccttagtaactgatagaatatcagacaaraaagagaaaaccaataattatatagaagagttggacagtaatattaacaaacttgacctaattgacatatatagacaaccacatgcaacaattgcagaatacatattcttttctgcacatagaaaaatacgtgatgtgttgaaccataaagcaaatctcaaaaactttaaacaattatagtattttttggccacactgacattaagttagaaaacaagaaataaattagaaaatctccctaaaattcatagtatactttaaaataacctgtgggccaaatttttaaaaattgcaatgtaaaatagaaaatattttgagctgactgagaaatggaaatatagcatcttaaaatttaaagggatactgtttaaccattactgtaagggaaatttgtgtccttaaaatgcatattccacaaaagaggaaaggctaaaaaatcaatgacatatggatccatctcagggaattggaaaaacaatagaaaattaatcctaaagaatgtagaaggaagcaaagataagaacagaatttcctgtaagaaagacatatttgacagacagcattattgaaaccgaaagtttcttttatgaaaagactaataaaattgataataccactagaaatatggataaagaaacaaaagaagagagagaaagcataaataaccaatattaggaatgagacaggagctaccattatatatcataaaacagaacagttacaattggatattgtaaataattttaagtcagtatactaaaaatttaaataaaatacatagattcctaggaaacataacttaccaaaaagaacacaagaagataaatttctgcactgacctataactattaagtaactcaaacccatctcacaaagtaaagccaagactcagatgccttcactgagtaattctatcaaaatttaagaaagaaataatatcaatctcacatgacattttccagagaacagaagaaaatagatgtctttacaactctttttataaagttagaataatactgtaactaaaatattataaggaaaatatgagaaaggaaaatttgggttaattttacacatcaatatagatgcaaaatttcgaacaaactattagaaaattgtaaacagtgatgtattaaaaggataatataccctattgtagtttggtttatgccagcgttgcaaagttggtttacattttgaaagtgaatgaaggtaactcaccacagaaacaaaggagaaaaatcatacagtcaaatcaataaatgcaaaaaaaaccctaaaattcaacatccatttatgagagaaaaagtcttttagcaaactaggaataaaaagtaacttctgataaaggttatttacaaaaccatctaaaacatgccatccacaatatccaacattccaaaaaatactacatatataacaaaatgaataaatagtcataataaggagggaggacaatagtcaataaaggcagactcacagataacccagatactggtgttttctgaccaggacattaaaactgttattgtaaatatgttagagaacttacaggagcaaataagtggaatgaatgaacagatggaaaacttcagaggataaacagaatttctaaataaggaccaagtggaaatactagaactgaaaagtgaagtggaggtaacattctctaacttattttgtgatcattaaaaagtcaggaaacaacagatgctggagaggctgtggagaaataggaacgcttttacactgttggtgggaatgtaaattaattcaaccattgtggaagacagtgtggcaattcctcaaggatctagaactagaattacgatttgacccagcaatcccattactgggtatatacccaaaggatttggggtggggggaggggggagggatagcattaggaagaatacctaatgttaaatgacgggttaatgggtgcgacacaccaaatggcacatgtatacacatgtaacaaacctgcacgttgtgcacatgtaccctaaaacttttagtataataaaaaaaaagaaaatacatgagctgctggaaacttgtatgcagttacattagaatatgtagacaagctgatatagtgcatgttggaacagtccagaatgagacaatattaaaaatatttattttgggacccgaggtaggtgttgaaatggatatgaagggcatgcagcctcacccaactgtctttctgtgcattgccatgccgtttaaagggccaagcaccttttgagagttgatgcgctttatttactaaaagtaaaaatatctttggtcccatttttcttttcttttggggttaaaaaataatttgttagttgtcaagatagccaggctgaagaaaaaaatggcttttcccctcgtttttaacctgctttgatgacatagtaaccaaataaccaagtggttcatatacactcaaaatatttaatcacagtctctaggggcagggccggatcatcagaacttttctaaagttccccacatcactctattgtgccatcaggattgagaaaccacttgtctgaagtctcaccagtttgaactgacattagtaaggagaaaacttagtccaaaagagaaggctagcaaaaggaaacatgtaaagcagctatgagatgtgaatgtgttgcttcaggaattgcttcattgaattaagggcgtgaaaagaactttgagagttcaattatttcattcgtgtgcatccagatagaaacatactccaggaattgatattctgtttttaacagctttcagtgctacttatccaagtatctttttgtaatccattcccaaatattgcaatggatggaaaagcaagcaagcaagtagaccaatagtacaaaacattatagaaagaacttattttcacacataataaaaatggaagtaaaattagttactttaggattagtttaattaggwcaagttaaattaggattgcgactatgcatcatgggtaaattttcatatatgcatattacaataaaactgattttgcaagaccaaaaaaaaatcattctacgataaagacacatgcacacgtatgttgactgcagcactgttcacaatagcaaagacttggaaacaaccgaaatgcccatcaatttgagactggataaagaaaatgtggcacatatacgccacggaatactatgcagccataaaaaggatgagttcatgtcctttgcagggacatggatgtagctggaaaccatcattctcagcaaactaacacaggaagagaaaaccaaacaccacgtgttctcactcataagtgggagttgaacaatgagaacatatgggcacagggaggggaacagcacacactggggcctctcggggagtgggggctaggggagggatagcattaggagaaatacctagtgtaggtgacgggtttatgggtgcagcaaaccaccatggtttgtatacctatgtaacaaacctgcacgttctgcacatgtatcccagaacttaaagtacaattttaaaaacccagcataaatctgataaaatacctgataaagatgacacacacacatacacacaccagaccatgtattcctcatgtatctagatgcaaaatactgaaacaaaatttcagcatattgaatccaacaatgtataaaaaggataatatatcataatcaaatggggtttattccagaaatgcaaggttgttttaacataggaagtcaattagaataattaaccactttactagaataaagcaacaagccataaaataatagatgtagaaagtacatttactaaaattcaagtcatattcctgataaatactctcagaaaactaggaattgaaggaaacttccccaaccagaaaaaggccattaataacaataacaaaaaaatccaaaaacatggctaacaacatacttaatcatgaaactagaatgttttcccctaagatcaggaacaaggcaaggttgtccatgcttactcctcctaactagtgagcacaatgcagcaaaaaaacaaacaaaaggtataaagtttgcaaaagaagatgtagaactctattcatatatgacattccttatatagaaaatgctgagaaatttccaaagcgcttactggaagtaataactgtttttattaagattacagcattccaggtcagaatataaaagtcagttgcattgtgtatactgttagcaattacaaattgaaattttaaaatgctgcttgtaatagcacaagaaatcacttaggaatgaattcaatgaaagatgtgcaagacctctatacttgctattgtcagacatcttaatttttgccgatcagatggttatatcatatctcactgtgactagattacaattccctaatcattaatgaggttgaacatctcttcatgaattgattgaccatattgaccatatgtgttttctcttagaaatgtctgttcatactatttgctcacatattgtttgcttttcctattgacttgtaggatgtcttttttttttttgagacagagtctcactctgtcgcccaggctggagtgcagtggcacaatctcagctcactgcaacctttgcctcctgggttcaagcgattctcctgcctcagcctcctgagtagctggaaatacaggtgtgtgccaccacacccggctaatttttgtattttttagtagagacagggtttcaccatgttagtcaggctggcctcatactgctgaccttgtgatccgcccgccttgacctcccaaagtgctgggatttcaggcatgagccaccgcgcccagcctgtaggatgtctttaaatattcttgatattaatactttgtcagttgtgtgaatttcagatacctgctgccagtttgcaaattgcttgattattaatcccttgtcagatgggtggttggcaaattattttctcccattctccaggttgtcccttcactttgttggttgtatcctttgatgtacagtagctttttaacttgatgtgatcccatttgtccatttttgcttagcttgcctgtgcttttgaagtcttactccagaaatttttgcccagaccaacgtcctggtatgtttccccaatgttttcttgtagtagtttcatagtttgcggtcttagatttaagtctttaattcacttagattgtattttttgtatatggcaagaggtaggggtctcattcttctgcatatggatatccagttttgcttgggctgatttctaaaaattgaaactggtaacatttgagtagtgagattatgggaaatgggggaggagagactttgttttctaccattctttatggtttaaatacatatgtatttctgtatgtttctatagcaggtgtggagattttaattatatgtgtcattgtatatgccaaacctcatcaacagtttccttgaaagaatggggtggtaaataatgaaagaaagaggcttttacttattattttatatatttcagggttgtgtggattatttccaacacctccaacaatcccatctttttttttttttacaatcagttttatttttaagttaatataaaacaatgaaaccttcttcaaagaacactagtcatgtggagctccaccactttcctcaggcatggttaacttcttactcctttgcacctttcactgtgttgtatgcttaaaactattataaatagtagtagttatcaccctgtacttgtctttcttccctgctagtttgtgaacatcttgaatggtggctaggactgctgatttatttatgtttgtatcttaatacttaagaaagtacctattatagctggtcgtggtggctcacgcctgtaatcccagcactttgggaggctgaggcggcggatcacgaggtcaggagatcgagaccatcctggctaacacggtgaaaccccgtctctactaaaaatacaaaaaattagccgggcgtggtggcrggygcctgtagtcccagctactcgggaggctgaggcaggagaatggcgtgaacccgggaggcggagcttgcagtgagccgagatcgcgccactgcactccagcctgggcgacagagcaagactccgtctcaaaaaaaaaaaaagtacctattagtaatatttattttgtgaaataatgaagtgagtgaatatacttaagagtagatttttgggagatttttcgatgtagtgggagaagagtatttgattaagaatttaatatttgactaggagttggaaattttttttctttgaagatccagacagcacrtattgtagacttcatagactacaaagaagaaattctagtctggtcttggtctggagtcttggtgtcatactcatctttgtttttctttacaactccttaaaaaatataaaatccatttttagtttgtggggcatagattgccagcccctgtttcagacagtatctgtaggtaggaggttggaaacaagagacagtgaagaaataaatgtaacccagattatcagcagaggagtttctgtgctctcctctttgccctcagccacaaaatctcaataaatttgactttagccttccattctctatcctgtaattacagactgctccctagtgattagtaaattctattatatctctagctatggctttaatttatgtgattggtttcatcccatatcagcatgaagttcagtcctttcatcagcttacaactcacatacccacacatatgcatgcgcgcacacacacacaggcactcaccagtccactcaacataagcattttgtgggtttaattacactactgcatatttgagggtgtaattgagaaggttcacattgagaaccacacagcctatctgcaatcacatagctctctcagtcttctgccacaggacaaattaattccttttaagaccttatgcaaatggtgttgttttattaatttttctaaaactatgctactcagcatcaccaactccaagcaggtttatcaaggcattttcccaacataaagtttatgcctaacaacagccgtaataacgatagtaatagcagtgatacatatgtagggcttagtatggaacatataattctaagtattttagtcctcacagtaaagccatgagataaatactattatcaacctcattttacaaaggaagaaatggagtcactgagggtttaagtaacttgcccacagcacacataaccagcggagaagaaagtttcacatagtcggaataggggtgattagtagtgtcacaagcagagagacccagaaggatgagacatgaaaaataatccttttacaattatgggtcagttgacaggataacgacagggatacattctgagaaatgcctcattcagcaatttcatggttgtatgaacatcctagagtgttaacaaacccagatggtatagcctactacacgtccaggctatatgatatatatagcctgttgctcctaggstacaaacctgtatagcatgtgactgtactgaatactgtaggcaattgtaacataacgctgagcatttgtgtatgtaaacacatctaaacatagaaaaggtaatgcattgtgctacattaccatgtcactaggtaataggatttttcrgctccattataatcttatgggaccacyatcatatatgtggtctgttactgacaraaatgtcattatgcagatgactgtatgtatttggaaggttaagattagtgaattttttaaagcactgcttcagttaggtagtaggccaaaaggaagattgtatgacataaaataagagtggctaatgagaaaatgtaagtaatggttatagatcacttatgcttaacttttcacaatttctcctttgtttaatcctctgtattgagatcattaaatctatcattttacataattatatctgtagtgttattcctatagcctcataaaagttgttgtatattactactaacttgttattatccaatcttctaggatgtggtaccacagattgtcccacctacacagcaggcttcaggacttgctgaagggaggagtcatatatccrgcccttccacagcccaacttcaaaagcttacttcctttagctgtccattggcaccatacagcctccaagtctctgacttgtgcttggcagcaacatgaagatcattttggtaagagatgtgtgaagacagatactttttaaaacttgtggtaagaaatrtttgctttggcagcacatatatcaaaaattggaatgataaaatygtggtaagaaaacacatagtacaaaatttactatcttaaccattttaagtgtacaattcacattgttatgcaatgataaataccttttgtgtggtctgaaaatactttttgtggagttgacaggacctctagccatttatttttaagattagcctacaagttgggagaaagacaaaaataacagagggcaatagtgaaatcccttctcaactaggggaaggcaactcagcctgctccagccccactccatctccctgtcttacctaagggaaaaaaaaataaagaaaagaaagccttaatatacaagggagagggtttcaaagatatagactaggaatgttagaaccacagaaagtattagttggcaggagggaatactttacctatgtgtatgagtcttctaaggctgccataacaaattacacaaactaggtgatttaaaacaacagtgtattttctcatagtcttggagggttggtaaggccatgctccctttgggagagagtttttccttgccttttctagtttcttatggttgctggcaatccttggctttactttgcttgtgccagcatgactccaatctctgctttcatattcacatggccttcttctcaatatctaatctctgtcttcaaatatttctctttataaagatagcagtcattggatttagaacacaccctaatccagtgtgacctcattttaacttgattacatctgcaaagaggctttctaaataaggtcacattcacaggtaccagggattaggacttcaacatatctttttgagggttacagttcaatctaccacaccctggaagagaaacaaaaacaattgttaaagtcacacttccaagacacaggcccactatgcactccaaagactgagaatctgaagattgtagaatgccctcatccccccacatcctacaacaagctaataagcctccagttaaaatgacagtggattacagctggaagagctgcaagagacagcctgtctctgaggtacagcacaaagggaagggccaaggccaagagagaagacaaaagcaaaatcactagagaaatttaatgcttctggtacccacagagacaacaaacatcaaacacaacctaactccaggccagattaatataaatattcatggtaaaatcctatttacctcagtagctattgctctatacaagatgtctggcttttaacaataacaacattacaaaacttgctaaggcaagaaataacacaatttgaagagacaaagcaagatcagaaccagacttacatatgacacaggtgttgaaattatcagtcagaattttaggattttttctatttctgtgaaaaatgtaattgaaattttgacaggagctgcattgaatctgtagatcactttgaatagtatagatattttaacaatattaattcttccaatccacgaagatggaatttttttcatttatttgtgtgttctccaatttatttaatcaatgttttatagttttgagtgtagagattattaatctccttggttaaatttattcctaagtatttttttgcaactattacaaatagcattgttttcttgatttctttttcagttagttcattgttagggtttagaagcattaatgatttttgtatgttgattttactgaattcattaagtctaacagttttttggtagtctctttagggttttctatatataagattatttcatcagtgaacagagacaatttcatctctttctttcctatttgcatgtcttttatttctttttcttgcctaattactctggctacgacttccagtactatgtggagtaagagtaggaagagtgaacatcattgtcttgttcctgatctgaaaggaaaagttttcaacttaagaccctgaatggctaaagcaatcttgagcaaaaagaacaaagctggaggcatcatactacctgatatcaaaatatattacaaagcaatagtaatcaaaacaatatgatactggcataaaaatagacacattaacaaatgcattataaataaacacacacacacacacacaccccttaaaataaacaagcaggacctcacacatgggcatattatattaaaactgcagaaaaccaaagacaaagagatattcttgaaggcagcctagtggggagaaaaacaccttacctacagagaaacaaagataagaattgcagtggacttctcatcaggaactgtgcaagcaagaacacaatggaatgacaaccttaaagtgttaaaggggggacaactaccaatgtagaattatatatccagcaaaatgatccttcaaaagtgagagataaagactttttcatacatcaatactattttgattactgttgctttgttgcatgttttgaaattgggaagtgcgaggcctccaattttggtctcatttttcaagattattttgactattcagggtcccttgagattccgtatgacttttaggaaggtttttttctgtttctacaacaaattccattggagttttgataggcattgcatttaatctgtagatcactttgggtagtatggacattttaacaacattaagccttccaatccataagcaggagatgccttttcatttatttgtacctttctttgatttatcttagcaacattttgtagttttcactgtagaagtgtttcactaacttggttaagtttattcctaagtatttcatcctttttgatgccatatgcagaaggctgaaactggatcccttccttataccttacacaaaaattaactcaagatggattaaagacttaaacataagacctaaaaccataaaaaccctagaagaaaacctaggcaataccattcaggacataggcttgggcaaagacttcatgactaaagcaccaaaagcaatggcaacaaaagccaaaatagacaaatgggatctgattaaactaaagagcttctccacagcaaaagaaactaccatcagagtgaacaggcaacctacagaatggaagaaaatttttgcaatctatccatctgacaaagggctaatattcagaatctacaaagaacttagacaaatttacatgaaaaaaaaaacaaccccatcaaaaagtgggcaaaggatatgaacagacacttctcaaaagcagacatttatgcagccaacaaacatatgaaaaaagctcatcatcactggtcatcagaaaaatgcaaatcaaaaccataatgagatatcatctcacatcagttagattggcaatcattaaaaagtcaggaaacaacagatgctggagaggatgtggagaaataggaacgcttttacagtgttggtgggagtgtaaattagttcaaccattgtggaagacagtgtggagattcttcaaggatctagaactggaattaccatttgactcagcaatctcattactgggtatatacccagaggattataaatcattctactataaagacatatgcacacatatgtttattgcagcactgttcacaataacaaagacttggaaacaacccaaatgcccatcagtgtgaaactggataaagaaaatgtggcacatatacaccatggaatactatagagccataaaaaaggatgagttcatgtcctttgcagggacatggatgacactggagaccatcattctcagcaaactaacacaagaatagaaaaccaaacatcgcatgttctcactcataagtgggagttgaacaatgaggacacatggacacagggaagggaacatcacacactggggcctgtcagggagtggggtctaggggagggatagcattaggagaaatacctaatgtagatgacaggttgatgggtgcagcaaaccaccatggctcatgtatacttatgtaacaaacctgcatgttctgcacatgtaccccagaacttaaagtataataaaaaataaaataaaataaataaagggaattttttcttaatttttcttcttagatcggtcaccattaatatatagaaatgcaatgcattttatgtattgcttttgtatcctgcaaattttctgacatcatttattagttataatactttttattgcatatggaatatttagggttttctacatataagatcatgtcatctgtgaatacagacaattttacttcatcttttccaatttagatttctgttacttctctttcttgtctaatttttctagctaggaatcccagtacttcaacaatagtaatattgagggtgggcatcctttccttataatgtgcatccattaacatagatctataattatttgttacttttgtttttaaaatttataccatatttaaaagtgatttacacacttatattacaatwctacacaataaacctttatcagaaggtttatattttcatatggttttgtgttgctatttatcatcctttttcttcaacttgaaggatccctttagcatttcttgtggggcagattgagtggtgatcaacttcctctccttttgtttatctgggaagtcttaatctctccttcattttagaaggacagttttacaaaatataatgttcttggtgggcaggttttgttcttcagtaattgaatatattatttcactcctttctagcctgcaaggttttgctgagaaaccagctgatagtttaatagaagctcccttatatgtgatgagtcattttttttttgccactttcaagatcctgtctttgtgacttttgacagttggattttgatgggtctcagtgtaggtctctctagattatctccaactggagttgtttgttattcaaattgtgtgtcctttctctcatcaaatttggagagttctcagccatcatttcttcagataagctctctactcatttctcttttccccttttgtgatttgcatcatgcgtatgttgttctgcttgttgtgccccataaatcccttaggctctcctcatttttcttcattctttgttgtttttttcttctctttctcaataatttcaaagccctatcgatgagtttactaattcttttttctgcctggtcaattctgctatcgaatccctccagtgaatttctccaattcgattattagatacttcagttccagaatttctgtttgattcttctttatacttttatttatttgttgatattcttattttgtttatatgtcagtttcctaattttgtttagttgcctatctatgttcttgtttaattctttaattattctggtgatgcttattttgagtttttggtaatttatatttctctatgtctgtaggggtgctttctggaggtttaaattattcctttgaatagtccacatttctttgtttcttcgtatgtcttactatatcttgttgagactttaacatttgaaagctcagctacctttctcagtctttgtggtctggttgcatacaaggaggacattctccaattagcccagttaaagaatccagagacctcctaatcctttcctgggaaggcatactcttctgggattgtgcatataatcatctagttgaagagatttatcagtttctattcaggagttccccttgatgtctgtctgtgatactgccatctctctgtttctgtagtaaactagggtattggagctccacataatgtctgtctgtggtctacagactctggtgccaggccaagccacattgatcacctttgttctcagcaggcccccaacctggcatcccattgctgtcagttcttagattcaggcaagacagaaaccaatcttttagataacaccctgaaaagttagaatgttggacattcaacttcttttcccccctaggataagtcaggaggtaggggtttcctctcagttacaatgcaccaagctgggagaagagtctctggtgaagaaatgccatgaattttcctactgggttttggtgaggttggctttgcacttgcctggggtgcagcaaccttttaactcatttctgaatttgtcataaaggcaattgttccataaattgttattcaaaccatgggggaaggagggtcttttttttctattctgccatcttgctgatggcactcctggaatattattttaatatgggagatattacatgtttgctaatgaggatgatccaatagggaaggaaaatttggtgatgcaaaagagaggaatagaactgcttcaggagcatagtctctgagtatgaaaaagagatagaatctagttcataaatggaagtattgaccttgattagatgcacagatatttcaacgattgtaacagaaagaaaggtggaatatatgggcacagatgcaggtaagtgattggatatggggcatcagtttgtgaagattctcttattgcttctacattttctttgaaggaagaagcaaggtcatcagttgaaagtgtgaagggtgaggaggtgttggcagtttgaggatggggagatggtatgacacagtcttcttagagagtgagtgattttactaggaaattatgcaagaattatttggctatattgagtactaatttgagatttttcatgatgagtttaaaatgatactagccagtgcagtttttaaaattttctccatcataagcgtccatcaatggatgagtggatgaaaaaagtgaggtatacatacacaatgtaatactactcagccataaaaagagtcagatcctgtcatttgcagcaacgtgaatgaacctggaggaatttatgttaaaggaaataagccaggcataggaagacaaatactgcattatctcactcatacgtggaatctaaaaaatttgatctcatagaagtgagtataatggtagttatcagaggctagggtgattgaggggagggaagatggagacatgttggtcagaggatacataattagagttagataggaggaatacatttcaagagatctatcatacagcaaaatgactatagttaatgatgatattgtattcttgaaaaacagagttgacgttacatactagcaccacaaaaataataactatgtgaagtaatccatttattaattggttaggtttagccattccaaaatgtatatatacttcaaaacatcatgtttacaagataacaaaacacagtatttgtcaattaaaaaaataaaacataaaagaaaaatttttckccagcaattttcagctgcttggctgcacaggaggtaggaacttgagtttaccatggttggggctttgtcagagaagtatggcacagagagaggggacaaggaagttaagaatgtttgcagggaattgattaaaatgatggaccatggaatatgggctctgtaaggagggaagtgaggacattaaggaggtaagtgaggacattaaaggaaacaagatgacagagagtgaaaaggagcttagggtcaatgaattggagctctttatggggttgaaggattatcggggtgaggagtgccagaataattgaactggaatggtaataagaggtggctagagtatggaatgttttaaatgaaaattttgagagtactgtcattaatgatgatgaagttgccaaggatgacagggaaaggataaagtggacaacagtaaactggtcttcattaaaaatggagagtgactcaagaggtacttgattagaataattaagaaagcatgatcttcaaagaagcttgggttttagaggaaggagggagaaaaagtggtccaaaaacaacattgagaagcgaggaggtaactatcctaacaggattactgcagccttgtcttgctctcctgatgatccattatccatcctgaaactagagtgctctttctaaactccaatctgattttactgccttgatttttaaaatccttttatagtgtcccactgtctatagatgatgaatacctgaatgtggcaggagaaaggagtgtaaatggagaggttatatggatttcagaaagatttaggaagtggaatcaacagaccttggtgattgattaaatgtgggttataaaagagatgaatcaaggtgagtttcaaatttcttttctgtattaaaaktttgataagatctaattaataagcatttgctgagtgttaattttattaactgagctaagaactgttagagaaccaaagatggaagattccctttctcaatgtaagatgtagagtccctgaaatgaataaaataagtaaataaatataagaagcataattagcttatgccagacacaaatgtaaattgagttgatacctatcaaatatttaatttcaaagaggaaatacattattcaaagaagctgccttgaataaatgaatttttagctatattttgaaggagaaggtggtcatttaatcagaaagtcctttaattaatttctcctgtgatttcaaggagaaaagttacaagtgaaaaggcaagaatggattccagtcagcaaaaggacagtaagcataccaacttaactaaaatgaggggatatattgaagcctactaaaaggcaagtctagccacacagtagtttattccactactacactgcttatataactagcaactcttaacctgaaaatggaatatagcatatagtcaggattactagctatctagtagagcaggagaagatcatttgtagatatgtggcctgtattggagttaccagtaaggcagctgcaccactgcttgatttaccattgatttattcaacaaacatttaatgaatacctaccaggattcaggcattgtcctaagtgcaaagcatgcagagaggaagaagacacattccctatcctcaagatactcacagtcttgtggcaatgataaacaagcataagacaagatgagaaattcttttaggaaatacatagggtgctgtaagaacaaagaggaaaggtacttaatccaacctggagagttatgaatgactgcctgctgagtcatgagtattgaatatgaactaggcaggggaagagggttgaggcagtgaagaagaatgtttcagttagagcaaactatatgtacaagagttaggctacagagaatatgtcatattggcctatatggactgctacatcaagtgcaaggaagggttgacaaaagatgctacagaggttagccggggccacattgtgcagacccttgtaggcaatcttgaggagattggtctttattgtaatgggaaactacttaagggattctaagctaaatttcattggaaagagtattctgactgatgtgtggagcttaaatggagacaggggttagttaggtttcaaatgctattaaggtggtagtattagctactcttgccaactcactagaagtgaaggagaggatgaaaaaaagagtttctgctacagattatctcagaggtcagcagacttttatctgtaaagggccagtgctatggactgaatgtgttttctccaaattcatatgttgaagcctaactcccaatgtgatggtacttgaagatggaacctttgagagctaattagattattagggtggagtcctcatgatggaattagtgccattataagagagagcacattctatctctatcatttgaggatatagcaacaaggtagccatctgcacagcaagaagagtgtcctcaccaggaatcaaatggcctggaaccctcatcttagacttcctagcttccagacagtgagaaataaatatctgttgtttaagctacccagtctattataattttgttatagcagcctgaactgactaacacagccagacagtaaatattttaggctttttttgggccatgtacaatctctgtcccatggttgtcttagttggctcaggctgctttaacaaaagaccatagcccaggtggcttaaacaacagacatttatttctcacagttctggaggctacaaaatccaacatcagggcaccagcatagtcaagttctggtgaggactctcttcctggcttgcagaaggctgccctctgccttcttgctgtatcttcacatggtggagagataaagggctccatctcctgtcccttgttataagagcactaataccatcatgaggaatctaccttcatggcctaattatctcccaaagtctccatctccagataccatcacattggggattagagctttaacatatggacttaggggagactcaattcagtctattacattccacccatagattccccaaattcatattcttctcacataaaatacataccttccatcccaacaaccccgtcttaactcattccagcatccactctaaagatgaaaattccaaagtctcaactaaatctcacctaaatttgatatgggtgagacttgaggtacaatttatcctgaggcaraatktcttctcctgtgaaaccagataagtatgtgcttccaaaataggaaggtgggacaggtacaatagagacagtcccattccaaaaagagagaaataaggscgggtgccaggtggctcatgtctgtaataccagcactttggaaggctaaggcaggcagatcacttgaggtcaggagttcaagaccagcctgaccaacacagcaaaaccttgtttctactaaaaatacaaaaattagctgggcatggtggcgggcacctatagtcccagctaccagggagacgaaggcaggagaatcgcttgaacccaggaggcagaggctgcagtaagccgagatcgcaccactgcactctagcctgaggaagaactagccctgccccttgggcctgtggtgggagtggcagccccgatgatctctaaattgcctttagcctcactcttccctttttttgaggaataaatagcacatgcacaactctttcaattttgtcccattttctctgttctttttggtcccagctggcagtttttctgctggtataatcccatctctgtttatggcttctgttgagatggctgactaggaccatggttcatgcacacacttatctccttatcaaatgtggatcagccacacccttagtattctctttcaaacatactttctcattctttgcaatatggataagctgagaattttctaaatcttttaagtcctggttcctttttgtttaacagttccttcttcaattcatttatctcttctcgcattttactgtaagcagtcagaaggaaccaactgctctctcatcactttgcagctaagttttttgccactttataaaaagtgtcacttttttttcctttgtccagtagcatgttcctcttttccatctgagacctcatcagaatggcctttaccattcatatttctaccagcattctgtttacaattatttatattctctaggaacatggaggctttccctctagctgtcctctttttttttctgacctcttaccagaaacaccattagcaatcccttcacagtaatctaggcttttttctagcatgtacctgaaaactctttcagcctctaccccattacccatttccaaagctgcttccacaattttaggtatttgttacagcagtaccctacttctcagtaccaatatctatattagtcagtgttctccagagaaacagaacagaaccaatagggggatatatatgtgtgtgtgtgtgtgtgtgtgcgtgcgcacgtgtgtgtgcatgtgtatgtgtgtgtgtaaaggaatcagctcacacaattatggaaactaaaaagtaccagtcttccatccataagcttgagacccaggaaacctggtgatatgattccagtttagtctgaaggcctaagaaccaggagaacctttctaagttctagtcgaagttcaaaggcctaaaatggaaggctgatatgtaagtttcagtccaagaacaggaaaagaccaatatcccagttcaagcaggcagatagaattattcccgcattgcagaaggcaatgtactctactcagtctattgatttaaatgctaatttcctccagaaacactctcacagaattaatgtttagccacttatctgggcaccccatggtccagtcaaattgacatatagagttaaccattacagtgattttctttgttttgtttttgttttattacactttaaaagtgtaaaaaccattttttatcttgcaagccaaacaaaataggtcacatactatatttgacccacaagctgtagtttgttgaactgtgcatcatctcactgcaatgaccaaactgaataagggttagtggtactcaaacacttttgtcactctagggaaagggttctcaatatttttaggttatagaccccatagaaattctacacacacacacacacacacacacacacacacacacacacacacaccgaattttgcatattattccacacaccctaggacaagaactccaactgtagggcaccaccaaatgaatagccctatttcagagtatcagcagttgtatcagacagtctttcaattaagttcagtatctatacattttcaagcatccagttggggtataccttgaaagcacttgtataaggcatgcctgctgtcacagacaaaatgactcagtaaagaccaagtgttggcttataatgaggaaataatataggtacatggaggtgatgccccaatagtccattctgcttctctcctgtaaagctcaagactattagaagggaaagacattttctgcaggacgtaagttgccttctatctgcatgtttgacttaggcaataggattttctgtaatattctcagagggtttctgatgcctgctttttttctgtgtgtaggtaacccttctgtttctatacatatctcatgatcttttcttgttgttgaaaatctggacattttagataatattttatggaaactgagttctcatgtccccagaggaattgttgcatatttttgtgtatttgtttgtattttgtgtatttgtttgttttgtgtatttttttgttgtctggggtaattctgtggagtctttgtgccctgcagtgtgtagccactgatgtctctgctcaggttttatttttacttcttgtttttatttttaactgtggtttcctaagcattgcactggggtcaccatagcccagaggctctcaattggggtctattttgccccccagaggacctttggcattgtctggagacattttttgtcgtcacaactggagaggaagatgctgctgacacctgtccctatgacaaaaggactatctggcccagatgtccataggcctagttgaggcatcaggttgggaattcctgatatagtttagaggccagccaagtattgatcagaggttatgcttaaaaaacttaatgtaataaggcttccaccctttgccagaggatctgtgtgttgtttgaggcatacacttgaagtttgagctatttacaagtgatatggtttggatgtttgtctcctccaaatctcatgttgaaatgtgatctgcaatgttagaaatggggcctgatgggaggtatttgggtcatgagggcaaatccctcatgaatggcttggtgcctgcccctcagtaatgaattcagacaagatccagttgtttaaaagagcctggcacttcttcactctctcttgctctctctctcactatgtgtcatgttagctccccttcaccttctgccatgattataagcttcctgaggccctcaccagaagcagatgccagcactatgctttctgtacaacctgcagaaccatgagccaaataaatctcttttctttacaagttacctagccccaggtatttctctataatgatgcaaacagactaaccatagaagtttgtcctggtttttactttctgtcattctcatgtctcctacaaaaagcctcattttcatccagagacatgtaaataactggagccatttccagtctctcttcagtgtgcatacagcactgcatgcatgtgcaaccttccaaatactagggatgtgtgggagcttttcaaggcccattatagctttctcactccctatatagcctggttagatttctgcctgttcttctggtctgttgtttgctccaaccagtatggcttccctaattgtttttgataacacccagatgcatgggggttttatgcatgctctgctccaaatcaagttagtcatatttgacagcaaagctgccggttttcttggtttagcccaccttcgtggaactactgctgattggagctagaggtggaggaataggagtgggagcaccccatgctaaaatacaccacagattcccactgtttttacccaaggttcagtagtttttttgtaaataaatgcttcctttttaaaagaaattgcattgtgtatgtttaaagtatatgacatgatattatgagatacatatagacagtaaaatggttactatagtgaagcaaattaacatatcaatcatctcacatagttacccatttttttgtggcaagaacagctaccattgactcatttagcaaaaatccaaaacataatgcactattataaactatagtcttcatgttgttatataacagacatctagatctgatcattctacatatctgctactttgtgtccttagccatacatctcccatttcctccctcatgcccctacccttggccctggtaaccactgttttattctctctgtatatttatttgactttttttttaagattccggatacaaatgagatcatgcaaattttttttctgtatctggtttatttcacttagcataatgtcctccaggttcatccatattatggcaaatggcaagatctcctttttaaaaggctgaataatattccattgtctatatataccacagttttttatacattcgtccatcaacagacatttaggttctttccatatcttggctttcatgaataatgctgcaatgaacatggaagtgcaggtatctttatgaggtagtactttcatttcctttgggcatatactcagaaggtaaaagaatgaaattggacctttgtcatcctacacacaaatcagctcaaaatggataaaagacttaaacaagaataagacctgaaaccataaaactcctagaagaaaacaggtggtaaagctccttgacattggccttggcaatgatttttttggatatcacaccaactgcttaggatacaaaaaccaaaataaataaatgagacaacatcaaactaaccaggttatgcacagcaaaggaaacagtcaacaaaatgaaaagatatcctagagattaggaaaaatatttgcaaactgtatttgtgataaggggttcatatccaaaatttataaagaattcatacaactcaatagcaacaaaacatataacccaattaaaaaatggtcaatggatctgaatagacatttccccaaagaagacatacaaatgaccaacacgtatatgaaaagatgctcaacatcactaattataagagaaatacaaatcaaaactactctgatataccacctgacacccattagaatacctattatcaaaaagacaagagataacaagtgttggcaagggtgtggagaaaaaggaactcttgtacactgttggtgggaatgtagattggtgtaccaattatggaaaacagtatgaaggttactaaagaaattaaaaatataataaatacttctcaatttgctgtatacctttggacaatttccagagtcttaaaatggttcttttttagtttggccagttttatcaatacttttgggggagaaaatttgccaagctcctctctgtgtttttctaaaagaagtatcacctccagattcccaaggctgtactttgagacacattagtgtactaggctgtggggttgcatgacttgggttcatgtcttagctctaccacctaatgattatattcttacaaagttacttagcatctctgagctttagttagttgtccttaaaatgagaatgataataccaatgaaagtgaatgtgagaggtacaggtatagcagtttttaaaaactattgcttaatatcttaaaatgtggataaaccacagtttattcagcgattcttccacttccccactgatagacatttagtcttttttctaattatttttactattataaccatcactattatgaataaccttatatgcagctccacatgtgtgacactttctatacgataaatactgagaggtgcactactatttgtccaaaggaaaagaagtcattrtatcaaaaagacacctgtttgtgtatgttcatcacagcacaatttacaatggcaaagatatggaaccaatctcagtacccatcaaccaataagtggataaagaaaatgtatatatacaccatggaatactactcagccataaaaaagaatgaaataatgtattttgcagcaacttggatggagctgaaggccattattctaagtgaagtaactcaggaatgaaaaaccaaatactgtatgttcttacttacaagtgggagctaagctatgttatgcaaaggcatacagagtggtataatggacattggagactcagaaggggagagggaaggagggggataaagaataaaaaactacatatcagtttcagtgtacactactcgggtgatgggtgcactgaaatctctgacttcaccaatatacaattcatccatgtaaccaaaaaccacttgagccccagaagctactgacataaaatattaaaagataaaataaataaataaagtacaagagaaaaaaataaatactgagaggtgaatatctaggtcaaatatgcacattttaaattattttcatagaaacttgctgattgccatctagtataactttaacaatatatactcctactaccaatgtttgcaagtatgcatttttccccacatcctttaaaacacattttaatcagcctttaaaatttttattgctctgatgggtataaaatggtatcacattttggtttaaatacccatttctttgattattaccaaggctgggggcagttcatacgtttgcccgtcacttctggtgactttccttattgatatccttcacctatttttctgttgggtttttatctttaatgatcacagaggtttattctgtatgctggatattaatccttttatgctacaaatatttttcctgttacttctcttttaactttgcttttatattgtttgcagaacagaaggtatttattttaatatagattaatttatctctgtgccttttgtgtcatattaaaacagcctttcctacctcaaggttgtcaacatttaatgttttacagttttaattttttgtactttaatccatcagaaatttattttttttgaattatatgaaggcataacttatttttttcttttcttttgtaaattgggtcacacactttatttaccttttctaaatgagtaacctgatgtatagaaagtctttgttttttttgtaatttttttattttgctataacttcaaattaacagaaggttagttgctaaaatagtacaaggacctcctgtattagcctgttctcacactgccataaagaactcccagagaatggttaatttatgaagaaaagaagtttaattgactcacagttccataggctgtacaggaagcatggctaggaggcctcaggaaacttacaatcttggtagaaggtaaagggcaagcaagcatgtcttaccatggtggagaaggagagagagacagcaaagggggaagtgctacacacttttaaacaaccagatctcatgagaactcactatcattagagcagcaaggggggaatttgcccccatgatccaatcacctcccaccaggtccctcccccaacattggggattacaattcaacatgagatttgggtggggacacagagacaaaccatatcattccatcattccactcctagcccctcccaaatctcatgtcttttcacatttcaaaaccaatcacgccttccaacggtctcctaaagtcttaactcactccagcactaactcagaagttcaagtccaaagtctcatctgagacaaggcaagtctcttccacctatgagcttgtaaaatcaaaaacaagtttgttacttccaagatacaatgggggtacaggcattcggtaaatgctcccattccaaatgggagaaattggccaaagccaaggggctacaggccccatgcaagttcaaaacccaacagggcagtcgttaaatcttaaagctccaaaataatctcctttgattccatgtctcacatccagggtatgctgattcaaggggtgggttcccacggccttgggcagctctgcccctgtggctttgcaggatacagccctgggggtgctttcacaggctggcattgagtggctgtggcttttccaggtgcacagtgcaagttgttggtggatctaccattctggggtctggaggatggtggccctcttctcatagttccactaggcagtgccctagtggggactctgtgtggggcttccaaccccacatttctcctccacactgccctagtagaggttcttcatgagggctctgcccctgcaatagacttctgcctggatatccaggcatttccagccatcctgtgaaatctaggcggaggttcccaagcctcaactcctgccttctgggcacccataggcccaacaacacatggaagccaccacttggggcctgcatcctctgaagcaatggcccaagctgttctttggtcccttttagccatggctagagctggagctgctgagacacagagccaaaggacatgggggccatgtcccaaggctgcacagagcagtagggccctgggcctggcccacaaaactcttttttccctcttggcctcagggcctgtaatgggatgggctcctgcaaaggtctctgacatgccctggagacatttcccccccattgtcttggatattaacatttggcttctctttgcttatggaaatttctgcagccttgaattcctcccagaaaatggtttgttttccaccacatggtttcactgcacattttacaacctttcatactgtttcccttttaaatataagttccaatttcataccatctctttgcaaatgcatatgagcatacactgttagaagcagccaggccacatcttgaacactttgctacttagacatttcttctgccagataccctaaatcatctctctgaagttgaaagttccataaatccctagagcaggggcacaatgctgccagtctctgataaagcatagcaagagtgaccattactccagttcccaataagttcctcatctctatctgagaccacctcagtatggacttcacagtttkcatcgctatcagcattttggtcaaaactattcaagaagtctctaggaagttcctaaatttccctcgcctttctgtcttcttctgagccctccatactgttccaatccctgcctgttacccagttccaaagttgcttcgacattttcaggtatctttatagcaatgccccacttctctggtaacaattttctgtgtttgtttgttctcacatggctataaagaacaacctgaaactgggtactttatgaagaaaagaggtttaattgactcacagttctgcaggctgtacagtaagcatggctgggaggcctcaggaaacttacaatcatggtggaaggtgaggggaagcaagcacaccttaccatggcaaagcaggagaaagtgaaggcagaagtgtacacactttaaagcaaccagatctcgtgagagctccgtcacattcaggagaacagcaagggggaaatttgcccccatgatccaatcacctcccaccaggtccctcccccaacactggggattacaattcaacatgagatttgggtggggacacagagccaaaccatatcacctcatatatatatcctctacgcacctatgcttccttcttttgatccttgaatggtttcattttctaaatttagtactcctatatattttgagtttatcttgataaccttgtgacaacatgacatacagacacaaatttatcttttcccaagttctatcagttgtcccaacaccatttatttaaaaaattcattttttcctcaatgacttttgctgtcactttattacataccagatttccatatgcatttgggtatatttctgggctttttatactcttccatcattttatctatttaaatacaacattacaccattttaattatagaagttctacagtatattttaatatctggtaaggggcaagtccctcccctcaacccttattgcttattggtagaagacttttagaaggaagttttctggatgctgattttttaaagttatctcaataaatagttctgataaatgtgatcttttccctagagctgaaatatgctaataccgtgatgcgctttgattacgtctggcttcgagaccactgccgctcagcatcgtgctacaactctaagactcaccagcgcagcctggatactgccagtgtggatttatgtatcaagccaaagaccattcgtctggatgagaccacactctttttcacttgtgagtggacaggagacttgatcttctttgggggtactcttctgaaggacagttattttgtggaaaatggtttgttcctttcaaaaataggttattacttacttttctttttttcttgttttggaaggattttttgaaacattttatttttctcttcaaataaaattgttacaatccacagctaacattatacttaatagtgagacttaatgcyttccctctaagacagggaacatggcaaggatgcccattcttaccactattatttaacatccactctcaccactcttatttatcatagtactgaaaattctattatagtaagtcaagaaaaattaataaaattcatacataaaactctttatttgcagatacatgacatcctaacatagactacctcaagtaatctataataaaaccgtgaaaactaataaatgagttcagtaaggtcagaggacacaagatcaacacacaaaaatcaatcatatttctatatacttaaacatgcagaaactgaaatgaaaaatgaccatttcaaaaatagcttcaaataaatttaaatatttaggtataatctaacaaaatatgtataggatctgtatgataaaaattattaaatgctgatgaaagaaatcaaagaagacataaatacatggagaaacaaatcatgttcatggattggaagactcaacatagtaatgatgtcagttttctccaaattgatctatagttttaatgcaattcctgtcaaaatataagcaagattttttttataattataaacaagcttgctctaaaatttaaatggaaatatacaggccctaggagagscaaaacaattttgaaaatgaagaattaagtgggaagaaatcacttccagactgcagtaatcaagacaatgtggtattggtggagggacagatacatagatcaatggaatagaatagagaacccagaaatagatccacagaaatatagtcaacttatctttggcaaaagtgcaaaagtcattcaatagaggaaggataatcttttcagtaattggtaccagagcaattggacatccataatgaaaaaataaaagaacctcaactcaagtctcacaccttatataaaaaaaaaatcatagtagattgtggacttaaacgtaaaacataaaactataaaacttcaagaaaagaacatatgagaacatcttaaggtcctgactggcgctaggactaaataactcttaaaactcagcagaaaaacaagcaatacaatttaaaaatggataaaagatatgctcagacattttcctgaataggatatacagatggcgaataaacacatgaaaagatgttcaacattattagctgttacagaaatgaaagttagtatcacaatgagattgcactacatacctatcagaatgactacattaaaaaacagtgactacaccaaatactagagaagatgcagagaaattctatcactcatacattgcttatgggaatgtaaaatggtacactctggaaaacagtttggtaatttcttaaaaaaaaaaaactaaacatgcaacccagaaatcacacttctgggcatttatcccgaagaaatgaaaacttatgttcacataaaaccctgtacattaatgttcacatcagccttatttgtaatagccaagaattggaaactacccaatgggttaatggttaaacaaaccatccatacaataaaatcctactcagcaactttattggaactagttcgatacataacttggaagaacctcaattacattatgctgaagtgaaaaagccaatctgcatgatttcatgtttgtaacagtcatgaaataacataattatagaggtagagaacagattattggtgtccaggagttagggattcgggggtaggaggtggcggatgtagctgtaaaagggtaacacgaaggagtcatatggttgagtatcttgattttggtggtggttacacaaagttacacatgtaattacactgcatagagctatgcacacaaatgaatatatgtttaactggttaaatctgaataagcccaatggattgtaccaataccactttcttggtttgggtattgtagtgtggttatataacaagttaacatcaaggaaggggaagagctcatgggactttcctacacatttcttttcaacatcctgtgaatctattatctccaaataaaaaagttaaaagaaaaagcattggaggaaaaaacatgcttatgatgcatacattgactactaatttctctacaatagaaaaaaaatgccatagaaaggtttatttaaaaacaggcaaaatattagcaaaatgtatgccgaagactaaatatccttaatatgtaaggtgcttttgctaaattgtaagaaaagtacaattgttggggggaggagccaagatggccgaataggaacagctccggtgtacagctcccagcgtgagcgacgcagaagacgggtgatttctgcatttccatctgaggtaccgggttcatctcactagggagtgccagacagtgggcgcaggccagtgtgtgtgcgcaccgtgcgcgagccgaagcagggcgaggcattgcctcacctgggaagcgcaaggggtcagggagttccctttccgagtcaaagaaaggggtgacggacgcacctggaaaatcgggtcactcccacccgaatattgcgcttttcagaccggcttaagaaacggcgcaccacgagactatatcccacacctggctcagagggtcctacgcccacggaatctcgctgattgctagcacagcagtctgagatcaaactgcaaggcggcaaccaggctgggggaggggcgcccgccattgcccaggcttgcttaggtaaacaaagcagccgggaagctcgaactgggtggagcccaccacagctcaaggaggcctgcctgcctctgtaggctccacctctgggggcagggcacagacaaacaaaaagacagcagtaacctctgcagacttaagtgtccctgtctgacagctttgaagagagcagtggttctcccagcacgcagctggagatctgagaacgggcagactgcctcctcaagtgggtccctgacccctgacccccgagcagcctaactgggaggcaccccccagcaggggcacactgacacctcacacggcagggtattccaacagacctgcagctgagggtcctgtctgttagaaggaaaactaacaaccagaaaggacatctacaccgaaaacccatctgtacatcaccatcatcaaagaccaaaagtagataaaaccacaaagatggggaaaaaacagaacagaaaaactggaaactctaaaacgcagagcgcctctcctcctccaaaggaacgcagttcctcaccagcaacagaacaaagctggatggagaatgattttgacgagctgagagaagaaggcttcagacgatcaaattactctgagctacgggaggacattcaaaccaaaggcaaagaagttgaaaactttgaaaaaaatttagaagaatgtataactagaataaccaatacagagaagtgcttaaaggagctgatggagctgaaaaccaaggctcgagaactacgtgaagaatgcagaagcctcaggagccgatgcgatcaactggaagaaagggtatcagcaatggaagatgaaatgaatgaaatgaagcgagaagggaagtttagagaaaaaagaataaaaagaaatgagcaaagcctccaagaaatatgggactatgtgaaaagaccaaatctacgtctgattggtgtacctgaaagtgatgtggagaatggaaccaagttggaaaacactctgcaggatattatccaggagaacttccccaatctagcaaggcaggccaacgttcagattcaggaaatacagagaacgccacaaagatactcctcgagaagagcaactccaagacacataattgtcagattcaccaaagttgaaatgaaggaaaaaatgttaagggcagccagagagaaaggtcgggttaccctcaaaggaaagcccatcagactaacagcggatctgtcggcagaaaccctacaagccagaagagagtgggggccaatattcaacattcttaaagaaaagaattttcaacccagaatttcatatccagccaaactaagcttcataagtgaaggagaaataaaatactttatagacaagcaaatgctgagagattttgtcaccaccaggcctgccctaaaagagctcctgaaggaagtgctcaacatggaaaggaacaaccggtaccagccgctgcaaaatcatgccaaaatgtaaagaccatcgagactaggaagaaactgcatcaactaatgagcaaaatcaccagctaacatcataatgacaggatcaaattcacacataacaatattaactttaaatataaatggactaaattctgcaattaaaagacacagactggcaagttggataaagagtcaagacccatcagtgtgctgtattcaggaaacccatctcacgtgcagagacacacataggctcaaaataaaaggatggaggaagatctaccaagccaatggaaaacaaaaaaaggcaggggttgcaatcctagtctctgataaaacagactttaaaccaacaaagatcaaaagagacaaagaaggccattacataatggtaaagggatcaattcaacaagaggagctaactattctacatatttatgcacccaatacaggagcacccagattcataaagcaagtcctcagtgacctacaaagagacttagactcccacacattaataatgggagactttaacaccccactgtcaacattagacagatcaacgagacagaaagtcaacaaggatacccaggaattgaactcagctctgcaccaagcagacctaatagacatctacagaactctccaccccaaatcaacagaatatacatttttttcagcaccacaccacacctattccaaaattgaccacatagttggaagtaaagctctcctcagcaaatgtaaaagaacagaaattataacaaactatctctcagaccacagtgcaatcaaactagaacgcaggattaagaatctcactcaaagccgctcaactacatggaaactgaacaacctgctcctgaatgactactgggtacataacgaaatgaaggcagaaataaagatgttctttgaaaccaacgagaacaaagacatcacataccagaatctctgggacgcattcaaagcagtgtgtagagggaaatttattgcactaaatgcctacaagagaaagcaggaaagatccaaaattgacaccctaacatcacaattaaaagaactagaaaagcaagagcaaacacattcaaaagctagcagaaggcaagaaataactaaaatcagagcagaactcaaggaaatagagacacaaaaaacccttcaaaaaatcaatgaatccaggagctggttttttgaaaggatcaacaaaattgatagaccgctagcaagactaataaagaaaaaaagagagaagaatcaaatagacacaataaaaaatgataaaggggatatcaccaccaatcccacagaaatacaaactaccatcagagaatactacaaacacctctacgcaaataaactagaaaatctagaagaaatggatacattcctcgacacatacactctcccaagactaaaccaggaagaagttgaatctctgaatagaccaataacaggctctgaaattgtggcaataatcaatagcttaccaaccgaaaagagtccaggaccagatggattcacagccgaattctaccagaggtacaaggaggaactggtaccattccttctgaaactattccaatcaatagaaaaagagggagtcctccctaactcattttatgaagccagcatcatcctgataccaaagccgggcagagacacaaccaaaaaagagaattttagaccaatatccttgatgaacattgatgcaaaaatcctcaataaaatactggcaaaccgaatccagcagcacatcaaaaagcttttccaccatgagcaagtgggcttcatccctgggatgcaaggctggttcaatatacacaaatcaataaatgtaatccagcatataaacagagccaaagacaaaaaccacatgattatctcaatagatgcagaaaaagcctttgacaaaattcaacaacccttcatgctaaaaactctcaataaattaggtattgatgggacgtatttcaaaataataagagctatctatgacaaacccacagccaatatcatactgaatgggcaaaaactggaagcattccctttgaaaactggcacaagacagggatgccctctctcaccgctcctattcaacatagtgttggaagttctggccagggcaatcaggcaggagaaggaaataaagggtattcaattaggaaaagaggaagtcaaattgtccctgtttgcagacgacatgattgtttatctagaaaaccccatcgtctcagcccaaaatctccttaagctgataagcaacttcagcaaagtctcaggatacaaaatcaatgtacaaaaatcacaagcattcttatacaccaacaacagacaaacagagagccaaatcatgggtgaactcccattcacaattgcttcaaagagaataaaatacctaggaatccaacttacaagggatgtgaaggacctcttcaaggagaactacaaaccaccgctcaaggaaataaaagaggacacaaacaaatggaagaacattccatgctcatgggtaggaagaatcaatatcgtgaaaatggccatactgcccaaggtaatttacagattcaatgccatccccatcaagctaccaatgactttcttcacagaattggaaaaaactactttaaagttcatatggaaccaaaaaagagcccgcattgccaagtcaatcctaagccaaaagaacaaagctggaggcatcacactacctgacttcaaactatactacaaggctacagtaaccaaaacagcatggtactggtaccaaaacagagatatagatcaatggaacagaacagagccctcagaaataatgccgcatatctacaactatctgatctttgacaaacctgagaaaaacaagcaatggggaaaggattccctatttaataaatggtgctgggaaaactggctagccatatgtagaaagctgaaactggatcccttccttacaccttatacaaaaatcaattcaagatggattaaagatttaaatgttagacctaaaaccataaaaaccctagaagaaaacctaggcattaccattcaggacataggcatgggcaaggacttcatgtccaaaacaccaaaagcaatggcaaccaaagccaaaattgacaaatgggatctaattcaactaaagagcttctgcacagcaaaagaaactaccatcagagtgaacaggcaacctacaacatgggagaaaattttcgcaacctactcatctgacaaagggctaatatccagaatctacaatgaactccaacaaatttacaagaaaaaaacaaacaaccccatcaaaaagtgggcaaaggacatgaacagacacttctcaaaagaagacatttatgcagccaaaaaacacatgaagaaatgctcatcatcactggccatcagagaaatgcaaatcaaaaccactatgagatatcatctcacaccagttagaatggcaatcattaaaaagtcaggaaacaacaggtgctggagaggatgtggagaaataggaacacttttacactgttggtgggactgtaaactagttcaaccattgtggaagtcagtgtggcgattcctcagggatctagaactagaaataccatttgacccagccatcccattactgggtatatacccaaagggctataaatcatgctgctataaagacacatgcacacgtatgtttattgcggcactattcacaatagcaaagacttggaaccaacccaaatgtccaacaatgatagactggattaagaaaatgtggcacatatacaccatggaatactatgcagccataaaaaatgatgagttcatatcctttgtagggacatggatgaaattggaaaccatcattctcagtaaactatcgcaagaacaaaaaaccaaacaccgcatattctcactcataggtgggaattgaacaatgagatcacatggacacaggaaggggaatatcacactctggggactgtggtggggtcgggggaggggggagggatagcattgggagatatacctaatgctagatgacacattagtgggtgcagcgcaccagcatggcacatgtatacataggtaactaacctgcacaatgtgcacatgtaccctaaaacttagagtataataaaaaaaaaaaaaaaagaagaaaagtacaattgttccaatagaaaaatgtgagaaaggactgaacagacaaatcattaaagcaggagtcagcaaacattttctataaagagccagatggtaaatattttcaaactttgtgggctatatgagtgaatggagctatagacaatatgtaacaacatggacagcatgtgttctgaaacaggcattacaaaaccaagcaccagatttgactcataaaccatagtttggtagtccctgcattaaagaaacatagatgtctaacaaatatagaaagtattcttattagccttagtaagcaaataagttaaaattattacaagatagcagttccactttagttaccaaattagaaaaaaatatattttaaaaataagaatactccattttgatggacacatatgtactgttggagggaatgaagataagtagactttctaaaaagtaatttgattatgtatatcagaactcttaaaagtttatatctttgaaatttctaaatacaaagatacgaacttttaagaaatgtaatatacattctatttctaaattatagaaatatggttaaagatgatcactaataaataataggaaatttttttaaaataaatgtacatacccagaataacagatgggttaggtaaatcttggtaatgtatattttgtaagctttaaaaattaattttaatgaaggttgaatttttaaaatgataaaatttaattttaaaaattgttaaaatgttaagtgacaatggcagagtcccaaattttatatatataaattacataaactatatttatatacataaattacataaaataagagaatgtacagaaaaactggaaggaatgatgccaggctgtcaatcatagtttcatctgggtgatagaatgataaacatggtgacttttaatttcctcatacttttttatgctttccaaattatccaaagtgtgatacttttttaccaaggggagggaggaaaagagagagaagtaaaaaggagagacaagttgtcaacatagtctttcactccttctgctgcttcctttgcttatcctgaagattttctaaagcatttcagggttggttttcaactttttttgggtggggtgtgcacagcaggtgaagccacttacaaagtaattttattgtattgtgttgatgtcatataattagacagcaatgtcctacatcatgtagaagaggaaggcagcattgaatagtactgaacttgtagcagcaagaaggtggggttctagttccacctatagtacttagttgtgtgatcttgagtgagtcactgactttttctccatctgtaaaataaagattagccccttctagctcaaacattctgagttcctatatagatggaagacagggatgggggcaaggggagagagtgccaagtaggcttgtaaaagcctacttggattatcattctttgatgacttgatgaattttccagaagatcttttactatataactataattctgtaaacttatttagcctctgggaagatttatttgttcattcatttattcatgcataccactcaaaccacacatatttctttctcagaaacattctaggcattcattttaatttggtttcataaacaatacagtactggataactgattgctaggaaaaagattcttaactagttgtaaccaattacaaatattgacattatttgtaattattatagtgccttttatttttccccttaaaagggccagatggtcatgtgactaaatatgatttgaattggctggtgaaaaacagctatgaagggcagaaacaaaaagtcatccagcctagaatactatggaatgctgaaatctaccagcaagcccaagttccatcggtagattgccagagcttcttagaaaccaacgagggactgaagaagtttctgcaaaactttctgctctatggaattgcattcgtagaaaatgtccctcccactcaagagcacacagagaagttggcagaaaggatcagcttaatcaggtaattcatttgtttcctaaaatccacagtattataattaatttccagagcatgaacaccaataaataaatgtaacaggtatggtcaccctcgttttcaatccagaatattttgtagcatgaataagggactctcacttgcagtactttatttgaggtctggatttctaatctctaaatacacttatgtgtaaaatataatgatgactgcagagtcattggtaatatgtttctagcccagtgatcccaagtgacaggtattattgtacactggaaaaaaacactgactgtaaggagaactggatagtagtctgagttctaccatcaagtagttgtgtgaccataggcatgtccattacacacacacacacacacacacaccccctcgacccccactgtcctctattttcccatctgttcaatttgaccttctgtgattcctgtggcttgattcagagactgattgttaataacactgccttaaaaggctatatagcattcagccagcacattcccacccattattttcttttaattattataggaaccctgatcagtgtgtgttttgtccccgttttactgctgaggcactgacactcaaatataccaagtgtcttgcccaggagtgctctactagtaaacaatagaacttgaattcaaatagcccaggtttcctaatcctaaatacattgtttttttcattaccattacgcacttttgggtggtatatagattgatcttctatagtattaagtgtgatgtcaacctactttattataattagtactttccttttacttaataagatccagatatagctcattttgtagtagatagtatgctgggtcttcttccctgtgctggtagagcataatcaacagcatctgtgagccattcagtttgaatcacagtttgagaactttcaagtgaaagaaactgtgctggtaagtgataaattgagacagttttagggatgatagttcaaaaggaagagcatttcctatttgaacttcaagggttcagaaaataagatgaactttgaaagctaaagaattaaagtgacctttagtcagatttgagccgaacaggaaaataattacaaaatcaaaatatatgatgtatacttcaaggagagacacaacaacaatggtacagcaagtctcactaaatacttgctaacacaaactatccttttctcttttctttattcctccatgtccaaaagatgagtgaggatctacattaatcacttctgtgtcttataaataatatgagaactcttcagtcatccttgcaaattggattatccaaaatattaggaaatgaccaccattattgaaaaaatggtactaataaaagacaacagctataaaaatagtaaataaagttagacttggaaccaacccaaatgtccaacaatgatagactggattaagaaaatgtggcacatatacaccatggaatactatgcagccataaaaaatgatgagttcatgtcctttgtagggacatggatgaaattggaaatcctcattctcagtaaactatcgcaaggacaaaaaaccaaacaccgcatattctcactcataggtgggaattgaacaatgagaacacatggacacaggaaggggaacatcacactctggggactgttgtggggtggggggaaggggggagggatagcattgggagatatacctaatgctagatgaggagttagtgggtgcagcgcaccagcatggcacatgtatacatatgtaacaaacctgcacattgtgcacatgtaccctaaaacttaaagtataataataattaataaaataaaataaaaaaatcacttccagaagcagctatatctttttctgtgaaagaaaggtgagcatagaaaagaaccttgaatttatgaaggctatgaaaactgggcacataatcagagtgggatgattctccaagctttcataatacaatattatacttccacagttttctcyccaactttctagaatgttaataagtgacagaattgtcaagactagcatgttcaactgtcattttcaccttatggattaaattctggaaccaaaaawatctactgttatttgtgagtaactaaagaaggtattggaaggagttttgaaagacaagaatgaacatttcaaatagctaacaggtctttctttatttcaactaacagagaaaccatttatgggaggatgtggtatttcacttcagacttctccagaggtgacactgcgtacaccaagctagctctggatcggcacactgacactacctattttcaagagccctgtgggtaggtggattagacttttacagtgtaaagtctttatatgtgatagtcttgagtggtttcttaattattttccattctgttcgaaccaagatcatatctgctcctgcagatttgtatgactttctcttcccctagaaacatgatcattttgaaataccttaactcagtttttagattctgtattaggccattcttgcattgctataaataaatacctgagactgggtaatttataaaaaaaaaaaagagagatttaattgtctcatggttctgcaggctatacagaaagcatagcagcatcttcttctggggaggcctcagggagcttccaatcatggtggaaggtgagcggggagcaaacagttcacatggcaaaaacaggagcaagtgagagagagtcagggaggaggtgccacacacttttaaacagctagctgtcacaggaactcactcactatctgaagacagcaccaagccatcagttatccacctccatgagctaaacacttccaccaggccctacctccagcactggagattacaattcaacatgagattttggtggggataaatatccaaactatatcagactcctaggaataaaatatttttaagttctcaaaagaagacatttatgcagccaaaaaacacatgagaaaatgctcatcattactggccatcagagaaatgcaaatcaaaaccacaatgagataccatctcacaccagttagaatggcaatcattaaaaagtcaggaaacaacaggtgctggagaggatgtggagaaataggaacacttttacactgttggtgggactgtaaactagttcaaccattgtggaagtcagtgtggcgattcctcagggatctagaactagaaataccatttgacccagccatcccatcannnnnnnnnnnnnnnnnnnnnnnnnnnnnnnnnnnnnnnnnnnnnnnnnnnnnnnnnnnnnnnnnnnnnnnnnnnnnnnnnnnnnnnnnnnnnnnnnnnnnnnnnnnnnnnnnnnnnnnnnnnnnnnnnnnnnnnnnnnnnnnnnnnnnnnnnnnnnnnnnnnnnnnnnnnnnnnnnnnnnnnnnnnnnnnnnnnnnnnnnnnnnnnnnnnnnnnnnnnnnnnnnnnnnnnnnnnnnnnnnnnnnnnnnnnnnnnnnnnnnnnnnnnnnnnnnnnnnnnnnnnnnnnnnnnnnnnnnnnnnnnnnnnnnnnnnnnnnnnnnnnnnnnnnnnnnnnnnnnnnnnnnnnnnnnnnnnnnnnnnnnnnnnnnnnnnnnnnnnnnnnnnnnnnnnnnnnnnnnnnnnnnnnnnnnnnnnnnnnnnnnnnnnnnnnnnnnnnnnnnnnnnnnnnnnnnnnnnnnnnnnnnnnnnnnnnnnnnnnnnnnnnnnnnnnnnnnnnnnnnnnnnnnnnnnnnnnnnnnnnnnnnnnnnnnnnnnnnnnnnnnnnnnnnnnnnnnnnnnnnnnnnnnnnnnnnnnnnnnnnnnnnnnnnnnnnnnnnnnnnnnnnnnnnnnnnnnnnnnnnnnnnnnnnnnnnnnnnnnnnnnnnnnnnnnnnnnnnnnnnnnnnnnnnnnnnnnnnnnnnnnnnnnnnnnnnnnnnnnnnnnnnnnnnnnnnnnnnnnnnnnnnnnnnnnnnnnnnnnnnnnnnnnnnnnnnnnnnnnnnnnnnnnnnnnnnnnnnnnnnnnnnnnnnnnnnnnnnnnnnnnnnnnnnnnnnnnnnnnnnnnnnnnnnnnnnnnnnnnnnnnnnnnnnnnnnnnnnnnnnnnnnnnnnnnnnnnnnnnnnnnnnnnnnnntagttttcccaacccacccctcaccgcaattaaagttactctctctaacgtcaccagcaactaattgtcatatccagtgtgtactgtcatcttacttgatccctgagacataccattaaccactactaaatttcttaaatattccttctttcctagttttcttcctatatatctgaccatttttcctcagcctcctttgctggcttcttttgtctatttcctaaatattattcttcctcaaggttttctccttatccctcttttcttacttgaaatgatctctccaaacgacctcttccatgctcttggctttagctatcacttgtaacaaaatccacctctcttccttaaacatctttaactggtaactaaataaccctgacctagaagtttcacagaaatttcaatatggccaggcttacctttctctttttaattgtatttatattatattagattgtccttgattttactccatatttttgtttatttcttattttaatttgctttttactttttcttagttttgcatatttgattaaattactattaattttattttccctcataagtttgaaaattctaccttagttttccagtcaattaatagtcaccttacctttccctgttaacatattcagaaactgtatatgattagctgttctaacatgcctctaaactgaactccttcctcaacctctcatacttcctcattatcattcaacagcatatctgtctgtaatctcggtcttagtaaatagcattatcatttttcaggtgcccaagtgagaaacctggagttattctagattcttgcctatccttcagttatcaaattctgctacttctatctcggtatctctcaggtgtgtcttcttctctataacgcccctttctgagttcaagctctcaatatttttctttactatttcagttgttcaagttggtttccaagttttttgtcacgttgcttctcaccagtccatgttccacactatcaacataatggactctttaaaatattgatatggccgtagagtttcacagtttaaaatcattttgtggttctctgtgctatgccaataggaacttcttactccttgttgttttacattggtatctttggtcatgctttctctccgcctagaatgccttctcctcatctcaatctccttctactccaattcttgctcattctttaagattagtcaaaacaattttcattcttctccaaaacatttctttatacaacaccccgctagaacagatcattcctttgtttatgaccccactatatcttgtatgcaactttattatagtacctatcatattttatttggtatttatttgctttagttcttcttactagactatgagcttcttgaaaatataggttatatattattcatgcctgtattcccagggcccagcacatataagcttcaatatatgttagatatgtttagaagaaacctctagtggcattaatatttcaaaccacaaaaaagtacaactgcctatgagagaaaaacaattaagaaatgagatttccaattaggaaatgaaaagaaaatgacaagtagtttcagtaatcattttatatataatttctagaattttgatatgttctctcttccactgaacagaagaattttcttttctctctttagcattcaagtgtttcattgtcttaaacatgaaggaactggtggcaggacactgctagtagatggattctatgcagcagaacaggtacttcaaaaggcacctgaggaatttgaactcctcagtaaagtgccattgaagcatgaatatattgaagatgttggagaatgtcacaaccacatgattgggattgggccagtcttaaatatctacccatggaataaagagctgtatttgatcaggtgagtatcaaagaactatccccaactgtaatatatttgccaaagattagccttctaatgtaacaaaaatccctaagattcttatatctgctacattttaatcttgctattctatagctttttattatcaaacagtttgtattcttcttataattcccatggaatagtaaatagccaccaaccaaagaatactaggtttattttaggggtggggtcaaatattagaggtagtattttttaaatgaaaacattattaaatgaaaaagagttattaaattatcctcagtgaccaaacagctaggttacccaacaacatttatgtatccagcccagatttatgcaaagctcttgacctgtgtattcaattgactactgatatcacaacttagatattttgtagaatataaaacatatcatattcaaacgtgaactcatcacttctactcattttaaacctacttctccacttgttttcccattttcattgaatggtaccaccatccactaagtttcccaagccataaaccaaacatcatatttaatttttccctctcccttatattacacaaccagtcttatcaactcaatctcctatatttttctcaaactatcccctgctttctatctacaatgcctcttcttgcagtgagaacacttttctttcccatggctaaagttgtaactgatgtccttgcttccattgtgagccctcttccattaatttttcatgctgagtcttatcttctgctcccatgttaagatccttctaaacctccccagtgtctttcagagaaagactagagtccttccttatggcttttaaggttctgtatgatctgatcccttcttactcttctagcatgtaattcatgttttccatacattcttccctagctattccaaactgctttgggtttctggagcccattattttgcatcttgcagccaagctttttactatgcatttttgcagatggattaccgctcctgcttctgcttattccaagcaaactgttactgtgcattaattcagtttactcagcaaatatttcatgagcatctaccaagagtcatgctctgttcttgacactgcagatgaaactgtaggcacaatagacaaaaattcctggccatcttggaattctcattatagtgacgacagagtaattaaaaataaataagcaaatatataatatatcaaattgtgataagtactagggaaaaacaaaaaagcagggaaggagatatggggtgaagaggcagggtgaagatagctgcaaaacttgacatactacaaagagtacaggctttgtaatcagaaggagttcagtgtgaaatcctgtctgccatttattgatttttggccttggacaagttacttaacctgctagtcatgagtttccagttacaataataataccttctgtgcccacttgttgtgaagttaaaaataaattgttatccttacctttacccctggcttgtaggaggaactgtgtaaatattaatttacttcccttggataagttcctctgggaaactctccctctgttatctctcatatatctaagtgcctaaaacaatgagtagtaactctattttcccaacattttattatgaacatttctaaacatatagaaaagttgaaaacatttaacacagaaaagccatagacttacatctagattctaccattaagatatttctatacttgctttatcacctatcttcccatctattcattcatcagttaatcttattttcagtgaattttaaagtataatacattgcagatatcagtacatatctccctaatacttcaacatttatatcattaagtagagttcaatatttgcttacagctttttaaagttacaatgtatatgcaatgatgtttaaaatattaaatatacactcactgagttttgaccaatgcatatacctatttaacccaaacccttatcaagatataaaatattactatcactacaggaagtactctcatacttctgcacatacatctcagaggaacccacagtttgattttcttttaccactatagattagatttttgcctgttctgtttatctcttcttttatgaatacacatctggactctttccagtttcaggttattatgaataaagttgctgtgaacattcatgtaaaagtgttttttttaatatgttttcattttcatttcactaaggtaaatacctaggagtggaactgctgggtcatagagtaggtgaatgcttagtttcataaataactgcaacaagttttaccaaagtacttgtaccattttacactgtcatcaacaatgtatgaattgtagctgttccaaggacatgccacactcttttaaacgaccaactcttgcaatgaattcagagggagaactcactcattactatgagagtggtaccaagccacccatgaaggacctgcccccatgatgaaaacacctcccaccaggccctaccaaaacttgtttgctctttgctttgtttgcttataatagtcattccagtggctgtgaagcggtatcttacggtgatatttttcgattttaaaaatggatttagagggtacaagtgcagatttcttacatgcatatatcgcatcgtggtggagtctgggcttttagtgtacccatcacctgaagagggaacattgtacccaagaggtaatttttcaacccttgtcaacttcccacccttttgtagtctccaatatctattatgctactctatatgtccatgtgtacccattgttaagctctcacttacaagtgagaatatgtgatatttgactttctgtttctgaattattttacttaagataacgtactccagttccactcatgttactgcaaaacacacgacttcattatttttttatggctgcatagtattccacgtatatgtaaaatgcagatgggtagatacccagtagtgagattgctggatcaaatggtatttcattttttaccatgtttagttctttgagaaatctatttttagttctttgagaaatctccatactgttttccataaatgtgataatttacattcccactaacagtgcataagcattacttttttctccacatcctcaccaacatctgttgttttttgatttttaaataatagctattctgactggtgtaagatagtattgtttggttttaatttgcatttctctgataattagtgatattgagcatctttcatatgtttgttggccacttgtatgtctttcaaaaaacacccattcatgccctttgcctactttttaatggcgttacttgttttttgtttttgtttttgtcgttgttgttgttgttgagttgttggagtttcttgtagattctggatattagcctttgttagatacataatttgcaaatattttttctcattaggtaggtttactctgttgattgtttcttttgctgtgtggaaggtttttagcttaactgagtcccgtctgtttatttttgtttgtgttgcatttgcttttgaggacctggtcaaaaattctttgcctaagccaggccaatgtccagaagaatttttcctacattttctcacaggatttttacagtttcatgtctaaagtataaatctttaatccatctcgagttaattcatgtatatggtgagagacaggggtccagtttcattcttccgcatatggctagccagttttcctagcaccgtatattgaagagggtgttctttctctattgtttaattttgtcaatattgcagaagatcagttgttaataggtactttatttctgggttcactattctgttccgttggtctatatgtctatttttataccaatatcatgacgttttggttactatagccttgtagtataattcaaagtcagaatgtaatacttcaagctttgttctttttgcttaggattggtttggctattcagactcttctttcggtttcatatgaattttaagtttttttaattatgtgaaaaattgtgttggtaatttgatagagactgcactgaatctgtaaattgctttgagcagtgtggtcatttttaataatattggttcttttgatccatgagcatgggatgtgttttcatttatttgtgtcatacacaattttttcatcagtgttttgtagttcctcttgtagagatctttcacctccttgattaaatgtattcctaggtgttttattttttgtggctattgtaaatgggttcttcatttggttcttagcttgaatgatattggtgtagagaaatgctactgtgttttgtacattgattttgtatcctgaaactttactgaagttctttatcaagtctaggagtcttctggaagagtcttttggagttttattgtacattatttggggttttcaacataatggggtatatttttctcctttataatatgtatgcctttcatttctctctctctctccctctctctctctctctgtgtgtgtgtgtgtgtgcgcgtgtgcgtgtgtgtgtgcatgtgttatcgcactagctgggacttccaggactaacagtgaatagtagtggtgagaaaggacatccttgacttatttctgattttaggggaaaattactcagtggttcactgtaggttttccatggatagcctttattagaataaggaaatttccttctattcctaacttgttgggaattttatcattaattaatattgaattttgtt

SEQ ID NO: 93781 - DNA, 61984 bp, Homo sapiens
  misc_feature (1)...(61984): n = A,T,C or G
tcaataaatactaagggaactcagaggctggcaggatcctccatatgctgaacgctggtcccctgggcccccttatttctttctctatactttgtctctgtgtctttttcttttccaagtctctcgttccacctaacgagaaatacccacaggtgtggaggggcaacccagcccttcaatagattctttttcctttaatgtcagtgtgttaaaatcattaatgtcactaagaatatctgttgacacaccccagtggagggagggcatcagttccacagtgtcattccagctggtgggctctttattccctcgagctttataattaccagcctctcaaaaataatgcatttgttatttatctctgtttcctgaaagcctgggtctgtgttcatttgcaaacacgaaattgaccagcacagatctgccagtggcgttgctgggatcccagagagattttccctccgcacctgcggtctcaagggccggcggtgcttctgagtcactcatttcaccagcgatcaatgagacactcttcaggtcctcaagaagcttaagcctagccgaccaaaaatgtctgttttccacaccccgcttctaagtcccacagcatcttcttccattcacaagacatctttcatctctttttctgaggcagatgacaggggacttgctacagacagaatcttaaatacctatttaaagaacttcaggctgggcacagtggctcatgcctgtaatcccaacactttagggagaccgagttgggtggatggcttgagcctatgagttcaagaccagcctaggcaacatagagaaagctcatctctataataaatacaaaaattagctgggcgtggtggcatgcacctgtagttccaactacttgggaggctggggtgggaggataacctgagcctgggagatcgaggctgcagtgagccgtgatcacaccatggcattccagcctgggcaacaccatgaaaccctgtctcaaaaacaaaaagataaaagaactttaaaggtaatgtattatctccagcaacacagaatagctccctacaacagtaacgaaaccagaaccagcatccatcccttcttagtgattttttaaaaattacctcccaaaaggagaagacagagacgtagaggacagtctaaaacagggattccctgatgctgaggttagcagatgctctggcctgatcactgctctgatccaggctgccagaacaatcctttctcttagaagggcaaaactgcttttcagctttatataaaataaaagcatagcccaatttctttccattttgcctgttctgaagcctggcagttttgttgctaaaatggaagatgaagctgaatccaactcttggttatttacagaaggaaaaaaatcttttccccagcccatgttagggtctccagctagggggcctctaattacaccagccaaagacaattcaatcaggcaagaaaaaaacaagtttattggcatgtgcattgcacttacatgtggcagtacctggcaatgaataacccaaagtgtggtcaggacttgggttcatctatcatcttaggctgacataaaggaaaaggcctggagcttctgggcaggggaggcatgtagtgggaaggtgtcttggtctatttgtgctgctgtaacagaatgccacagactgtgtaatttataaagaaaagtggcttatctggctcatggttctgaagactgggaagtccaagagcatggcattggcatctggtgagggcctttatgctacattgtcccatggaaggagggtggaagtacaagagagggtgaaagagacagaacaagagagggtcaaactcatttttataacaacccactcccacaatggcattaatctatccttgagggtggaggcctcatggcctaatcacctctgaacagtcctacctcttatacaatggcaattaaatttcaacatgagttttggagggtatattcaaacctcagcagaaggtgcccaggaaaagtatggtaaacaagggttgtttaggaaggtttgttatgcagacttaagtcagtactttcttccactgataagagttgttacaagatatcctcttccttgcatggaagagggagacgtggaaatttcctttataataaatgtgaattttttttacaaaatgaaaatggtttttagagcctttcctgtggtctgctggttcttaatggcctttaattcaaaataatccacatgcgaagaggcatattttggggtggtgtatcccaatgcccctcagatgcctcttttgtgaactgtccaagtggatgcccacctcaggacctttgcatttgctattcccccagattcattcatgcctttttttttttttagatggagtcttgccctgtcgcccagactgcaatctcggctcactgcaacctccacctccgggttcaagcgattctcatacctcagactcccaagtgctgggattacaggcatgcgccaccacgcccagctaacttttgtatttttggtagagacggggtttcatcatgttggccaggccggtcttgaactcgtgacttcaagtgatccacccaccctggcctcccaaagtgctgagattacaggtgtgagccactgcacctggtccattctttcattttttttttttagtctcagctcagatatcacctcctgtaactaacagctcaacctgcttttctttacaacacttaaaactatctaaaaattatttatttgaaaatgatggccaggtgcggtggcttacgcctgtaatcccagcactttggggggctgaggcgggcggatcacctgaggtcaggagttaaagaccagcccagaaacatggtgaaatcctgtctccactaaaaatacaaaaattagctgggcatggtagtgagtgcctataatcccagctacatgggaggctgaggcaggagaattgcttgaacccaggaggcggaggttgcagtgagcggagattgcaccactgcactccagcctgggtgacagagcaagactccatctcaaaaacattaataataaataaataaataaattacctgaaaatggctgagataattaatactgggactcatttagccacttcagcaatattagcggccagaggaggtgaggagacatgatggtgagagggctccttcctgcgtcaaccatgcgcattatgaagagtcacatcatgaagattcagtattggactaagtgctgcaggagaggggaaggaccatggcagctcccaggaagaggaaatgacatctgggtaagataactgttaaagaaaaaaaataatcaatagcatttgttaaagcatggtaccagactttattcacaaccatcatgataggtacagggaccactgcaacgggatcttgcagcaggggagagagattgggctcaactccgaaaacagcatgggcaagtgggcatttatagccaaggactgggggaggggtcagtggatggacagttactaagagggcacttcaggggtccaggtgattgtgtctaaaccacctcataggattcctgttgaaggcaggccagggtgattggacagcatgggggatggtggagcatggggagcctgatcagatgtcaccaagggggatcagacatcaggggcagggaatcctgctaaattgacaaagcagggattgctaaaacagatgtcacagggaagtgtatgatggccctacaaggctcagaagcctgactagagtttggtcaaagaatttttgtcaggatcatggaaaatttaataaagtgtagctatgaaagaaaggacttaaaatttatttaaccagagtaacaaagaattaaaagtcaatccagtaagagaatatataggccttaaatcagcatccattagtgaagtctgtggcctctagtttttcttactaaaacttactccacttacaaaagaaatattgtggaaaaaacaggaaatacaaaatgtatggagaaaataagataacccccctgataattcttccattcagaaataaccagtgtttaggtttggatatacacctgtgtttctaacacagtagtccctagccacatgtggttatttaatttaaatttaaattgactaaatgaaagtaatattcaaatcattactgtcatttctgcattacatccttatttttgtgtttcatttatcagtattgtgtcatcaatcacaccttcctagctagctattaaaacagtcattccttttagcagcacaatggtttatgatattaactttgagcacagatacatttttctgggcttgtgcagtggagcagggcttggctggggtgaaccttggctgtttcccttattagctgtgtgggcttagggaagagttaacttctctgtggctcaccttctccattgtcaagcgggggtaatagcaggctatttgcagggatcaggagttaatacgtgtacactgcaagtaatgatcaataagtgtcagcgcctccattctttgccaggtgtgcaccacagctgggggattaaactttaccacaccacagcagataacatatttgcataacttgctttttgtcttcttaagctttccttgaactcaattccccagagtggtagaagtggtcatagggcactatcatttttatgacttctgaattgccagatcaccctcagagagattgcatcagtgttcggagcttgcagccaagctcgaccccacagccctgccatctgtgcccgaagttcgatcttgttggctccagaatccctaggacatagtgcaggagtgaatcccgagctggagctgggtgggctgtggggtcattccagattgattaacctccgacctctgaagtctgcagctggaaggggctccaggtaagaagataactttgaagcatcacaccaggaaacctactgcacctggactttcatgacatttcctgcgggcaatttttacctccacgaaattcagtaacctttgcagccccttcagcccaagaccaccaggagcaaacctgtggtccacaaaatcgggtgtactgacccactgcaatgagggagcgcctcccaagaacgaagggaaaggcagagtttgaaggggttgagggaaggcagagtttaggtgacctttacatgaagcagggttcccacaggctgaggccagcaggactgtgttccgcggggccaagtgtgggaagctgtgtgcagacgccccctatctggagctgcagcctggattgggatgacagaggctaagtctcggttagtggctgagctccccggccagacgggcatgtttccttctccctgctgtaatctcaaagcggacagcgtctgccaggtggtttcgggaacagggtttctccgagggctagggggctgcggtccctccgaggcggggtcgtggtggcatttggctgtggctgcctcgcgccctcgggaacgggcgtctccagctcgctggcagctggttttctccacgtctgtcatcggcctggagtggcaagcaaatagctggtattttcagagccgccctgccccggacagagaagaccgggcccagcaggcgttggtggatgcctttcaagctgtaatcagtttccccgaacgtgtaccaggtctcggccacagcccgagcccagcgcgctcccgcggggcacctggtgacccggtgcagggcgggagggccggtcccaggaacccgagggccggagggcagggcccccttcccgcaccgtccccgggctggcaggagcggccacgacggcacgctccgaggccccgggtcccttgccccctccagtcgctcccactttctgccgggcttgcccaacgagggggcaaacaccacgctcaggtggcgtggacaggtcgctgccgcctcggactacaccagagatctcagctatgagcctggacgcccgccccgccctcccgaggccccgccccgccccccgaggccccgccccggcgcggcgcgcaggcgcggtccatcccgcccgcagagccgcagtgccgggcgccagagcagcggcgccagagcagctgcaccatcccggcgttcgcgtgtgccgccgctttcctcctccatctcttttcctccgcctccgccggcgcgatggcgaagccgctgacggacagcgagaagcggaagcagatcagcgtgcgcggcctggcggggctaggcgacgtggccgaggtgcggaagagcttcaaccggcacttgcacttcacgctggtcaaggaccgcaatgtggccacgccccgcgactacttcttcgcgctggcgcacacggtgcgcgaccacctcgtgggccgctggatccgcacgcagcagcactactacgagcgcgaccccaaggtgaggcgctgccccgccctgtgcgcccgtgcccgctgagagggcgccggtcccggagccgcgccagcgggggtctctgcggggcggcccgtcgggcgttacctgcgcccctagccggccggcggccaggcacagccgactggggagtcgcctggaagccgcagtcggcggggsccgggcgtcccctgcgcagggccgcggccacgggtccgccccactgggagcccgcgcctggcggggtccgccgtcccccgcagatgatgctgagcccgggagcctggcggacgttcccggtctctttctggccgtgcgcttccgcgctggctgcagagccggtgctccccgcccctgcctccagccactctttgttttcctgcagcagcctgtgggagaaaatgggactggaaccaggcctgggcagccttgtgggttggaatggggtgagctcggtaatctgcagggaattgtgagacttttttttgtgtacgctgcttagaagaaaatcactgaagatgcctgcttcacgcagggaggggtacgaagctcagagatggagatggagccctcgaagaaggctctgtcttagaggttcccacacctcccttggagaaatttgcttgggttgaagttgacagagatcatcttactaattgttactttttatatcttgcaaaaatttgtttgagtagtgaaacaaagtcactgattgtccccgttactcttaaccatgtttactatgggcctgtgttcttgctgtgtttttggtattcctaaatatacatacacatttttaaaaagtataatgcacatacagttttttagattttctgtttcattcgtaaacatttgtaactttttcactgataaacagctttgcaggtcaatggataggatggtagttttcagtttgataggtacatggtagtcttgcacagccccctgttgccagttttttgttgttgtcgtttgcttttaaactcttgaccatggagaattgtctttctactacactaacgtagagggagaactggtgaggaaaagacacacttccagacctgaagccacttggcaaagattttacttgcagtgtacatctaggcagtgagcacttgctttatggatggtattttagaatatttttgtagggcattaagatatgtttaatacggtaattgctaagagattgactgcttttccaaacttattctgggacattcttttttctaaaatggagatggtaaaagggacagatttgttagaataccaactggggctcttcatatttggtatgcaaaacatagaagtggcaacgaatggccaaaacaggttataacaagggcttgggatgactttgccaggaaaagcagccaagaagcagtggctcccccagaattccctgctgttgggagagttctgatgcacagcaccatttttttttttttttttaattctgagtcttgccctgtagcgtgaagctagagtgcagtggcgcgatctcggctcagtgcaacctccgcctcccgggttcaagcaattctcctgccttagcctcccaagtagctgggattacaggcgcctaccaccacgcccggctaattttttgtatctttagtagagacggggtttcaccatgttggccaggctggtctcaaactcctgacctcgtgatccgcccgcctcggcctcccaaagtgcaggagttacaggcgtgagccaacgcacccgacccgcaacatcatttttattgtctaagtggcggatggcaaggacatagctctgccttcrcattcaagggcatttccttggagctggaccaggactcagctctacaccttagggtgcccattggagtatttatgtataatcasatcctggagaggccagcgatgggctcagggattacggaaatgaccttcatgaacaagatagtccctgcaacaaaacaggttttttgatcctccgtgagatctcttttgattgtctacgtgtggtggctctgggtggaaacctttctcttaaaccgcacagtctgtaagtcgtaaagttgtaaacttttagatctcacagtstgtaaataagctgtgtgcctattctgaataggaaggacatggaaaattgggatttaactgcttctttcgctaattcatgatgaaaataagcttgcaatcctttctttggaaaagttacatgcttgctggtgatggaccagcaaccagtcccaccagagccaatgagaggaggtgtgctcccaagaaaataactgctgtgcctccccctcagccagaaatgacctcagacattcaccggcacactgcagactgtggtaatgtgacactctagagctcctaaatagaacgcttttattgttatttttgtctttttttaaattatgcaagtcctgaaggaaaaattattactggaggaaaaattagaaaatatagataagccagaaggaaaaaaattaactgtaatcctgtaacccacttctatcgcccactttgtgctgtaaatattttgtgttctacattgttttttccgtattggcagaaacttgtttttaatacataaaataacattatactgaacctattgtttcataactcttagcactttatttgtggtacatagcgaaagagtagaagttggggtgttcagaggaagatttgtcaagctttgccatgcttggcaaatcagcacgtcaaaacatctggctaacatggagagctttgtgcttggcaagaggtggcggttggtcatgaagacatttaatggattctctgaagtggtggcaaggtggcaagragagtccaacctgaagctgcagagcctgggattgcgctgcatggagaagaaagggtgtgcgtgattccacgctccttttcatcctggcctttccattcggtctgtgcaactgtgggcttgggcggatttctttgccattattggcctcagttttctcatctttaaaatgaggggaatcaagctggtgatgtttccgaagtctgttgccattctgaaatgttagagttaaaatgtttctmtttcatattgaattgacattccatctctatccagagagaatttgaggatgcttatgctagatacagcacaaaaggttcacattagaaggcctcagagtgagggttggggtgggacagtgagggtcaggacacaaaacacagaccaggatcctggcagtgaaagcagcccatgcccagttatgagagtcacgggatcccttctgtaacatyctgaaaggacagttgcacggtttattctgtgggcctttgtgaagctgtgttgtcgatgtgctgagccactgacctgcagcacccctgcagtggatgtarcaatcagtttttgagactcttcccataagctcctggcatgactacaacacagattaaggaaaagcagctctaccttggggcccacackgctgtcctaaatattcctaatgagataaacacaatgaaatacgattaatcttttggtttggctggacccaggagttaaagaagatgatctagagaagtgttttgcagacscttctgctctgtgatccccacttctgggatttgttttaattagtcagttgtggtaccagcctccggaatcctaacactcccaatttttctgatgtatttccacttttatgtgtgaagttgagcttgcatctcctgggcaggcttccctgacagcagatcgctcaaagtcattttctctgaccagtagctgatggtgggtgctgttttgtgttgctgacagctagccacttggaaggtaggcctcagctgtcattttagcagatggagaagcctacagtgtgtgccttcattttctgcagaagacagcctggcctctgcccttgcaggctgtggtggctggttttatgtgtcaacttggctgttgtgcctagatagtaacgtggatgtccctctgggggggtcggggggtggtgtttcccacactgactgagcatcttacaattcagttccgttctgatgctgtctacctagatgtagcctcggatcccacaggctaaaggctcagtcccacaagacttctccaccccagatgtcagttgcacatcaggacctcccttctgacctctgaccgacagcctcctcaggtttgatgatttgccagaatggctcatgaaactcagggaaacacttcacttgcgtttaccaattacttacaaggaatacaacccaggaacagccagatagaagatatgcagagggcaggtctgagggagggtgcaggggcttccattccctctgcaggtgccactgtcccagcacctccaggattcactgaactggaaggaagctcttccatccccttcagttggggattttatggaggccgcagttacctagtgtgattattggccattggtgatgagctcagcctttagcccctctcccttcactggaggttggggctggcgggaggggtgggcctgaaacttccaaccctctaattagagctggttcccctggcagccagcctctgccctgaggggcttgccaaaagtcaccttttggtgaccacatcaggcgtggttgaaagggacttgttatgaataacaaaagacacttctttcatttttattgctcttatcacttaggaaattacaagggtgttaggagcacaggccaggaagaacaaataagtatatctcattacatcacagtttcacagcctcccatgggggaaggccttgcagaacaaaccctgccaccagctaccttgcaccagagctgcagcttgcctgggtctccagcctgctggcccaccccactctgtaggttgtggccttgcacttcagaatcacttgagccaatttcttaaatctgtctctctctacacataccttactgttctgtgtctctggagaaccctgactaatccacaggggcygtggtggctttataaaatatggccgggcgtggtgactcacacctgtaatcccagcactttgggaggctgaggcaggtggatcacctgaggtcaaaagttcgagaccagcctgaccaatatggtgaaacctggtctctattaaaaatacaaaaattagccgggcgtggtggtggacatctgyagtcccagctattcgggaggctgagacaggagaattgcttgaaccagggagccaagactgcgccattgcactccagcctgggcaactctgcctaaataaaataaaataaaataaaataaggtaaccgacctcacctccacatctcagccatatttccttttaaactttatgtgatttcagacccttaaaaagttgcaagaataatacagagatttcttgtaattcctgttgacgcttcatccggattccccagatgttaaacattgcaacacacttgttaggtcattttgtcgctgtaagttcatttttctccgaatcatttgaaagtaagaaccagcctgaccaacaaggtgaaaccccttctttactaaaaatacaaaaattagccaggcatggtggtgggcgcctgtagtcccaggtacttgggggactgaggcaggaggattgcttgaacctgggaggagcaggttgcagtgagctgagatcacgccactgcattccagcctgggcaacggagcgagactctgtctcaaaaaaaaaaaaaaaactgagtcatagccttgttgccccttcacccccaaaaacggcagtgagtactcmggaaaaacagggaagctctcctacacacccacagwagagcagttaaactctggacattttaatcaacacagtgctgttgtctgcaaatcttttcagtgtcaccagctgtcctgcttaataaatacaaataaaatgcaataatacaattgtaaaaaatacaaataaataattgggagaactttagaagtcttttcagattatatcttttattattattattattaaacggatcaaagctttaagccatttggaaattcaaagcatcctaagacatgcagcaaataaccgcaggagataggagctggctttttctcacccatgcagaatggcattcttaggatacggtgaaggraagagaagtgaacacagatttagaaaggtaattggacagtaagagaagttcggttaacagtgtcttcaacagtaccttgagtaggaatgacatgtaattttaggtataggtaagtggcatttctcggcctacaaacagttaaaatgaaagattaaagtagtgtttaaaaacgatgactggtagctcactagktataaatatagtttgacacggtccagatcacttagtgtaagttgattaggctctgtcagtgataaggagaaggctcccatcgctttctggctctggattagtactgaatagactttttgtggagcttaattgcatagaaggcgggagacagtgacttgtggcaatgtgtgtcatggagtgtagaaggaatttgtttactacagaaccaagtgatctcttaagatccccataagttctaaagttctataattcttttacatttgacattttcaaaattgagcaaacagacctgtgtttgagtcgtaggtactggagtgagaaggaaatccacgatccacgttgagaagcctgcccactgttcatgggaagccaagtttccctggcagttaattcattaagaaagtaccgtgtgacwtcacaggctgggagcttgagagatgtgctagctaatcctcacatccttacagcagatacagtagtggattatcagattgctctgtgagcaactccccagaagccccctcagacacagtggagtggacactgtgacactgtcaaggaaaccaaagaccaacctcagcgtctggcaggtgggaggcccctcaacatctctcctcccacaggacctcggttcccctggatggtatctgagactgctcagctcaccagcaggagccagcaggtccagcccagggaggtggcccctttgtgtctggaggggctgggagcccccgctccaaggcctggctggtggaacgtggtgcccactggcctctggctggctcagtggcctgtgttcctgtgtcttatcagggccagctctgtccatagtgcctgggtggcagggagggacactctgccctgtgagtcactctgtgcccatgtaggaaccagtagagggcggctggtctgaggcatgctggcaccgacagaatcgaatacacaaaaggagagttgctgtgctttcctggggacaggaggggaccggtttcagaccagatctgcctgtagaatgaggctcttcatcttggtgaaagcagccgcccaactcttttttttttttttgaggtggagtttcgctcttgttgcccaggctggagtgcagtggcgcgatctctactcactgcaacctccgcctcccgggttcaggcgattctcctgcctcagccttccgaataggtgggattacaggtgtgcaccaccacgcccagctagttttgtatttttagtagagacggggtttcatcatgttggccaggctggtcttgagctcctgacctcaagtgatatacctgcctcagcctcccaaagtgctgggattataggcatgagccatcacacctggctccagctctttcttttgtttccctgaatgttgggaaagttctttctttttccaccagagtattaagacactaacgttaaatgaagactctagttaaaaatcccttcagaaaagggagraaaaattggtggtctccacaggcccaattctgtgaatctctgtctgtaaagaacaaaatgaggctctgccagttggtgttacactctcttttcagagtctgttaactcctaaggtgtctttaggtgattggtatttggtgtactgttcgtgttgatcatattttcatctatttttgagctttatgtttttctattatttgcctggttgtgtaggctttgcatgtgataaactctgttaaaaaaaaaaaagtggagggcctggcttgaacccaggaggtggaggttgcagtgagccaagattgcaccattgcattccagcctgggcaacagagcgaaactctgtctcaaaaaaaaaaaacaaaaaacaaaaacaaaaaacaggctggctttaggctacttaacacttgttatgtcatattgcaagaagggaccatggtagaaagatcaatggcccagttcaatcccaggcggcagggcctccttagagcagagctgctgagcagggaggttaagggatcgtgttggcattttcaggctgaagcaggtgagtccggttctccaaccagcgctccctgagcagggaagccctgttcatggttgcacaggaggagccagaggggagtgagtggaaagaggctgtcctgcagcagcaggatttggggtcatggaagagctaggtccctaggctgttgcttggacaaagcctatgcctttacatggtttttttcagaactgccacttggcaactttctaggctttgcatttctccttgaaaagtctggtatggtgaggggaaccagccttgcctgagtcctagcctagccctgtgcgagcccacaggtgaatgtggtcctctcagaggctgagtgacttgcccaggtcacccagctagccagggcagggagctgggatgagaccccagcctgtaccattcaagtctgcattttcttggccagctcctccagcaagcctcttttcagtttcatggttttcactctgaaccatattaaggtaaaagcaaaatagacacatctcagcaaatgatgaaagttcttaaattgaaacaagttgcagaaaaacctcaaagcagcaaaacacattgcagtccccaaggacagagcctgtggcccggcaggccctgggcagtgccttgggggctgtgcttcagcaggaggctgcagaaccctcgatgtctgcatgcaacctggacaattggagacgcacaggcttcgagtctaggcccagcacttcccgtgtcagtcctgtcccttacaaacagagataatcaagctcttgggacataactggtaaactttttccccacagtagaaaagttctaagtagaagttaggaacttttgcagagagagcaaactacaacctaaaaayccacattttagccaggtgtggtggcatgcacctgtagtgccagctgcttgggaggctgagacgcgaggatcacttgaggccaggagtttgcagccagcctgggcaacatagtgagaccgtcatctcttaaaaaaawatatacatttttagttaaaggcaaagtaaaaacattctggtcatgttcctggcctgtcagctttttataaaacctcttgttaatacttgacccacagtattttctcagatagccagggtctagttgggctcagtatgatttcgcactggttaataaaccctgcctggacagtgcctgtggcttcctctgccagaggggggaggcaggtgctatggaaaccccatagaatattaagttcgttcaaatgtagtgtaaataaaatccagcatgatgaaagtccacaagaggcctgactgtgagtgacagcagcagtagttgtacttatagcggctatgaggactcattaattatgctgctgtaattcctgtgacgtaaaggactttggaatttatacagtaatgtagaagcctatattcaaatgatcaaaaaagtaaaaacaggccattgaagacagagctatcatttgtgtgtgtgtgttctttcaatttgtagatttaggtatttatagagtattcttaagttatgtattaaaaactttatggacctcaccgacgacccatgtagaattccagggaatcactacatggtgccggtcagcgtggtcagctatctccactgtcaagttgctgccgtttcctttctgtgctcctcagcagggtgtcgctacatccaccccaccctcaaggtggcagacagggaagtaagctcctcctcctggagtgaagaatatcagaaagtgtttggcccctggttaaaaccaccaaagcaattagtaaatatttcaggggagatgttggctgtgcacatatcctgttagtccttggagttgtgcccactgatcttagcattcagccctggccgctgcaggcccgtggatggccatgagaagtactcggtagagaaagtagggcacctagaaccccgctcagggcccaggaggcactgcatgggtggccgtccttgatacagcacctcactggcatagagctggctcatgtggcaaccccaagccagccagccagcaggcatcagccaagagacttctgctggggaacatggatgcatccattcagccgtctgtgctgcgttcattggtgcttcacgtgggtgctagaagttgtgctcagggctttccattgagtacttgaagacatggcctgtgttacatctgtgttagagatgtgaagtaacttgcccaagggcacatggctggtaagaggctgagctaagtgcagacctgggtctgtccagttctgggtgccttggccccaaccaccaacctgccctgcctccccacacatcatggaaagttagtgtgtgttcatccagggactggagggtcagggaagagaaggccrtgttgaggaggggtctcctgggtgggctgcttttgggggctgcggtcagcaggctgcctgacagagcaagcccagtttttgtgcatggggttgacataaatgaaatcccgagtgggggcttggcttcatgggtygtgtcatctctgtaaccttcctaaagtgtagaatggaatgagaaatcttattctttcttctgcttcctcagcgcatttattatctttccctggaattctacatgggtcgcacgctgcagaacacgatggtgaacctgggccttcagaatgcctgcgatgaagccatctatcaggtacagagcctcatggccrggcttctgggtggcccctcgtggtgctttgaggtctgaatccattttcccacagaggtgagccctgatgttaagactagcagctatctgggaatcrggagatttacggcctgttctcccctcctggaaggaatgggttggcggggctgctctctgtttttgagagtagaaagtaagaatcgaacggaccgcaagcktggggttgaattgggatgcgaaggtgtggaggttctagaggccatcccacaccccaccccacctccggggcggatttagagcactgcaccagtggttggtattattccattttgacttcatcaaactgctaacccatgtctggtttccctccctccacccctgagatgacctccggagctcaccctagttgtctagttgtaaaagcactatttctcccctaaaaacaaaacctgccttttcttgagagttcttcattagcacttgttcactttgaacttaatcctttcacagttcctttgtggttttagagcagagcagccattggctttttggtctgtcttcgcttcccttcccagctgagtctctagagtataaccttttacctgcgcatagatgggtgccttcatggtggggcccctccacctcagcgccctgccaccgcctttgctttgcttgggtttggatgtgtgtgggaggagtgggggtgttttgttgggggcaaatgtcttgcatggctgggaggcggctcaacattgcctggggctccgtctccccctgcaggacctcatagcagtgtctgtgctcaacaaaatgcaacaaaaacttcactccgcatgttcgaaattagctaatggtgctaaaggttaccctggcaggtgacttgtcatttacgtctgtttactgagtgttaacattagggcatgtctgtaagaagtacagaacatgtaatatcttagtcttgtctttggattttaccattatagaatgcattttcttttttgaaacactttctgcagttcttacatatagtaaaaattttagggaatagtttgcctcataaacatgcaatatgtttctaatttttattcacagaaaatgaatgttaattataraaatttagaaattgcgggcaagcatgtatccttttaaactttgtatacttgatgggaggttccaagatggcygaataggaacagctccagtctacagctctcagcgtgagtgatgcagaagatgggtgatttctgcatttccaactgaggtactgggttcatctcactggggcttgtcggactgtgggtgtagcccaccgagcgtgagagcrtgagctaaagcagggcgaggcattgcctcacccgggaagcacaagggatsagggaattccctttcctagccaagggaagctgtgaccaatggcacctggagaatcagatcactcccaccctaatattccacttttccaacggtcttagcaaacggcacacgaggaaattatatcccgcaccaggctcagagggtcccacgcccacggagcctcactcattgctagcacaacagtatgagattgaactgcaaggcggcagtgaggcttggggaggggcgtccgccattgctgaggcttgagtaggtaaacagagcagccgggaagcttgaactgggtggagcccaccacagctcaagtaggcctgcctgcctctstagactccacctctgggggcagggcatagctgaacaaaaggcagcagaaacttctgcagacaaatgtctctgtgtgacatctttgaagagagtagtgtttctcccagtacagagtttgagatctgagaatggacagactgcttccacaagtgggtccctgacccccgagtagcctacctaactgggaggcacctcccagtaggggccgactgacacctcacacagccgggtgcccctctgagacgaagcttccagaggaacgatcaggcagcaacgtttgctgttctgcagtattcactgttctgcagcctctgctggtgatacccaggcaaacagggtctggagtggacctccagcaaactccagcagacctgcagctgaaggtcctgactgttagaaggaaaactaacaaacagaaaggacatccacaccaaaaccccgtctgtacgtcaccatcatcaaagaccaaaggtagataaaaccacaaagatggggagaaaccagagcagaaaagctgaaaattctaaaaatcagagtgcctcttctcctccaaaggaacgcagctcctcgccagcaatagaacaaagctggacggaggatgactttgatgagttgagaggagaaggcttcagacgatcaaacttctccgagctaaaggaggatgatcgaacccatcacaaagaagctaaaaaccttgaaaaaagattagacgaatggctaactagaataaccagtgcagagaagtccttaaatgacctgacggagctgaaaaccatggcacgagaactacatgatgcatgcacaagcttcagtagccaattygatcaactggaaaaaagggtatcagtgattgaagatcaaatgaatgacatgaagtgagaagagaagttcagagaaaacagagtaaaaagaaatgaacaaagcctccaagaaatatgggactatgtgaagagaccaatctacggctgattgatgtatctgaaagtgatggggagaatggcaccaagttggaaaacactcttcaggatattatccaggagaacttccccaacctagcaaggcaggycaacactcaaatacaggaaatacagaaaacgccacaaagatactcctcgagaagagcaactccaaggcwcataattgtcagattcaccaaagttgaaatgaaggagaaaatgttaagggcaaccagagagaaaggttggattacccgcaaagggaagcccatcagattaacagcrgatctcttcgcagaaactgcaagccagaagagagtgggggccaatgttcagcattcttaaagaaaagaattttcaacccagaatttcatatccagccaaactaagcttcataagtgaaggagaaataaaatcctttacagaccagcaaatgctgagagattttgtcaccaccaggcctgctctaaaagagctcctgaaggaagcactaaacatggaaaggaacagccggtaccagccactgcaaaaacatgccaaattgtaaagaccatcaaagctaggaagaaactgtatcagctaccgggcagaataaccagctaacatcataatgacaggatcaaattcacatataacaatattaaccttaaatgtaaatgggcaaaatgctccattttgacttgattggataaagagtcaagacccatcagtgtgctgtattcaggagacccatctcacatgcggagacacacataggctcaaaataaagggatggaggaagatctaccaagcaaatggaaaacaaaaaaaagcaggggttgcaatcctagtctctgataaaacagactttaaaccaacaaagatcaaaagagacaaagaaggccattacttaatggtaaagggatcaattcaacaagaagagctaactattctaaatacatatgcacccaatacaggagcacccagattcataaagcaagtccttagagacctacaaagagacttagactcccacacaataataatgggagactttaacaccccactgtcaacattagacagatcaacgagacagaaagttaacaaggatacccaggaattgaactcagctctgcaccaagcggacctaatagatatctacagaactctccaccccaaatcaacaaaatatacattcttctcagcaccacatcgcacttattccaaaattgaccacatagttggaagtaaagcactcctcagcaaatgtaaaagaacagaaattataacaaactgtctctcagaccacagtgcaatcaaactagaactcaggattaagacactcactcaaaaccacacaactacatggaaactgaacaacctgctcctgaataatcacaaaagaactagagaagcaagagcaaacattcaaaagctagcagaaggcaagaaatagtaactaagagcagaactgaaggagatagagacacaaaaaastcttaaaaaaatcgaagamtccaggagctggttttttgaaaagatcaacaaaattgatagaccggtagcaagactaataaagaggaaaagagagaagaatcaaatagatgcaataaaatatgataaaggggatgtcaccactgatgccacagaaatacaaactaccatcagagaatactataaacacctctatgcaaataaactagaaaatctagaggaaatggataaattcctggacacatacaccctcccaagactaaaccaggaagaagttgaattcctgaatagaccaataacaggctttkaaattgaggcaataattaatagcctagcaaccaaaaaaagtccaggaccagagggattcacagctgaattctaccagaggtacaaggaggagctgctaccattccttctgaaactattccaatcaatagaaaaagagggaatcctccctaactcattttatgagtccagcatcatcctgataccaaagcctggcagagacaaccaaaaaagagaattttagaccaatatccctgatgaacattgatgcaaaaatcatagtaaaatactggcaaaccaaatccagcagcacatcaaaaagcttatccaccatgatcaagtggggttcatccctgggatgcaaggctggttcaacatatgcaaatcaacaaacgtaatccatcatataaacagaatcaaagacaaaccatatgattatctcaattgatgcagaaaaggccttcaacaaaattcaacagcacttcatgccaaaaactctcaataaactaggtattgatggaacatatctcaaaataataagagctatttatgacatacccacagccaatatcatagtgaatgggcaaaaactgcaagcatcccctttgaaaactggcagaagacggatgccctctctcactactcctattcaacatagtgttggaagttcgggccagggcattcaggcaggagaaagaaataaagggtattcagtgaggaaaagaggaagtcaaattgtccctgtttgctgatgacatatttgtatatttagaaaaccccatcatctcagccccaaatctccttaagctgataagcaacttcagcaaagtctcaggatacaaaatcaatgtgcaaaaatcacaagcattcctatacaccaataaacagacaaacagagggccaaatcatgagtgaactcccattcacaattgcttcaaagagaataaaatacctaggaatccaacttacaagggatgtgaaggacctcttcaaggagaactacaaaccactgttcagggaaataaaggacgacacaaacaaatggaagaacattccatgctcatggataggaagaatcaatatcttgaaaatggtcctactgcccaaggtaatttatagattcaacgccatccccatcaagctaccaatgactttcttcacagaactggaaaaaactactttaaagttcatatggaaccaaaaaagagcccgcatcgccaagacaatcctaagccaaaagaagaaagctggaggcatcatgctacctgacttcaaactatactacaaggctacagtaaccaaaacagcatggtactggtaccaaaacagagatatagaccaatggaacagagtagagccctcagaaataataccacacatctacaaccatctgatctttgacaaacctgacaaaagcaagcaatggggaaaggagtccctatttaataaatggtgctgggaaaactggctagccatatgtagaaagctgagatacctagaaatggaattgctggatcatatggcagttccattcttaattttttttttggaaccaccaaaatgtttkccacagcagtagcaccattttacattcctaccaaaaggacacaagagttccagtttctctacatcctcaccaatgcttcttctctgttttttgacagtagtcattctaaatgggtgtaaaatggtatgttatagtttttatttgcatgttcctgataactaatgatgctgagcatcttttcacgtgcttgtgggccatttgtrtatcttgtttgaagaaaagcctattcaattcatttactcattttaaatcaggttgtttgttttcttgttgttgaatttttttttttttttttttgaaatggagtcttgctctgtcgcccaggctggagggcagtggcgtgatctcggctcactgcaggcttcacctcccgggttcacaccattctcttacctcagtctcccgagtagctgggactgcaggcacctgccaccacgcccggctaatttttttgtatttttagtagagacagggtttcaccatgttagccaggatggtcttgatctcctgaccttgtgatccacccgccttggccttccaaagtgctgggattacaggcgtgagccaccatgcccggccgatttttgttgttgaattttaagaattctctatttgtcctagatattaatagcgtatcagatatgtgatttgtggatattttctcccattctatggcttgtctttttactgtgttgatagtatatattactctatatataaagatgaggtttcaccatgttggtcaggctgttctcaaactcctgacctcaagttatctgccyrccttggcctcccaaagtgctgggatttcaggcgtgtgccactgcgcctggctgatagtatcttttgattcacaaaagtttttaattttattaagtctagtttgtctatttttccttttgttgcctgtaagtttggtgtcatatagatcaattgatttttttttttttaaaggaaataggtaccaaaacaattcagtggagaacgatgtcttttcaacaaatggtattgggatatttggatatctacatgcaaataaatgaaatcgaacccctacctcacattacatacaaaaattagctcaaaatggctcaaagacctaaatataagagctaaaagaatacaacttttagaaaaatatatagggatcaatcttcatgaccttggattagaatgatttcttagatatgacaccaaaaacccaagcaacgaaagaaaaaatagatacattggacttcatcaaaattaaaaacttttgtgcattaaataaagacaacctacaaaatgagagaaaatatttataaatcctaaatctgataagagtctagtatccagaatatatgtaaagaactctgacaaccacaaaaagacaacccaattgaaaaatggacaaaaagacttggatgtttctccaaagatgatatccacatagcacaaaaagatgctaaatgtgattagctatgagggaaatgcaaatcaaaaccacaatgagacgccrctgtattcccacaagaatggctataatcataaacacagagaacaagtgttggtgaggatatagagcagttggtgtgactgtcaaatcttgcagtcactttggaaaatagtctgctagttactaaaaaagttaagcatagaattctcatgtagcctagcaattccattccacggtacaggtctcagagaaatgaaaacatatgtctacatgaaaagctgtatatgaatttcacagcagcattattcataacarccaaaagtggaaacatccaaatgtttatcaattgatagggtaggtaaacaaaatgtgggctagccatacaatggaatagtacacagcagtacaaagacgggaagggctgacacatggcacaacatggatgaagcttgaaaacatgcttattggaagaagccatgaaatatccaaaataggtagatccatagagatggagagtagatcagtgattgacagaggtgggggaaataggttatgactgctgatgggcacggggctgctttttggtatgatggtttggaattagtggtgatggttgcacaactctgtgaacatacacttctaaaaggcgaattttacggttaatgaattatatctcaataaagagataaaggttattgggtgtactgcagtgctctttttctgtcttcagttcagaagcccactgcagcagagttttggactttgtcagctactttttgtgtcattgttgttgttgttgagacagggtcttgctctgtcacccaggctggagtgcaatgataygatcacggctcactgtagcctcaacctcccgggctcaagccatccttccgcctcagcctcccgagtagctgggactgtaggcgtgcaccaccgtacccagctaatttattttttatttttagtagagacatctcattatgttgcccaggctggtcttgaacttctaagctcaaacgatcctcccaccttggcctcctaaagtgttgggatgacaggcttgagccaccgcacccagcctttttatgtctttctcgaatgctcacaaaatcaaggtgacatttgccctcctaggtaggaagagtgtgctgtaggcactcaatttaaaaacaggaaggaactaaacatctttgattatgttgactcgtagcctatctttagaaaaatatgtagagattttttaaaaatttaatggatttttgaatttaatagattttttatgaacaagaggttttatggttggttaagtttagaccataaacttagaagttttctggtyggttatgttgtagttaaacttatttcttaactttgagccagtaatgcattattgagtaaatcctagcacccgcccccsccccccatatccaaaatattgttggtggaatgtaccctttgaaattgctttasgaattaagttcaagtcacagtaatttgaaattttaccctgaatcaaattactgtatgtgtcaatatcattcagttgacttagtrtatactaaatcatttgtaactttgctgttgttatttaaaacactaccactcttctcaatggatatttttttggtttcaaaaatgtcctttttttttttaattaaactttgttgtttatgttcataaacatgtattgggtttattatttttaaatgaattcatatgtatactttaaaaaggtctgcattttaatttgtaatttgataaatatcaatatatgtaattcaaatcaacaaaagctctttggatccttctgagaccaaaaagtttaaagtctaccagtccaggtaatgtgagcaatttgtcaagttcgtgcactaaagccagattaatggaatatttatccatatgccataatgagagtactgagtttggcttctggaatggctttaagtgtcaatcgtgattttattgctttttctctaatttttagcataacgtatctgtttcacaacattgtttgaatacaattggaatcaccacaggaaaagtgcttttaggttttagtttaaaaatatgtcacgtaaatatcgcccatgtgaaattagagaatgacagaaccattagtttcatttttaggatacatgttataatttgttcactgttaataggttaactacctggcaataaatgtttttgaaatatttggaaactttcatttccatgcattgatttaacatcaaattttaacattgaattttcaagtctaacagaacccagactctaacttttagcataagctcacaagacttacacatctttcagcctgtcattcaagggaaaatattgagtaacrttaaaatgctgcstgtgtttttgtttgcagttggggttagacttggaggaactcgaggagatagaagaagatgctggccttgggaatggaggcctggggaggctggcaggtaagttgccccatccaggaggagctctctcggacccgttggcttggttggaggccacgtggtgaggccagggtcaggtaaattggcctcagggtaaattggctttgagtggatgggccagtgtgttcttcagattgaaatcttgccactagtggggggaaagggggaaaatgtatgttttctttcacacaagggacgtgtcatcattatcacgaagaccaatcttgccagcatggagtaagctggtgctgggaggggctcccgatatgctgaccactttccagggcacaagagccagtgattggcagacagcccaaagratggaaagatgatttctgaacgtggccctgcttgcagcaggcagtttcaactctgatacagtcagcagattgccttgaaataacagggctttgagggtcttcagccctctccacctcccggcctttgtgacatgtgatgggtcaccactgtcttcctgtgaggtcccttttcatcaaatgcaaaactgggcttcctacgctcaagggaagctccagcctcttttgtccccatctcctgacagccccaggggtggccattcaccgcacatctcatctccaagctggagactgtggactgctccctccccggccccgagacctgcttccttttggggtgttccaggtccttgggctttcccagtcaccttgcctgccccttgccttctccctccatccttctccatggccagatacgagtagagcctttgccttctgcccacagggtcctgtacccacagacccaggcagcactgagcccgccatggcttgatgtgcttccctgctgcaggcgagtccccagaacaagagtccgcgaggctccatcatccctctccctcagcagagggcctgacaggcatctgtgtgttccctggattgggcattttattttagttactagtgttccaggtgggtgtttttttgatttttttaatcctgaagttttttttktgtttgtttgttttttttttttttgagatggagtctcactccgtcggccaggctggagtgcagtgggtgatctcggctcactgcaagctccgcctcccggtttcacgccattctcctgcctcagcctccccaagtagctgggactacaggtgcccgccaccatgcctggctaattttttgtatttttagtagagacggggtttcaccgtattagccaggatggtctcaatctcctgacctcgtgatctgcccgcctcagcctcctaaagtgttgggattacaggcatgagccaccacgcccagccaatcctgaagttttaataaggttgcatctcactgtgcccaggctggagtgcactggcacaatcttggctcactgcagcctcaacctcttgggctcaagcaatcccccaaccccagcctcccgagtagctgggaccacaggcatgcgtcactatgcacagctaattgtattttttatagagacagggtctcactatgttgcccaggctggtctcaaactcctggactcaagcgatcctcccacctcggcttcccaaagtgctgggatcacaggtgtgagccaccactcctggcctctaaatctttattcaaaacattgttttgttttgtttttctttcaagacgttttgattggaacaagggctggatttaatgacacgtgctatagcgccttggggcccctggtactgcggtgtttgcacaggtggacattgatttgtatgcrgccagctgccactgctgtgccggcttcactcaggagtagggtgaggcttgatgtgttgatgtgtccctgctgtcagaacagcctgggtttcagtggaacgtgcaagggattggcgaggcctcagcctcaactgggatgtctgagagtggggcagtggggggcttcgtgcttggagaggttccaggcctggccgagttctctaggattcttcatccycccccatcctcccacgccyttcgagtagccaccacgttgatgtcttctgcctgtggccmcaggctctcatggagaggctgagggctccagttttcctctcagtgaagcctgaagtcagtgtgatcccctctgaatttctgccttgcgccctgtgggctgcctccgcatgggaccttggtgccgtgcctttgattctgactgatytgtgattgattttttcagcgtgtttccttgactcaatggctaccttgggcctggcagcatacggctatggaatccgctatgaatttgggatttttaaccagaagattgtcaatggctggcaggtgggtgagatttcatttcttcactggtttccagctctngttcacacaataaaatggcagcacttgcagtttgtctttttatacttcccacgcccccgccaggggactgcaggccggccagggcaatgtggagcrggtcagggtagcatccttgctccggcttcttggtccacatggcctgggagagcctgggccctgtgtgagctttttgccagctgcctctgcctggtgacagggaagttggggcgtgcaggacacagaatcctgggtgagccttacagcagctcccagacagggccagtagcagccgggcagtgagggtcactctggtgaccctctgcaccaaaatgcagagtgcagggtggtactttcggggtcagcctcagtgggatgttggccctaagtagttagaagagcagttgtagcttttgctcccaccttctcccttcactccctgaccccagtgaggggacagtgtccttggggttagaggctggactctgcatagtacagtggcccttggaaggagtgagcctcgatcttgaagcctcacactacagctaagtgagatggttgagaccatggccgggaggagggcgtggtcttaaaatgcaacctcctcctccctggcgagcagctcccttcccatgtgcctcagaatgaaagtcaccactattccattcggttagaaaatggtttatttaatatcatttggggcctaaaagtcacaaataaagctggtctgggattagaatcaaaagatttgtagcatcagaatgtacaaccccaatgaatgtgtgcatgacgggtagtagagatatccttggggtgggagtggcaaggggggttgggcctcaacggcaggtgcagcctccagggctcgtccatggcgtctgtaagactcatgtatctcaccatggagaaattaacccaaaacataaacgcaaggagctgctgtccatgacacgcacagcgatgcgtttagtgggaatgtggactcatatctgcagcttgctttaaatgcaccccaaaatcaatggattggtggacggagaaacaacagaccatttacagcacctaggtgtgggtgcataatgtttctgcatgtttgaaaacgctcataataaaatgttggtaaagaaaagaaatggctaaaagtaacctaaaacggactcggatccattgcttgatttgtggagatgccctctgcaaccttagaaaggcgcctttctccactgcctccggacagctctgccccagccctccgcgtgcctgagctccagggcagtccagtccatgcacatgttgatgctctgattcattctggcccccagcagtccccatgtcacgtgtgggtttataaggcagaagctcagaggctccccttcgcctagctggtgttagggtttccagcaggaaggtattggtggtggtttttgttttaccagggagacatttttccttctggtggtcctcgttcctgtaactcttgcaactttgtgtgatagtttaggatgatcagtaagtgaagctcacccctcctcccatccccttttcatgggaactgttcagattcagtgggtttttagttggctttagccatggaagaagtaaatacaggcagggttggccagcagcatgtggccagaggggccgcaggccagcctgcttggcaccctggccaagggggcagggaggccctgcaagggagactcaggctgcctttgtatgtgggaagctgttgcttctgccgacgactcctggactaactctgcagatggccaggccctggtgttggggaatctcacagcggacaaggagacgccaccagaagggtcttgctgggagtaccatggggaggtgcctgctgtgcggaggggcctgctgtgcggaggggcctccggaagagcacagcccagacagtcttgctcgtgactcttggcgtctgtgtaggaaccatgaagaggaaatccctcagtgtagcatactagggctgcctgttcattctgaagagaagagacttgatctcatttcagttttagtaattgagacttcagaatccgcccttgctgctgtaccagatggagttactctgtcacgtggtggtaaagcagccccctagtgcttctgtgcaagggtggctcgaatctgcagggccgcttttagtgtgggggttggtttcatgtagttactcgtctctagtgccactgggcacagattctgggaataagcttcttcttggaagccctcccggaacagcttgtcttcctgggtgcatccagggcgtcctcactgccagctgccaacttggccccagcacttgcggatttgcagtgtcactttctttcttttttaattttaatttaataatttttttttagagataggtcctgccctgtcgcccaggctggagtgcagtggtacagtcatagctcactgcagcttcgaccttgtgggctgaagcgatcctcccaccctggcttcccagagtgctgggactgtaggcgtgagcctccgcctggccagtgtgtccccgtcaaagcaatgtcttctagtgattcttctataacagctttattgaaatagagagtcgatttcagtatattcagagttggataaccgtccccactgtctatcttgagaacattttcatccctccagaaagaagccctgcaccaatttgcagtcacacccagcccctgacagcctctcaccckytttctgtctctgtgcaggtgcttgttctgaacattttcctgtaaatagcctcgtgtgatgcgtggtatttttgtctgtcctctttcactgagtgtaggtttttcaagctccatccagatcggagcatgtgtcagtcagtggttcttagtgtctttctttttgggcacgtgtttctaaattttgagtttgttactttagtgtccactgtgttcattttacccacgtgggcttcgccagaagtgggaatcccgacctggtaagtggctgtaggtaaatttcagtgccaggcactgtgtgatctcgaccgcacggtctgctgggtccaggacagggcggtggcctgggacatctgcgctgagggtgcyctcacagctggcttctttccaggtagaggaggcygatgactggctgcgctacggcaacccctgggagaaagcgcggcctgagtatatgcttcccgtgcacttctacggacgcgtggagcacacccccgacggcgtgaagtggctggacacacaggtacctgggctgaaatgtctgcgggcaaggctggagccaggtgagggggctgctgyggctcatttgtagacagctcagcttcttttggcttggggggcttgctgcctccctggaggacttaaggtaaaagccgggggaggtttattctcctcactccccagtctcttacactttgatgggagyttcccaaasagtggaagcgctgagcacagcagcgagactccatgggggaagccccgctgggcaggagctgtgtgttggggctaagaatgcagctgggcgtccactcacagccagatgctcacgagaaccccgctgcttaagggcaggcaggagggtgttctgatgggatgggggcacggacccccagggtgggcgaaaacagctcccactatctctgtggagcacacgacaagctcgcttggcctcctggcgccatacgtggcccatggctctcaaagcgtcaactgtcagagcccctggagtgtgtgcgaggcctgggtgacatccggggatggggccaggccctcctgcccagcagggtgctgatggggaatcagggcaagagcctagagtgctcggcagcgacgggtgccaggcacgcagaggccacgtgagggagcacccagtccaggctccgggcagctgtaagccgggatgactggggcagggcaggggctggcaggagaggctgcaggagaacgtgggggcatcggtgagactcagccacctgtgatggagaaggaygggcaataacaggagagcctggaggctgggtggtcactggtgtgcagagggagttgtcttgactttgtaggacacagttttaaatcaaatacatgggcttcgagtggctggggccatgccatggaggctgaaaatgccctgaaaagttgtatttaacttkcaagagcagggtaggggaccggcgctgtagatgtgtttgtggatgagcatgtcagtgtgagtggggatgctggagaaccgggacattccaggcaggctgtgaagatgggcttagccccgaggcctggccaggatggaaggggctagaatgccttggcggggacttgtcgctcacttgggtgtcgccttgtggggcaggggcaagggttgacaggagagaggaagggaaagggatactggggttttagtcttggtggccccggtgcgccgcctgtgtggctgtcagagctgactggcagtgccacaggcacgtgtgtgccgggatgaacccargcatccctgagtgcgcctgccggggagctgggaccacaggtgagcctcagctttgtgagccccctcctgcccttggtggtagcggagctgatgtctctggatgcaggggaacctgggggcttgtcaaggagagarggagccaggctggggtggagggagcgcagctgggcttgtgctggggggctgggaacatggagggtagcaggcaaggcagctgcaggagcaaccttcccgcaggtggagctgagagaggtgatctgcggggcaagcatctgcgtgttggagttgctagagcagagttgactgaggaggggaggcgcggagggcagagggtaaggagggaggtgggggttggtgctgcagcacctcagggagtcgggatggggatgattcttcagtcaaagccattcctgaggaaggtcaagtgagaagataggtctggtctggggagggtggtgggacgggtggtcctctcaggatgacaatgtgggcaccacaggggagggcgtggacggagactgtggtgccgagcatgggctgggtggatgtgtttgggcagaagggggagacggtggggggccagcagggygccaggtgcccaggrggaggctgggccrgggagaggcacaggggccggcgggggcccttgccactccgtcctsagcaacccgttttgtggccaggtggtgctggccatgccctacgacaccccagtgcccggctacaagaacaacaccgtcaacaccatgcggctgtggtccgccaaggctcccaacgacttcaagctgcaggactgtacgttccgtggttcttggcacccttgtgtccatgtgggtggctggtcccagacaccctcgcccacancctttaccgcgccctgtggctcactgtcctggaggccgcgcggccctcctctagggtgtccctgcgtcccagtgaagagcgaggctggtgcagcttacctgtgtgtggggcctgcccgggaagggcctacaggcagagcgaccaagacacctgggccctgggcacccagggtcaccttgtgcagatcatgtgcccctggggaggagtgagggggatggagttgtgtgcggtacataggggagctgcaggagggatcacgtttacctccagggatgggggtgaggggaagtaatgcagcggctgggggagtcctgtgctcgagcgagtttccttggcctttgcaagtaggcccctgagcggttgcagtgctggtgccaggaggcatgtgtgtgttgaccccgctccatttcttcttagtcaacgtgggagactacatcgaggcggtcctggaccggaacttggctgagaacatctccagggtcctgtatccaaatgataacgtgagtagctggcctgggcactcttgctcaggccgtatcgctttctggcatagagaggtgggctggctggccgggctccccmgtggggcctgctgttggccttggcaagcagccacctggtggccctctcgccttaggtgcacacacgatgcccttggggaggagagggtgcactgtccyccataaagcccaagcggctcttcgtgtgcctcttggcagctctgtggtcctctctccgaggacactctctgccaccttcccctcttatccactcccctcataaacacacagccgctccttggggccagctggagcccgtcagccctccagtctgtgtgctgttctagcctgcagtgccacttccccaagcaggtgatctgtctgtccaggggaccgtagcgcctacttggcattgatgcctggggacatttgaaaggtccttggcacatgcccttcccatactaggtgatggtgtcgcagccatgttccccactgccacctgcatttagtgcccagtggctttctttttgttgttgttgcctgacaagtccttagaagatgccctagtgggcagagcatgtttaaaagtgagctttttgttttatgaaagtaacctgtgcacacaggagcaaaggcctgggtgccggaaggctcatcaaagagtgcactcccctgtccccatgagactgttggcagaccccaagccccaggtacagaatgttccagaaggcctgtgcttggacagtgcagctcctgagcagcgctggcactgtacttcygacggatggacactgtgtcccggggtgtgtcccacaggcggggttaccttcctcagtgacctgagggcacacaggcaggccccagtgtcaggcagctgggctgggctcctctcggccttctgcctgcacctttgagccaggtcgctgacctgggcttcctgggggaggagaatggcccakcctkcaccctccagcttgctctgctgtgtgcagttctttgaggggaaggagctgcggctgaagcaggagtacttcgtggtggcckccacgctccaggacatcatccgccgcttcaagtcgtccaagttcggctgccgggaccctgtgagaacctgtttcgagacgttcccagacaaggtgcatggtggccctgggagggatctcagtgccaggggctgggcgccttcaggctcttgaggttgctttctcatgtcccaaaaggggctagagtggaatggnacatgccccttgtcttggggtctcgtcattctgggccaggatcccacctgggccctcccttccagaacaagggccaccggccttgttaggagtcaggtcagcaagggacatggtgaaaggctcctgtgcaaagtcagatgtgctgggcaggctaaatggggttattccaaacaaagccctatagttccagtgagagagcccccagccccggtggccacggctcctcccctccggctgcagcacatacccgcagcagagcacacagctgtagggcactcaccagcaggcacatcgggcacagcgcacacctgccacagtgcgagcccgactgtcctccctgctccctccacagaacccctccctgttctccaggcttctcgggggtggggtgggctgggctggctccttcacttggggagcttcgtatgccaacaaccgtgggtgcccaygtgggatgaaatgactgaatggcaccccttgtgcgaccttcaggtggccatccagctgaacgacacccaccccgccctctccatccctgagctcatgcggatcctggtggacgtggagaaggtggactgggacaaggtgagcatggaggaaaagggcrgcacctccccagagcctggagcccrtgcagaccagggctacaaggarctgagctggggggcctcttccctggccttgggagagctgtgtggtcatcatgcccrggagagacrcgagctgtgggaggggtctggttccaggagacggaggttccgggggccagagtatggggtcagggcgcgggggagatgataaggatagggctgtgacacttctcagggtttcccgttggtgcattctcatcttgaaatttggtgacagctccccaaagcgttaagtgtttagaggtctgtgctctattcatgcacctgccctcgcgattcagtgtattttggacttaaatatgtttgtgtggtaggattttcttaatctaaccgttaccaaatcaacatgtggaaccataaaacaggccaatgtggtgactcacacccgtaatcctagtgcttcgggaagccaaggcaggagggttgcttgaggccggaagttagagaccagcctgggcaatacagcaagaccccacctctaaaaaaaaagccaggtgtggcagcacacacccagaaaaataaaaccaaaagaaaccataaaacgattttttttaactccgttttgtagaaacccaagcccctctctggtcttggggtgtgtgcactccaggtgaggctgtacctgttgtgggtaccccagttctggccagcatagggcaggtctgtgtagtaaccagtgtcctccccaccatgtctggccactttagtggaaataaatagaaaactgctcaatggtctgtccgtttaccagtgacggcagagtgtgaaggtgactccaggtagcaggcgaktgtgtcttatttgtgtgtgtgtcacgcactggaccataatgtcacacttcagtgggttgcgtcagcagagtgagggctctgggctgcgtgtcaggctttcagagggctccagatccaccttggagagcagaggggacggtggcccttcctggggtacccagcatctgcctgggatcctggacgctcaccctgcctaggcaactggccagagagctgcttgtttctaaacaaacacatgggaacattctctaatggcctaggcctgggaaatcacgaagaagacctgtgcrtacaccaaccacactgtgctgcctgaggccttggagcgctggcccgtgtccatgtttgagaagctgctgccgcggcacctggagataatctatgccatcaaccagcggcacctggacgtgagtgtgggcccagctggccrtgtagggtggcggctacacccatgccaayggccccccacctggcctgggagaggaggtgctttgctccttgaacgaggcaccctctgttcagcagaggatgcttggggctgggggctgtcccttggcagagctattggctgatccccacgcctggcccacagcctcaggttcctctttgtaaattaaattgcacgtcctctccctcagacccatcttcctcagacagcagccctgtgggtccctgggccgggctgggccctttcctgggctggggagttgggtgagcgagagcctcctcctcaagctgggcctgggctcttgtgagatgccttggaggtgcctgctgggtctgggagcacttgagggaggtctggctgtcacagccccagaacttccctggaggcagcagagcttcccatgggtggtcatggagtgtcccctggtcatggggagtgctgggtctccgtggggcctcctgtgcccacccacctgcctctgtgttttggcaccagcacgtrgccgcgctgtttcccggcgatgtggaccgcctgcgcaggatgtctgtgatcgaggagggggactgcaagcggatcaacatggcccacctgtgtgtgattgggtcccatgctgtcaatggtgtggcgaggatccactcggagatcgtgaaacagtcggtgtgagtggggcgcttgcccgagcggggccagctctrtctgacacccaggcctgcgtctaggaccatccaccaaacacatggacccagctatatagcatacaacctgtgccactaggcccctgcctccataggaatgacagagctgcccagaacaccctgtcagggtcacgccttgttgtgcgttcaccgaccagcacacgggggcctctggagggctctggctctgcgggcaacggggagacggctttgtctcctgttgctctcctgcgcccctgccttcctgggggtccagtcggaggctctgcaccactggtccacctgccgctggcagggcttggacagggcttgaaggtgggattcttaggtcagatcttgttcttgcccctcttaggtggggcgtgatctaggaattactcccactctttcacgtagcatgtgctgagcacctactgtgagtactgagcaggcagcagccggcgggagcggaggctgtgcccggggctgggctgcaggctctgtgcgtggcgcccgcagcaagcttcrtgtcgggcccctccccagtagctatgaggaaaccgagcgcagcttctcaagccctgaagtcctgcggtctcggctgtcatgacttggacacctgtttccgcacgsaccgctytggagaatggccaggctctaatgcctgcaaggttgtggttgggcaaaccgcacagccagccacagatgccccggggtgcaggtgctgccttcgtatggctcccagagcctgcagctgccgcggtcactctgttctccttagaaaacagaacagaaccactgagcttgagggctcctgggacctccttaaaaggactttraggtctgttgctcacctggtgcagggcacagcatttgtgacagttccctgttctctgtgtttgcagctttaaggatttttatgaactggagccagagaagttccagaataagaccaatggcatcaccccccgccggtggctgctgctgtgcaacccggggctggccrataccatcgtggaggtgagncccgggccccacccgtgcctgtggagatgcctgggctgagaaccgcsggccatgtcatcagcccctgctgagcggttgctgagtaggcaggagtctgtccctcacgtgttgacctgcaggcttctggacatgagggctgagcccctgaacatgggcgctgagctgggcagtcacccattgggcctggcgggtcctgtgtgcgagttcagaagccgagctttagggagggctggggtgtggctgagtgcagccacggggccactgcaaaagagkcaagaggcagctgactgccagctaggctgggcacctatttcctgtttgtatgttggctcctatgcaagctcccygaggaaatgagtgctgaggtgtcaggccctgcgctacaggcaaggaccagccgctgggagggtgggaccgcccacctggggctatggtcagggaagccttcccaggaaagctgaggtctgaagagggaatgaagagagagkgagcagtgctctggggcaaactggttcaatgccctgtgctgggggacgggcccctgggacctggaaagcagcgtggctcctgtgcagtctgagatgggcctgggtacagtgaggagaggtggccgagtgtttgcaggcagcacctgggtgaggtgctggctttgaggggaccgcctgctkcaggcagggaaggtgctggtggagggcagcgggaggatggctttgggttttgggtggtgatgggatgttcaatgtcagagaaccctgggatcggtggctgagggagggtcgtgtgtttcctgtggacgtttgaactggtgggactgggccatctcgcagagccctctcagaagaggaaggaggggctgctrgggtaaccctgtggcctgagaggtgggatgcccggaggggccggacaagcagatcccaggggaaagcaggggcgtgggcaacaatgggaggagggcaggtggctagggggcccagcctcaggaggctgaggcccacagtgagcggaacctttacgttctccagaaaattggggaggagttcctgactgacctgagccagctgaagaagctgctgccgctggtcagtgacgaggtgttcatcagggaygtggccaaggtcaaacaggtaggcatggccctggccccagccccgaccccagccctcccacaaccaggcaggtaggccctggccctagccctcctacaggcccagcacaggtcctggggtacccactggggctttagtggggactcagaacaggactgagggtgaggctgttagggttgcctgaggtctctccaccccactcagcctttcagatgagggccccgaggaggacaggtcacatggcagataggtgagtgcagaccccaggccagccctgcccgtgcctcgaccctctgccacnggtcagttctgtatggaagcctctagaagccgattccagcgtggtaccctctttgcccctggagagctgtgcaggtgcacgagctgtctgcaccggcagcagcctctcggctagaccagggccagtcacggcagccttcaaacctcagcgggctggaggcccatctacacagcctgtcgagcttggcctcctcatagaggccagaactagttctccttgtagtcctttcagccgtcccgctcccgcgctgctccgccgcctgcacgcctggctctgcagtgtcttctgcttggctccaggcgtgctcctgggccggctcctcacttatcccctactcttggtgtggacccaccttcagcatccccctctccccttttcccatgagaagacccctggtgcaatctctgcccctcagctccagcctgtatacccctgccccctccctgcggcactcttcacagggcactygaagcaggaagccgcagggtcagtggatggagtcctggtgaagtctccagccatctttccctttcaccctcccaggagaacaagctcaagttctcggccttcctggagaaggagtacaaggtgaagatcaacccctcctccatgttcgaygtgcatgtgaagaggatccacgagtacaagcggcagctgctcaactgcctgcacgtcgtcaccctgtacaatcgtgagtgccggcatcacctgcaygaccgcgctgtggggcccaaggcttgcccttgcccgccagctgtgcacagaccctgggcctctgtcatggtgggggctgtgtgtgtataggcgtgtgcatgtgtgatgtggcacgtttattttaagcaaaagccatgtttttctgtgtgccccatgccaggcctcacgtgagcaggtgaacagttagacacccgaaaggcccaggctggagtgcagtggtgccatcacggctcactgcagtcttgacctccaagggcccaggaaatcctcccacctcagtcccccaagtagctgggactacaggcgcacgccactatgcccttgtattttttgtagagacagggtttcactatgttgccaaggctggtctcgaactcctggcctcaagtgatctacccacttctgcctcccaaaaggctggggttataggcatgagccactgtaccgggccttcagtttttattttaaatttagttattatctttgtgagactaatcttatttagaaagattatgcttattagaggcatttaaagtatacttacaaaaattaagatagtatgtgttaaatttacacatgcatcttatatgtctaaggacatttaattatgagacaaacatgaaacagagacccccaaaggtcartgtgaatatttgctaggtttaatagataatgaaaccttaaggaaaaactaggtttctaaaattttgtaatttaataaagtaggtattttaaaaaccaaaggaaccacacatcctcctttccgatacaaagctcctcccgggaatagatctcctattcccaatgagtaagcctcgatggggtggaggatctgggtgcgtttgagacacacatggtaggacagaggctagaggccacccccgctgaggacccctctgccgtgtgggcaccacgggaggtgcttcccggggctgtggcttcccggctccgagatggtgcaygggaactttgcatcatctttccttgccccattttcctcctgcagttgtgatgctctgtgttcccctggtggtgacccggagtcctccgcttgcacaacgcttggtcctattkatgagcggcagtgagactcgcgggtcaccccctcccttcctcccgctccaccacccccacagtcagttgctgcatcgtcttttagtgttggccttcaggctttcctcctcccgctccgccacccccagtcgtcagttgttgcatcgtcttctattgttggccttcaggctttccagatgctccacttctgcttggttggttcattcgttttgaacgacacgctgtgatttccagccgttcacaggaggcagccaacaggctggtgctcgctcccactggtcttcccccttgctccatgtctgtgtgtgcacgcataaatgtatatgtgtgcatgcctgtaaacatgtgtgcttgtgtctgtgcatgtacctgtggtggacctgcgtctccttcccccactgtcagagctcacagcatcaatactttgcccttcctcctgtccccagctgtatcagtttgagtctgstggtgagtatgttcactgcttctcayggtccttctgcaaagtgctgcccagccctgctggccrctttgtgtctagttcatgactggctcatgggaacaaccttcccgagttcttgcttgttcaaaacggcctggacccttcaccatgaaggtcggtttggctgaagatgccagtcttaactccacttccttcccccagtgctttttagggccctaccgggcactgtctggagggtgggtgtgtgtgcagaagtctggcgatgtctgagttctcgatctcatcagtgactcactgtcattgccgtgtcttggtgttggccgttacagggcattttcgccaatactccgggtgcttgttgaacgtgttgctggacttcagggaagttgtctgtttgaaacgtgtgtttggttctgtttggttttctgcttctgggctgcagtgtggcgtgaggtggctttctctggccttcttccttggtgcctacttctctcaggacttggtttgtccttgtcctgtggagtggcactgctctctggagtctctgccggctgcactctcctcccgtgccctctgctcctctcctctgctctctgcccccctccctgaggacttggcatttggctccatgtctttccaagttggtggtcaccaagggtatgtgatttgcgaaggggttcactcccctcctgtggcctgtggcggggctgggtgctgacttccattgctacgttggtgtgagctggatcacctggggctattcggaataggcttctcagccctccaaggcagctcctctgctgggccaaggccatgcttccccagcctgtggctgcgcctctgctgtctctccrggtctcacctgggcgggaggctcctctggaggccaggacctgccttgtgagggtgcccttgtgggagaggcgcttgcccaaacctgctgttccccgggggctccttggtggcccccaggactggagctctctgcccagagtgcccctccccagaggttaggactcccatgaccctgtcccctgcccactgtgacctggggtttgcatggtttccttctttcctagttgtggtgaaatcatcacttgtgtgtttcgtttttcctgttctctgctgatttccagaagtgacaagatccagcatttaaggggcagctgcattcytcctggagcctggggctgggtggtacacatcagcccgactccctgctgcctcacccaggcccggctcgctggtgaacgcctgtccagggtggccgctcatcccctttttgtaggaacctcccgtgaaatctgcaaacaaatgacctggcgaggacagcctgtttgctgggctggcagtgagccggccgtcatggcttgaccctccatccacttctgtgaagaactttgggggccctcacccgctgtcccagtgaggcagaggggagacacraggtctcacccagcgcccctgcaggctgatggcaccacagccacaaggctgaggttgccactttttctttgtgtcatccaaacaatgtgtttaaaacacaatttaaggccagtgtggtggctcacccctgtaatcccagtgatttgggaggctgaggcctgatgactgtttgatgccaggagtttgagactggtctgggcaaaaaagtgaaaccccatctgtactaaaagtgaaaaaattagctgcatgtggtaacctgtcggtgcctgtagtcgcatctacttgggaggctaaggaggggaagatcacttgagtccaggagtctgtggctgctgtgaacccggattacaccacagtactccagcctgggtggcagagctaaaccttaactcttaaaaacaaaaacaaacaacaacaaaaaaaacccaagagtggtagagtgcgaggcgcggtagctcacgcctataatccctgcactttgggaggctgaggcggaagggttgcttgagcgtgggagtttgaaaccagcctgggcaatgtagagaaaccctcatctctacaaaaaattaaaaaattagctgggcgcagtggcacgtgcctaggatcccagctactcaggaggctgaggtgggaggattgcttgaacctggaaggtagaggctgcagtgagctacgcttacaccaccgcactccagcctgggcgacagagtgagctgctgtctcaagaaacaaaaccaaacaaaacccacaagtgtgcccttcatgtayaggggccttgaacactggtgaccagacccaaggaggctcctgtgttgggcttttctggaaactgaggtgcagcttttcctctgagccccggggaatagcatctttgctcgagtcagctgctgggttcgtccatggtcctggctggccttcctcaccagcggggaacctaagtgcagacctcagggtggcctcactcccttgtaagtggcaggttcctggtgggtgggcaggtgggtggccagtggccctgtgccactgycacccgtgtctctggggcttgaagtacatggcrgagcgtgcctgtcctgcctcagggtcggcctctgatgctgctgggccccagcaggggctcgtccggctcgcggtgccttgtgtgagtctcttccgtgtgtcctgcaggaatcaagagagacccggccaaggcttttgtgcccaggactgttatgattgggggcaaggtgagtgacttcctctgcagtcctctctgtggtgtttggtctggggatagtgggtgggcagcctgcacgcttctcatggtgccaccayatccatactcgggaaccggatgcccagcggtcaccggcccctctggtatgcctgtgggggtggggaccctgtagagagtcagaatgggatggaagcctcctgcctgcccagctcactggaggggtccccagcctagagggccagtccccagtgggcttgctggtgcccacctcagagagggcagtgtcctttctctttgtgcccagtgggcacagggcgttgtggctgcttcatcacctgcacatgccctgagcattgcctggtttcagttcactttatttactatgacacatactttcagagtcctagatgtgctgtcatcgagtcccaggtcacatcgtcacactcatcagccctctgcggccagtgtccccacctcctgccatgtttccctagtagcttggtctttatccagaactgtgrggctgctgtggggtgcagcgtccttaggagggtcctgctggagcagtggccctaagtgagtctggactgtgtgaggcaccccagccctccacggcaaggccggggcctggggktgctggtgcctgtgtgcagcctgaaggctgccctcttgctgccttcagcgagtgggaagctggtcagaggggtgggcactcctctgggctccgccacctcctggcacaccccatttggtctctgtccactcctgtcacctgctgtttttgaagcaaattttggaattgtgtcattttatttgtcagtatttcagtatgtaaagtccatagagatacggagttcgaaaaagttttaaatgttattatgaaaattttaggcygggcacggtgtctcacgtctgtaatcccagcactttgggagccaaggcgggtggatcgcatgagcccaggagttcgagaccagcctgagcagtgtggtgaaaccccatctctacaaaaaartgcaaaaattagctgggcgtggtggttcatgtctgtagtcccagttacttgggaggctgagtaggaggatcgattgtcctgggtgattgaggctatagtgagctgtgattgcactactgcactccagtgtgggcagcagagccagaccctgtctcagcaaaaaaaagaaaaaaaaaagaaggaaacatttgaacctggagaaaagcaggaagaaytgtagcaaaaccataaacctgtcacccagactagctgaagcatttcacagtaaactgcagacactctagctcttcactcttacatacgtcagcattccttttcataaaatgatgttttccaccagaaccacaatgggagtagactgaaacatcaccacacagtaccaccatccgtcacacctaaagcattggacaggagtcctccgtgtcctgaaatgttcactygggtacttcatgggtcccctgcccagttgtctttgtaaagtaacagacatttctaaaagttggtctgagtgagggcccagtgagtcctcaccttggactggccgtggtgtctcagttctctgtaggttttccccacagtctgtctgttacagacatcgggttgtctgtcygccgtagcctggctctttccgaatgtgtccctccagtgtgtcccagtatgtccctagggacagttctctgtttcctgtcagtcggcagctctagaaatcctggtctcttttaccttgtaatttctgaaaacctaacaacaaccagaaaaccagacttgaggcggacacgtttctggatgtggcgaggtggccaccatcgtgagtgcgcagcagagctggggccttggggccggggagcctccctagctcctctactgaccgtccygacrgcaggttcctgtggctctagcctcaccccsctacagaccccaggaaccaggagcgcctccaagggcctgaacaaggcattttygtgctaaaaaccttcaccctctccttccaggcagcgcccggttaccacatggccaagctgatcatcaagttggtcacctccatcggcgacgtcgtcaatcatgacccagttgtgggtgacaggttgaaagtgatcttcctggagaactaccgtgtgtccttggctgagaaaggtaaccctggaagcctgtgttggacagraaactcactcctgccggggaacgggcgttgtactggcccygggcctttcatcctcagccagttcagctctgcctggacacccagacctagccagccgggctgcaggcgagcagggaacggctttagggagtgctccccgtgcagtgcggaggactcacagtgcgtcccggggcgccttgcatgtcacaggcagtgtcatcccccaacagggcacccttactgccgcgcctgcctggcctgccctctgtatcctccctcccctgccctctcctcctgcccctcagccgtgccttctgccctgggcccctctgctggcaggacctgcctggcctgccctctgtaccctccctcccctgccctctcctcctgcccctcagccgtgtcttctgccctgggcccctctgctggcaggacatgcaccaggccagtggggttgtgggcccccagcttcccccaactccactgcccctcctccgcccacatccttgctcctcactgcctgcctgctcttgggcccaccagtgatctcaggtggcagcacctgcctcatctgtgcttcctgagggcagcctgggccagtcctggggagaccctgggatgtgctgccatgtgccctggagcccatcagttcccacccctgtgggctctactgggcaggaaagtgatttgcccaccagatggtgggagatctgagcctggccttctcgtgctcccctcctgccgccgagggccaagggccccccctagttcaggccgcctgggcttcccaggctgccgcaggtgagagggctgatctgctgttgttctgcaagctccgtggtgcagggggggatccctgggcaccgtccctgtggcctggctgctgccttggtgtccatgtcgctccccctctttagtggtgcctggcaggcgaggtcccttgaggcactcacgggccggcttgcctccggcttggccaggaactgtggctcgtccttccctgctcctctgaccgaagcatctcctctcccccgtgctgcctgaggctcccctcctcmtatgtgttttggggccagctgactcctgctcatctttagagcaggccttcaggcacctggtctggagtctcggtgctggcgtcagggccccgttctccccggcagtgttgctgtggctgactgggctgcagcctgaggtgagggtggagagcaggttgtatagtcastgtgtgcactcacagcgtgtctgggagcggtgaccagtcctgagggacaggcacagagaaagcgcagggccgtggcatctggcagctgctggcgcccaggaggtcgccacccctcagccgctccagccttctggctctattcyggtctacattcctcctgaaaggatccagggagccgctggggctgatcaaggtcgcggtgatccagggaacgacattgtcagcgagccaggactggctccttggctaggcctggttttggggaaggttttggtgcacagatcctatgccacctggctcctgaggagcccccatcttggaccttctgcctcaaggatgccccagtcacgaaggggagccctgcagaggcgggtggccgtgtccagcctgggcccctgtgggagcgggagtgggagcagggagtgggggctggagcggggccacagcattggtccctccacgacccagccccgggtggatgggccggcttgtcctgcagtgagccttgcggctgaggacattggggtcctcacagtgatcccctccaygggctcccctccacagtgatcccggccgctgatctgtcgcagcagatctccactgcaggcaccgaggcctcaggcacaggcaacatgaagttcatgctcaacggggccctcaccatcggcaccatggacggcgccaacgtggagatggccgaggaggccggggccgagaacctcttcatcttcggcctgcgggtggaggatgtcgaggccttggaccggaaagggtgcgagcctgtgcccctgggcacctggcaccgtgaggatggagaatgaagggtgttgggctgggggcattggctggactgggctcttggggccaggccactgtgtgctaggrtcagtgcccacccagggctgtgtgcctgcctgcaggggtgaccatttccaggtgcatggaatggacggggtcygggctgcgggcgaggcccacgtgggggtgctgggctgctcctgtctcggctctgaggctgaatctgcggagtccagaccaggggctcctcctccaggaaaggccttttcccctggggagggtctcctagagggacaccccctgggcacaggcagccccacagaaatgggctggggctgggcaggaccccactgccaggggcgctctgccgggagcactctgctgatttggggcttgcctgctgttgaggttccctggtctaagttgtaactgttaaaattgtttaaaaatagtattttggaaacattttaaatgtgtaggccagggtcgggggggtgggggagtgggggggatgggggggttggggggtggcagaggggaggagggaatcctgaagacagcacccagagcttcatccaccttatccccgcgcccctccgttggctgcactgagctcagagcactggccctcctgcagcccacactccattccractccaccggggttctgttactgtctttcccatcccaggatcccatcagggcactccactgtgtgtggccgtcaggtctccccagtgtcatttggtctgtgacagcttctcagtttttccttgttcttcatgatctggacgttcatgaggaatccagcacgggcctgattccaagcgataattacaaagaaaaggcagtgttgcctgattgccttgaagcactggggagcctgtgaggccttaagtagggtcaggtgaaaccacacatgccatctgaagtcagagctgtgccttgctggcccgagcacagaggcctgtgctccctttctgcgccctcacacagcttcttctgcccgggccccgtcctgggatgcccatgtctgcccgtcygtccctctcccacttagctctgccttgtcctgtctggtcttgcttgcgtttttccttttccatcttcgaggtcccagccaaggtgctccatttcacttcctgcccctccggccgtctgtttttcaaaagctctgcccaggatttcacagtgagccaagttctgagtggccctctccactaggaatgtggcatcagccactatgtcctagcagatctgctagtgatgacatttctttaacagtcaaaggagcaggtgggattggctttagactgacttcacatctctgctcgagcaggtccctgctcaagggcctcgtaaccacccatggccactggctgctgccctggaccgtgcaggccttgagctcccagggccatcctggggcaggggctgtgccaggcaccaacatggcttgttctccaaggtggcccacctggggcgctggctgctgactcctggcccatcgcctcacaggtacaatgccagggagtactacgaccacctgcccgagctgaagcaggccgtggaccagatcagcagtggctttttttctcccaaggagccagactgcttcaaggacatcgtgaacatgctgatgcaccatgacaggtgggaccgacttccctggttgrgkggctgggagggagggagggagggaggggtcctcttcgtgggttggatattccaccttgtttggagagcaaaacccgtgctttcaggacgtcttctccactgtscccatgagaccttactgggcagagccttagaccccagctgggagtttgcgatggcctctggcaatgccagggggccctgggcagcgagacacagcagcacagtccagcccccaggccttgtggaccaatgtgctgagcaggagggggtgtcctctgctggttggaggtcccagrggcagscgtgtcccagcaggccagtagagggagcatgggcccaaaactccctggggtggggtagggggcgcacaagggctgcggaaccgcggcaggcgtcagtgccagtgacaggcagtggtgaaaatggatttcacttgcaacgatgtgacattataatgtagttagtgttttatttcagtgcagttagcacatggtatggtttatctagagttacagactttgtaaggtttgcagctcagggcagttcttcaccgttggcaaaagttgaatccggcgagggctgggaattcacctgccctccactttcagctgcctttgggttagttttagttttgtcygctgctcttcgatgaccgtgtcacctgttggcttcagtcacaccarctcygaccacatgctgggatctgggctggaacctgggccctgctgaggtctgtgataaaggaagtgcttttaaaattgtgaactctgcatttcgtgaagtgtgcttctgactcgatagtgaacagaaatgcatttgtagattcataaatctggcatttttgttcagcacatcaggaastgcaagtcagtatttcctgtgtaggcaaatcccagttagacttaaganggcaaatggagatgccgttccccagcnagtgccccctgccctgaggnggcgccatgggctctccactgtctgcccaggaggcctctcccatgtgcagctctaactgccctgcgtgtggaagacacgttttaaatgccagtttatttaaaggagtgttgggttgaaataaggtttttctaaaatattgtcccaggacataagtgttgctcacagagaagccctgtggccaaatgggcctggtgcagcctggctctgaccagctgcrtgggtgggccccttcgctccagacaggaccaggtggatggtgcctggcctcctgccctgggactctcccctcgggacagtgtgggcagggctccctgctgccctggcccagcctcctttctcccattccaggttcaaggtgtttgcagactatgaagcctacatgcagtgccaggcacaggtggaccarctgtaccgggtgaggctcctgggtccagaggctaggggagcagctnggtgggtccatgtagacgtgttgggtcagattgtttatttcccaagctgagtagattcttggcctgggccagaggggtttgtgattctgatctgtcatcagtcggctgtgcctgcctttagggaagctgtcactgtcaatgtcactccctccgttgaaaaaaacagctcctaatggccaagaaaggaatgtgcggcctggaaactgagtgacgggcagggccctgggagggaccttctcttccctcagtcagggctggcctcgaggaaaggctggcctggtgtgacctgcagcttgtggcagctgtgaggctccctggtggaaggagactgcctggscatgtcccctggcactggatctgcctgggcagttcttacctggtgctatccctatcgtcgtcctgggggccatgccctagcaggaattttcgaggctgggaccttctctccagctccttgctccytagatctagaatgcggtagctttcctggtccgtggggtccccttttcaacgaacaagtgattgtaatgtcctcctcttccagcggatggccccaaggctcggagctcatttggaaacagtcctaaagttctggaatcccatgtttttagcagccccaagccctgtgacgccagagactaatttcatctccttccctgcagaaccccaaggagtggaccaagaaggtcatcaggaacatcgcctgctcgggcaagttctccagtgaccggaccatcacggagtatgcacgggagatctggggtgtggagccctccgacctgcagatcccgccccccaacatcccccgggactaggcacaccctgccttggcgggaccagcgggcatttgttttcttgctgactttgcacctccttttttccccaaacactttgccagccrctggtggtccctgcttttctgagtaccatgtttccaggaggggccatgggggtcagggtggttttgagagagcagggtaaggaaggaatgtgctagaagtgctcctagtttcttgtaaaggaagccagagttgacagtacaaagggtcgtggccagccctgcagcttcagcacctgccccacccagagtgggagtcaggtggagccacctgctgggctcccccagaactttgcacacatcttgctatgtattagccgatgtctttagtgttgagcctctggattctggggtctgggccagtggccatagtgaagcctgggaatgagtgttactgcagcatctgggctgccagccacagggaagggccaagccccatgtagccccagtcatcctgcccagccctgcctcctggccatgccgggaggggtcggatcctctaggcatcgccttcacagccccctgccccctgccctctgtcctggctctgcacctggtatatgggtcatggacccagatggggctttccctttgtagccatccaatgggcattgtgtgggtgcttggaacccgggatgactgagggggacactggagtgggtgcttgtgtctgctgtctcagaggccttggtcaggatgaagttggctgacacagcttagcttggttttgcttattcaaaagagaaaataactacacatggaaatgaaactagctgaagccttttcttgttttakcaactgaaaattgtacttggtcacttttgtgcttgaggaggcccattttctgcctggcagggggcaggtctgtgccctcccgctgactcctgctgtgtcctgaggtgcatttcctgttgtacacacaagggccaggctccattctccctccctttccaccagtgccacagcctcgtctggaaaaaggaccaggggtcccggaggaacccatttgtgctctgcttggacagcaggcctggcactgggaggtgggggtgagcccctcacagccttgcccctccccarggctggcaacctgcctyccattgcccaaragagagggcagggaacaggctactgtccttcyctgtggaattgccgagaaatctagcaccttgcatgctggatytgggctgcggggaggctctttttctccctggcctccagtgcccaccaggaggatctgcgcacggtgcacagcccaccagagcactacagccttttattgagtgggkcaagtgctgggctgtggtcgtgccctgacagcatcttccccaggcagcggctctgtggaggaggccatactcccctagttggccactggggccaccaccctgaccaccactgtgcccctcattgttactrccttgtgagataaaaactgattaaacctttgtggctgtggttggctgacatggggtctgtgtttcactaactaactaactgcaggtggtggtatgagactgtgggaagcagagaacacaggcctgaggcccagggtggtgccagtgcagggatgagacctgcaagtgggccacaggtcccccgtctgaaactagagccggggctgaattacaccccatcattctgggattgagggcagaaaagtttgcatctccactaggtgtggaacccggggtcatgtgtgcctgaacggctagtttttttttttgtttttgagatggagttttgcttttgttgcccaggctggagtgcagtggcacggtcttggctcgctgcaacctccgcctcctgggttcaagcaattctcctgcctcagcctcccgagtagctggcattacaggcgcccaccaccacacccggctaatttgtgtatttttagttttgccatgttggccaggctggtctcaaactcctgacctcaggtgatccgcccgcctcagcctccgaaagtgctgagattacagttgtgaaccactgttcctggccaagctagctattttctaaaaattctatcaatcaatcaaatccagccattactaaacatgctatctggggataagaaacacacacacctttctggtgtgacttgtgctggtccctttgcacctgcgacttttgtctcccactcctggccctggggaccaaagcatcgcccatcaattgtacagttgcagattaagaaatcaggagaaatgagcctagggctctgtgctaccctgaagacccaagaactgggatgctggagtgccatgggcctccttggcctcagacctggtcgtgcaggggttggtgctgccaggttgtcctcatccccacacccaccatgcatctgggygggcggcaccaaggtggtgccctgggagtctctgcctccccaggtctgtggggtgccctcccagggattagttgcttggacaactgagctcagcaccctgggtagggcacttggatgtaatgagctgacaggtgatggtggagcagctgccacacagtgcacccttctcgctcttatctgcatcatctgtcagttttgtaaaaaagacactagtagcttggctgagtgcaatggctcatgcctataatcccagcactttgagaggccaaggcaggaggattgctcaggagttcgagaccagcctgggcaacatggcaaaaccccatctttacaaaacatacaagaattagctgggcgtggtggcacgtgcctgtagtcccacctacttgggaggcaggctgaggtgggagaactgcttgagcccaggaggtgaagttgctgtgagctatgattgtgccactgcactccagcctgggcaacagagtgagactgtctcaaaaaaacaaaaaacccaccaggagcttgtatttttagtttgtatctatcttgcctcagtcccccagccaagtatcccaagtagcttacatagaccaaaaaaaaaaaaaatgaggaaaagatgaaggccagcccaggtagagtgggtcacctctgcttcgtggtcaggagccgaagtgtgcgacgaggccaggagaccagccttgggctctgtgctggagtaaacctatgtcctaaagaaggggctgcctggctcccctaggggttcctatagcctcacaaagacattctaggatgccacgtgggtccccggctcagatggccatgcaaggagatcccaaccctggggcaggtgrtgtctctggggccgtgggtgggtggaacagaaatgacaccctaattagggaccaggagctggggcacaccctggccaggagggggaccagtgttctcatgaactgacctcagaagtaatgtctactcagctgctcccctgcgtaggaaaagtgttttgtagatctgagaaccgctataggtagctcagggtaccccagtgaaggagtgtaaccgcgaggacctctgggctccctgccagcccacagctgctgatgctgggactgcaacttggagaaaggggcgagcaggtgaacaaaacttcctactcctggcaaatttctgagctgctgggactagaaaatttcatagtctgaggctgagtcatggagtggctccaaagcggctagaggctgggctgtgggcggctctggggcatggaggaggcaacattgacccttctcgcgctgcagagagacaaaaggaccaccaccacgattttattcttaaataaagctcagtctaaggccaggttaggtgtacaggtaggtgaaaggggaggaagtgcaratcccgggcacttccactgtgggtgagtgggccagcccaggggaggtggggcagctgagaaaggcaagcaggtacacagggcaggaggggacgatggaaccactggagtcattctgcatgtgctgggaaggtgcagaaagaacctggaccccacgttctctgtgggtggtgccaaaaagctcagcatggtcccgagccccaagagtcccctgcccggactccccctgtccagctcagtgcagcatcaaccaggcagtgatggctgcctgctgccattaagtctcccaacaagatctcaggttgaggggcggcaaggagagccacatgcctgccacccacgctttccacacagccatgctcaggcctccgggcactgcaggcctgcaggggcctccccgcctgggatctgaggtgctctccaggtgcgagctgggctcctgagcattgcaggtgccggcccccyggggcttcaggataccgggctgctgactggaggaaaacgggaggagggcagaggtcttcatgcttccttcccacggccaggctcagtgctggtgctcaggctccgacttccccaggaattccctagaccacaggacaatcaggagccaatcatttgagctcagaccaaagatccttctccacagtcctcacactgctatctaaggaagcagaggctgtgcagagaggaggcagccaagagccccatgaggatgcgctgtagcccagagcagcactcagtgagttaggcagggaacaagcagtgtggtgccaagtcaaagcccaacacacaggcacggagacaaggtctctgattcttgaccctcaacttcagagctattctctggtctaaattttctacacatatcttccttttataatggggaaaattataaccccaaagcaaacccatactctgagcccactgcccccttagcaacccaggtacctgtgctaaagggacacagttttgcctctggaacttccaaaggcaactggagaaaagcagaagtttgcagtagaattactcacgggatatacagcactgggaggcaattcaggccaccaatttcagtcccctgcagggagaaactggcaccttgacctactttttggagctgactggcacaacacaacaaaaaactctatcaccattagcagcagcccctccgtgggtccagtgcttagggtcgaagtaccacatgccctcctcggctcagaagccttgtcccatgcacagggagggttagcatcttgcccaaggccacacagccaggcagtggggtgggggcctgtgtcctctgacaggcaggtaggcgagtctgggcagcaacctgcatagggcccagggcagtacagaggaggccgggggttggtccattccacacactgcccttgtcactactgccaaggcctcaccctcaggcttgggctctgcactcaggcccaggtgggtactcatggctctctgggctggcgcccatgtcctgccagtgcggggcagtcaggagcaccacgtcccttcaagaagcagctggggacaaagaggcttttgaggagctgtgtacgtcttgagaggtgtgtggaagagatccgaggcctgcaagtggctggggtgtctgtgtctgagtgttcccaaacatggccacctgtgagcgtgtgtgcccccccgtgtgggtctgtacatcctgtacaacatggaggcggctcaccctgcatgatcatgtgaacagtcctggagcaggagagaggcactccctcaaacccctctgccaaggaaatggaaggctcccaaatcactgtgactcttggccccactgaggccccctgagcagcttcagcagctgccacctgctgcacgttaggtgtgagccagtgctgcccagacgaagcccctgggtgggaagagaatgtctcacctcagtatccgtggcagctcagggctcttgtaaatgtatttgtgcctgtagccaaggtctgaatgaaagggcacaaactgaactttgaartctcggaagcttcgagctggtgyggcgatgctatagagctggggagagaggggtcagagcctgaggcagtggcctggcatgggggtcccagcctgaggaacaccagcttggcagcctccccttcaatagaaaccagtccagagtcccacatacactgcttgttgccacagccggtcacgaccaggaggcccgggggtgggctgggaggagccaggccccaggcttggctcctgggcacacaccactcaagatactgtcctcacaccttatagactacccttcctctggggagtggctaggtggatgagccagaccaggtgcctgggaggctctgatggcagggatggcacagtcttggggagctgggacaaaaggtatgtgcctcaggcttagctaagatgggcttgatgtacccatctcagccccctccccctctcatttcggcaagggtaggtgggcctgagctgtgcgctgctgggcggctctgcattctgcccctgccctgtgtggctccgtcatctgtgtgccttatggagcctgactgcatgggggctgtcagagcaggaagtgctcccagccctgggctgaatccgtggacgaggcctgcacacacccaactagtttgccctgccattaccaagacccaggctgccttctcttaccctactctgagccacaaatccaatccaacttgctgacagtcaaagcaaattcagcaaaagcaaacactgaggccccacagacagcatggtctggttctggtatcagcgcaattccaaaggcaaggaaacaggctagaagtttctctatcaattttgactgtgacccctgcaatgggcttgggagatcctcatcaaggggttctttgccttcagcccataactgatgagcccttccagctgagttcccaggttggcctgggctctgataacataggcagcccactctgataacccctgtgtgaggactgggaactatctgcttatttttcatagttcttggagacagcatcagtgggcccctgccccaacctttacaccagacctcccatgtccttccgaagcagcctggaggtgacgcagggaggatgaggtggcctcctgagcctgacgtggctggtgcgcagcccgtgatgcagcatgcaggggctgccttcccgcctgcccactcccagcctggtccacccacactggctgagtgtgcaagatgccagctacaccagaggcagaggccaggacccacctttctgccaagctggaagggcaccaccgggtcgtcctcagcgtgcaggatgagcaggggacaggagatgtgcttcacgctgtaggagggagaaggggctagaccaagaccagggaaagggcagagttgcccagaccctctgtccatggcagggatccgggttcagggtgtgttttgggaaacagcctgatttctgctggatttctttttactagacaactgaaagttaactcttcattatctctatgaacatctattacagctagatgacaggtgtcaatcacagctatataactggccctcggaatgtcttctgaaaattgaaaatgattatttttccaccagatatatatatttttaagcggaataattcaggtgggccaagaaacttagtgtaaatgaatgttactaggaatctgttggtaaaaaaagtcaatgttctctaatttatctgtgtaagtgacatttat

SEQ ID NO: 93782 - DNA, 43135 bp, Homo sapiens
  misc_feature (1)...(43135): n = A,T,C or G
taatcccagcactttggaaggttgaggcaggtggattgcctgaggtcaggagttcgagaccagtctggccaacatggtgaaaccccgtctctactaaaaatacaaaagaattagctgggcatgccagcgtgtgcctgtaatcccagctacttgggaggctgaggcaggggaattgcttgaaccagggaggtggaggttgcagtgagccaagatcatgccactgcactccagcctgggtgacagagcgaaactccatctcaaacaaaaaagaaaattagtggagaaaaataataatatcatgtatagatgaaggaaatgcacaaaataaaattgaacattcattaatgattttttaaaactcttaaactagaaatagaagaacattttcttaatctggtagacgacaacctatacaatgtaaaatgctaaaggccctcatggagagaagacagtccattaacagctactctaaatgggacaatctgttcacaccagtctccccctaccaggacagtcgaccaattgccaagaacagtattacctgttttacagctgcacttcatgtggtcccaacaagactatcactacagtgcaagatgacrtctgttggatcatccatcgggaagctaaaagagaccacacaatggcccatgtggcaggcaggaatcataaatgccaagttctcttggggaagagtagggtttccctcacattttttcttgtttgtagtagattttggaaaatggaaggctagccatgagcagggaagatctgacttttttggtgagttacaggaaaaatatttggtagagaaagcagtgatttgtggttatagatttcagggaaccaaaggaagaaatcagagcagtggctaagatgttttgtttgatattattaacaaatgacctatgagtgatggtatcttaggttgaattcttccaaaacaaattctaaagaatgatttgagtgcaagtagtttatttaggaggtgacaccaggaaaaaccagtagaggagtggggcagtgagacagggaagggaggaaagccagtgtgggttaccgctctggaccactgtgttcaatgccaagtagacatgccggagagttgtcctgagtggaaagggagccagggtctttgcacctgacatgggctgaaactgctctcagaagcattacctcctggcacttcctctgccaaaagaaggccctgctgtggagagtcacgggagcacacagtgggacagacacaggcaggaggcctggcagcctctgctacagagacactgcacagtccatgttctgttccttcactgagcagacagctttgcagctgtcctcctggacttttgtgagtaggtggacacatgtgagcaagccacacacaatagagggcttcctccactattactcaagttaggtaaattgaggcagcttggtaactcaccaacctcttctaaaacattctcacccccaaaaagcagggccaggcactcccccctgctgtcagaacacttgcatacatgttctgctggagcccatgtctcagttatctgctcctgcattcctagggcgggtgccaattggcttccttcaccttctgcctgcagggctgagctgcttctggctgacaagtgaaaacattagaagcaccctcatcaatccatccatttcttcaagaaatattttatatgttgacttcatttgagtttacccaaaggcagtttgagtcaagagcttagatgcaggtagttgacctgggaggtgattcccagaagcaggagagagagagagagagagaaccgagaaagatcggaggaccaacccaagggggcattactgagctgatcaccactaagggtcactgaggctcacttctactgaggactcagaattggtcctctggggacagaaggctgaggtatatatccccagttaattaagggttgctgtgaaggaggttcactgtgcattggttaccaacatgtctgtgtccagtgagagagaacgcattcatactcaataagttatatgaagcaaatttattacttacagacaggcagcaagggacaagaggagcattcattgcaagctggttgcctgaggctcaggaaatctgctcagggcaaatggagtctcaactgggcatgccccacttgcaccacagacgaggaatgccagagagcagcctgccctgggtttaacatcccagggtaatgtgatttgctgggcagtgttgaaggacatcctattttcagcaggagactggaactgaccttgggctgttcagccagttctcccttatctcaagatgctgcaatcctagcacattctgcagttattcctgagaactacatggtaaaaaggggactgggtctgtccaaggccacccaaactgccctgcagttgccccggggatgttaaatttccctgaattccaggctgcgcctgctcccaaggcttccggagaaagtcgtaagataagccctaaagaggacagcaacgagatgcttgaggtggcagcattcaggggaactctccacaacaatcagagagctgacggcagaggcaggcaagggacattagcaccaataatgtatgctacaggcacctaccatgttctagacagagtgccagacatgcagcagtgagcaggacagaccaacttatttgttctcatggagcttcatttcagtagtggaacaaagaatttaccaataaacaagtcagcaaacaagtaatgacgggtgttgtgtctttgcaaaaattatgacaataagaaaaatatgacataggaaaattacaacagtgaaagaaagctggcctaaccgactccatcttctaacctccaatctgcctttgcacattcctgggcataggccaaacaaatctgtggagaaacttagtttataatttcactttaaaccaaatataacagcccctccctgaaacaaacctccttcttgcttggggaccagaccacctttgtgaaactaacaaattagccacaagattaaaatttatgggccgggcgcgatggctcacacctgtaatcccagcactttgggaggccagggtgggcagatcacctgaggtcagtagttcaagaccagcctggccaacatggtgaaaccctgtctctactaaaaatataaaaattagccgggcgtggtggcaggtgcctgtaatcccagctactcaggaggctgaggcaggataattgcttgaacccgggaggcagaggttgcagcgagccgagatcacaccattgcactccagcctgggggacaagagcaagacttcatctcaaaaaaaaaaaaaaaaaaaaaattatggcttaggagtcatgcagcccgaagccacaagattcctaacctccataattgctccaatagataatattactattatataacataagattggtgttcaaggtatttttcagaccccacattgtgatggactagccacccagactggtaaactggctatctcgtcttgtgaccccaacccaggaactaacccagagcaagacgaaagcttcatctcttcaggatttcatccctaacccaaccaatcagcactcaccattccctagccccctgactgctaaactatcttttaaaaaccctagcctccagactggcacaatcccagcactttgggaggccaaggagggcaaatcacttgagagcaggagttcgagaccagcctggccaacacggtgaaaccccgtctctactaaaaatacaaataattagctgggcatggtggtgtgcgcttgtaatcccagctacttgtaaggctgaggcatgagaatcgcttgaacaggaggtggaggttgcagtaagcctagactgcaccactgcactccagcctggacaacaaagcaagacactgtctcaaaaacaaaccccccccaaaaaattccttagactccgaatttgaggagaggctgatttgaggagtaataagcctctgctctcctgtttagccagctctatgtgtatcgaactctttattgcaattcccatcttgaaaaattggctctatctgggcgacaggcaagaagaagctgttgggtggttacagtgtgatgagtgctatgaaggaaataacataaaaggtgacagagaataactagaggaggccattctagataaaatggtctgaggaggtgacatttgagctgagtattaaacattgagaaacaatctacgaagggaagatgtggtgcaagacctttccaagcagtgtataatacacacaaaagcccatgccagcaaaaagattttactttcacaaattctagaaactctaagagtaaaaagtggtgaaaagaaaggaagtgataacacatgttgccaagtgcagcaggcagaaacagggccatcaccacttcacgacaggatctcaaaatactaggaagtgtaaattaaaaccatgagatatagttttgtcattattggattgggaaagatccaaaagtttggaaagaccccactggtgaagatgtgtggaaacccacagtcttacacattatttgccagagtgtaaattagtacagtgtctaaggggggcaatttagccacgtttggctaatatattattttaaaggacatatcccaccatagccaattccacctctaagaatatttctgacagatatacccacatgcatgcacaaagacaatccacgggatccagtcacattattcctaacccaaagcaactgggaaacacttcaaggtccatcagtgaaggcccgcataggctaacctctgtaataaccaaatctcagtggcagtgtccaaccaggtgcttgtgggcgaccttccaacaggcaccgcattgcccggctgccaggccgggcctgtgtactgtccccgcatcccatacagctagcacttattcaccctcaaaagcgtcccatcctgaaaataaactcttgcccacttggtgcttcaggaacctgggcttcttccactaatagctctcccagatgccccagtgcgcaggtggggccgtcctctaggaccaggcctggctggggcgcacccacacctccttggccagacgccatgggccgggaaggggctctggcccttgcgggaatgagggcgcctagcataggtgtgcaagtgggcagcccccaccgtggggtccttaagtaagctggagcctgtgagccaggacagtcaggagttgcaaccttggtgatttctaggaagacagaaaatggggtcaagggccgggtgtggtggcttatgcctatagacccagcactttgggaggccgaggcaggcggatcaccttaggtcaggagttcgagaccagcctgaccaacagggcgaaacctcgtcactactaaaggtacaaaaattagccaggcgtggtggcgcacacctgtaatcccagctactcaggaagctgaggcaacagaatcgcttgaacccgggaggcagaggttgcagtgagctgagaccacatcactgcactccagcctgggtgagaacctgttaaaaaaaaaaataagaaaatggggtcaagaaacggtgggaggagggcagatttcatgaacctgcctgctatgatgtggctgcatttccatcatgcattgtcctaaaaaaagaaaaagaaaaaaataaaatgtagacgtggagggatgggggaaattgcacaggccggtccaggctgtgaggctgccccctaccagggacgacgagggccagctccgccgcgccgtaaggaaactggccaagggaaccccttgaatctggcgagggcccgccmtgagacgctcggggaaccagactgccgagcccccctctctgggccgacgccagcccggctgtggactggagaaaaccgcaaggccacctgcagaaagaaaagaaggccatcgcgcctacgcagctgagcacccatactccgcccgcgcctgcgcaactgggtcccccgacccccacctcctctcccgcctgcgcctgcgcggctgggtgcgcccccccgcccagcctgtgacgccacgtgcatggggcggagcccaggccctagggaatcgtggggtcgtatcccgcgggtggaggccggggtggcgccggccggggcgggggagcccaaaagaccggctgccgcctgctccccggaaaagggcactcgtctccgtgggtgtggcggagcgcgcggtgcatggtaagcggcgggccggggcgctggcgggggcggccggggatcaccgactgtaggcgggcctcccccacgcgggcgcgctgcgctccggaggacggcctcggggtcactcgcaccccgggycccacctcctgctgccttcctgtccaggctccattagggctccctggatgtctgggctccgctgaccggtggggggcaagtccagtgttttgggccacagggcgggccaaatagcaggggcctgtagccccagggggccccagccctgctgcgttcattcattcagcccgcttttgcggacccgcccccagtctgcgtcagggacagacccctccgccctggatgagcccggcggggaagcttcgcgtagcagtttctgggaaacaggtaggatcaggccgctcggacaggactgagggtgtaaggacgattcaccctggcattggggtggtgtcccgaggagctcataggtggtcagggcggttctgcccgagctgacctgtgagccgcgaatgccctggaccgagggagggagagccccctaggtggacagactagactccttcagtggaaaacattcaacagccaggagagcgtggaagaggaaggagagatgggagggcccaggggagcgtggaagggagggtgtttttattataagtgcacctgtaagtgcaaagtgcaaaggaagcagccgccgggaagtgcctgggcagctctgggtgtccctccaggcacctgtattccagccttacctgcgcgaagccacacatcccacgtcacacaggatacggggaagtcagccatagcctgcaggcggggaatctgaaacctcgcgcaggagttccttgggagaggtggattacaaggactcttcctcccacccgctgtgcaagagccatgggcggccggtagtcatttttgaaggacctggcaagcactgtacaaatctcaaaattgctttttgtccccctccccttgccttggagagagtggctggctagtgtgtgtgtcgtctgcctcctgaaggttcgggtaaaggaccagggaggtgggcagccctttgtgtcaggagatctggaagcgcctcccctcccaccgcctcctgtgtaaaggaaacagcaggtggtgttgacgggcggttcacgcaccggtttttgccaaggagagaaaaacctactgaaacccaccaggaggatgagtggaagtttctaatgtgcttcattttttgatacagcgtgcatggcaggcatttgcattcatgacccttccgtgtacttgaactgaaaacctgaagaaacyggccaacagattaggcagccatcaatccacatcagatggcccctgtatttccaagaggtgacctgccatccccatctagaaagccaaccaggggacagggtagctcctaccaccgacaacactgctctaccctcagattctcttctctgactcctgcctccacctgctggagggtggcctcggcaggagccacacctctctgtttgcctgtgtgcaccctacttcctacccctgccttccctcagtccccacccgctaccttccttacagcctcatcccaccctgtctctcctttaaagaacagactgagatgrcattgttttcctcaaagagtctgtcagggagaacctgatcaacacattcacgctgtggtgttagtggttcccacagaaaccccatttcctctccggcaggtgtctcagccatgggcaaacaccttaacctagtggaatgaaattgstgtttagatctgggacacaggtacatggagatgacctgttccttggggagaggggwtggtgaacatgattataagaactcttcttcccacccttgtgcaagagcaaggctgttcctggttctgtgctctctcagtactgtgttctagttggactcttgcttttgtcttcctgaacttggtgtgtaacttcagtaattatgtctatgtaaggtatgtctatgtatgtgagtgttttttggatctctaaagtcgtgataaagcacgttcaatttggggactgaagccagggactcttgtgtgctccacsacacactgactgcaatctcagacagttccgtttacacacattcccagggccttggtgctgtcttagggaaacccagggctgtgaggcaggctttgtggggtgctggacacagggcatggcacataaagggtttttttaaatgggtagacagtaaataaggagcaactttgcctctagatttaatataccacctgtgaatctgatcatgtagaatatggttcttagactaacataggacatgataagatttgattatgggccaggtgcggtgtctcacacctgtaatttcagcactttgggaggccgaggtgggcagatcatttgaggtcaggagttcgagaccagcctggccaacatggtgaaataccgtctgtactaaaaatacaaaaattagctgggcgtggtggtgcatgcctgtaatctcaggtacttgggaggctgaggcaggagaattgcttaacctgggaggcagaggttgcagtaagctgagattgtgctacttcactccagcctaggtgataggtgagagagtgaractctgtctcaaaaaaaaaaaagtcttgattacataaagaggattttrttaaacgtattcacagttgtagggtgttactattgctttttgtcctcattattcatccctggagtgtttcagaactttctctagaaatattgtaatttaattaaacatttgatgattacttagaaacctgaaactttgggttatagtctgctaaggaagggagggctgttgtggtatgggaggtgctactttggaacggacattcctagtgccacgtctcttctcccagtctcagctgacgttgccttaatgtgcatcattcccagccccaagcctgtcacctctcatagggtccgtcctatttctggaccagccccaaacctgtcacctctcatagggcctgtcctgtttcccactgatgtcccgctggcatatcaaactcagcatgtcaaaaacctgatcactgctgcctcctgccaaatggccccttcccagatgacctgtttcagttcatggccatcacccagtcctgtggcatctatgatgcctgcatcttcctcctactgcccgttttccccctcagtacactgctgagccatcagcagacccccttcaacaggtgctggctgagcagctgctgggatctggttttgtgttgggtgctggaggttctgggatgggggctggtccctactcctggagtaggcgtcatctaaccagagccagaggggcctagaagaactgcacatgtcatgtgctgtggaaatggcagagcagccagcagcacaagggaggagctccgccagcacatttcagcaggaagaaccttagtcaggcatgatctgtctccttcgttgagagagtagggcgtgagtgtgatcagaattgtaaaacgttttgtatttgacacagtgggtgggccctgccctctttatccccatccctcaccccacagagtgccttaagtccgatacccacagaacttatttctgttacctgcctggcctagccattgaakkattttagaagttgccataaaatacacataacacaaaaattagcaacataatcctttttaaatgtacagttctgtggcattaagtacattcacaaccaccatcaccatccgtctccagaactttttcatgttccctgactgaaactctttacccaataagtcctcctcacccactgccctcagcacctgcccttctactctctgtctgtgtgatttgacagctctgtaactcatgtaagtggaatcctacaatatttgtctttttgtgactggcttatttcacttagtgaaatgcctttaaggctcatccatgttgtagcacatgtcagaatttacttcctttttaaaactgaataatatttcattcaaaattcagttcagctctaaattgaattttgtgtatccatctgtcgatggatgtttggattatttctctcctgtctgttgtgaataatgcttcagtgaatgtgagtgtgtagatatctctttaagatcctgatttcaactcttttagaagtgggattgctgaaccatatggtagttccagctttgattttcggaggaagctccatgctgttttccaaggcagctgcaccatctgactttcccaccagcagcgcacaagggttccagtttctccacatcctcactaatacttgttattttctgtttgtttgatagtggctgtcctaatatatgatgtgatagctcattgcaattttgcattttgctaacgattcatgatgttgagcctctttttgtatgctttttatctgttattttttaaacagattgctatttttgtggttgacttttaagagttctttatatattctaattattaacccctttcagagcagatgtactatttacctgttttctcctgttctgtaggttgtgttttcattttgttgattgtttcttttgctgggtagaagccatttagttaatgtaattccacttgtttatttttgcttttattgcctgtgcttttggtgtcgtatctaagaaatcattgccaaattctttattatttatcttggtggattttgtgttcaagaatttgtccatttcatctaggttatccagtttgtaggcatacagttgttcgtagtactctcttataatcatttttattctgtaaaataggtagtaatgtcccctctttcattccagattacagctatttgagtcttctttctttattccttagtcagtctagctaaaggtttgacagttttgttgatttttgaagaatcaaattttagtttcatttattttctctatttttctattctctatcctcctgtaatctttattattttcctcctccttttttacttttttcctcctccttttttcctcctcctttttctagctttatgtttagtttgttcttttactagttacttaaggtgtacagttaggttgtttgagccctttcttcttttctaaagcaagtgtttacagctgtacatttccctattggcactgtttttgctgcatcccataagttttggaaggttgtgtttttgttttcacttatctcaaggtattttctaattttcattatgacttcttctttgactcttcagttgtttaagattgggctgtgctgaatttccacataattgtgaattatccagttttccttctgctgttgatttctggtgtcaccccattgtgactggaaaagatgctttgtatggtttggattgtttaaaatgcattaaggcctgttttgtagcccaccgtctggcgttgcatgcagggcgctccgttacactcttgctctgtagtgtcgtttgagtcctctgtttctatattgatcttctgtctaatttttctgtccattattcaaagtgggacatttcagtctcctagyataataatattactattattgatagttgtctatttctcttcaattttatcagtgtctggttcatatatttaggggttttgatgtttactgtgtatatgtttataattgttttatattcctggtgaattgactattttatcatgatataatgtacttctttgtctcttgtgacagtttttgacttaaagtctcttttgtctgatattggtacagcaacccctgctctcctttggtcactctttgaattgactcttttccattcttttactttcagcccatatgtgttcttagatcaaaagtgagcttcttgtagatagaatatacagctgacctttgaacaacatgggttagggataccaacccctcacctgcagttgaaaatccaagtgtaacttcagtctagaatgcagtggtgtaatcatggcttactgcagccttgaactccaaggctcaagtgatcctcccacctcagcctccccaaggagcttgggactacaggcgcacaccaccatgtccagctaatttttttattttttgtagagacagtgtctccctatgctgcccaggctggtctcaaactcctgggctcaagatatcctctcgcctccgcctcccaaactagtagcctactgttgaagaagccttactgrtaacataaatagttgattaacacatagtttgtatgttatattactataaggtaagctaatgaacagaaaatgttattataataagaaatcataagaaagagaaaatgtatttgctatttattaagtggaagtggattatcataaaggtcttcatcttcattgtcttcatgttgagtaagctaaggaggaggtgaaagaggaaaggttgatcttgctgtctcagaggtggcaggagtggaagaaaatctggatataagtagacctgtgcagttcaaacccatgttgtttgagggtcagctgtagtcaggtcttgttttttaatctattctgtcaatctgtgtctcttgattaaggagttaatccatttatatttaaagtaattactcatagggaaggacttgtttttgatrttttgttatttatatatattttatagctttttttgtccttcattactaccttattttgtatttagttgattatttgtagtttccgtttttgattcccttctcagttccttttgtgtatatgctacagacatttccattgtggttacaaccatagggattacatacataacagcctgaagttatagcaatctattttaaattgatatcaacttaatttcagtcagacacagtaacctctcctttacaattccatctacccccactttgttattgatgtcacagattacatctatatatattgggtatgtacccattaacataaacctgtaattatttttatgcatatatcttttaaatcctgaagaaaatattaagtagtgttgcagaccaattgtacactaatactagtttctatatttgtccctccatttgcctttgctggaaatgtttgtattttcttacagcttttagctgctgtctagtgcccttttgttttaactttcaggactccctttagtagtctggtagggcagatctagtggcaatgaacacgcacatcttttattaatctggaagtgtcttaatttctccctcatttgtgaaggacagttttgctgaatgtagaattctctgttgacagatttttttgtktgtttgttttagcagtttgggggtatcttcccactgcctctggcctctgaggtttctgctaagacattggctaacagtgttattgaggattctttgtacatcatgagccattcttttgctgctttcaatattctgcctttgtctttacacagtttgattatattgtgtcttcatgttggtctctttgggtttatcttaygtggggtttactgagcttcttggatgtttatattcatgtctttagtcaaatttgggaggtttttagctattctttcttcacataatttctctgccccattctctcttctctttcttagayttccataatgtgcatggtgcacgtgagggaggcccctaagtccctgaggctctgctcactttcctcattctttttgttcctctgacttgatattttcaaatgtgctatgttgaagtttgctgattcttctaccgactcaaatccctctggtcagagttttcagttcagttttgtatttctcagctccacaatttctgtttgattcctttttataatttctcattttgttgtcatatgttattttcttgatttcttttcattctttatctgttttccttcagctcttttagcatatttaagacagtcatttttagtcttggtcaagtacatccagtgcctgcatttcttcagggatgggttctgccacttcattttcttcctctgaatgagctgtgttttcctgtttctttgtatgccgtgtgatttttttgctgaacgttgggcatttgaaaaacagctccttgtcccagtctttgaagactaactctgtattgggaatggcccccaccaaatagcaggatctgcctaagtgtggggatcagctctggatgaaggccaaagtttcctctggtttcttctgaggatgcatcttccctgggcctgtgtatgtgtttttttcaatttccccatattcgtggctgtttcaaaatctcttactttcattatgaatactttcaagcttccctttggaatataccaagaaatgcatttggagtaacctttgtttttctatcattgtaaatttagattctggaattggggtttggtggtgtgatgtgttgctcacatgtggccagaactcctgctcctaaaaggactttgagatcaaggaacacatatttaatctcccctttatgccttggttttagttcctctttccaagttgaataaccaatttttcattgctgtttggtttaagttggtgctttgaagcttaatctcagtacccttaactctgaattatcgaattttgataaaaatgtgtgcccttattttttggtaagagaaagcaggtcttaatgtctgccggaacacaatttatttgccttgttggctccattaaacttttacaaagctttatatatatatatatatcttactttctcaaagtctcccccagtccctccttgggcctcagatgttctactgtatttctcacctgtcattcttgccccaggtatgcgtggggctatagtcatcctacagctttgcctagcagtgcccataaccatttccctgacttcctatctgggctctgagctcagagtcaggtgaaacagagatctgttcctcaggcagcccaagacagattaggatgttgcagaaaggtccgctctgctccctccagttcaagggaaggaattgggaaccgggctgccgcattcatcaggtggtgccatgctggggaggcctggggcaggggtgagtgaaacacctcagagttcctgacatcctgaatgtggctgcttctgggctgggcattctcttggttgctgtagatcgttgcctgttttgcagagctcctatgcaatattttaaccagtctctagttgtttttagtgtttctctgtgggggaacaagggcctttgagcttcctcttttgccgtcttgctgtgtcctctccctgtttatggattttctacaggactctgttgtgtgtctggtgacgttatagaaggtgcgggggtagaggagcagcctcttccattctagagaagggcttggatgccatgctgggcagcagcagcacaagacaagctgagtccctgccctgggggctcatggcctagtggggagacacagacctacaggaatcaggtctatgaatactggtttcatcactgctggtggtgggtaaagggagctcagagagtgcgtgatggggcatgtgcaggttgggggcatccgggaagggggtggcagtgacatttcagtggaggtttcagaatgaagacacggtgccagtgtggtgggacaagtattctgggaatgcgtatcagtctgtgccaggggcctgaggcagggagaggctgagttctaggggcagaagaaggcactgttctcagagcactgtgggcaaggacaaaagaggagtgcgatgaagccacaggggccggcagggacaggggccggcagggacaggcccaggcagaggctgcaacatgatcctgagagctgtgggaagcccccgagtgtggtgggacccaggcccagaatagggctggggaggggctgcacgttggcacctgccaggagaggctttttgcagccctgcccgtggcagatgctcagggaagggtggtttttcctgtctcctgctccagtgtgggtggccaggccactggtgaggcctctcccctcggcacggggcactgtggcagtgcttgtcttacctctctgggcctgaggatatccagctgtggccacaggcgggacctcaggaaggaggggccaggaatggcctgctcccsgtgctttgccccgcgggccctgtccttccgttctgctgtgcccaaacagcctcaggtagcgcaggtcgctgcgggcttgctcctttgactgctactgccccctcctcagcagtgcagccatgctgtccttggttccacagagatgtcacctcctgctgcccttctgtaaagcccgcatgtggcacgtgctttccctgcagcctgttctgagcacattgaatccccacagtcacgaggggctctccaatgagcagccccaccttgcagatgaaactggcccccttgaggggcatgttgcccactgtcayacgtagctgcgggcagagccggtgccacttccagcccggcatcctcctgatccctgctcccctaggagtggccactcaccaggaccgactgagagagtgagggagggacaggctgatggacgttccccaaggttggnggccctagagtcggcccncacttcttgtcctttgaagcctcaggttcccacatgctgcctcgcactggagcagccaatgaaacttgaacaaatgctttcattttgggtatatcgaaccaaaaacartggcacccagtgaatttattttgctactctagtagaatttttgtaggctttggaagtacacagacattattttctccttggcaggaatgggctatgtgaatgaaaaaaggtatccgttatgaaacttccagaaaaacgarctacatttttcaggtttgtctggggctctcagtagttgcccaagggacggagtttaaacctttcgaaaagtaaattgcctgaatagaagtataactgaggattgaaagactgaatcagataygcgcttctgttcccatgaacagtttgggaacaccatttacatgtggcttcttttacataaatcgccatgtgtcccaagctggtgggaccctcccttagaggagccagccactgtggtctgtgcaccaggtcagcagctgcaatgtgtgcgaccttgagcaggctgtcctgcctttataaacctcagttcctcttctgtaggatggggatcacaccttctggaataattatgaggctcaartgaagcttctgattcctggggggaacacggagcagtttcaggttgaacattttgtccctgggcctggggaygtctgactctccttggatcctagcaccctaacgtgcttttcctgcctctccccccttcccaccagcagccgcagcayggtccttggcaaacaaggatgagaaaaatatccaaccacgggagcctgcgggtggcgaaggtggcataccccctggggctgtgtgtgggcgtgttcatctatgttgcctacatcaagtggcaccgggccaccgccacccaggccttyttcagcatcaccagggcagccccgggggcccrgtggggtcagcaggcccacagccccctggggacagctgcagacgggcacgaggtcttctacgggatcatgtttgatgcaggaagcactggcacccgagtacacgtcttccagttcacccggccccccagaggtacccgcctctcatggcagggctctygggatctcctcccctgtgctacagtgttggccgggtcccctgccacagactcacctgggagcttgtctaaatgcagtttcccagagatgctgacgctggtatgggctggggtccaagcatctgaatttcccgggagtcccagatcactcttacactagtgagtggtgaccatgctgaagggcagctgagaccttgaggtgtttggtggcctgtcccctccccacattcaccagcaggtcaggtggctaggaccatgatttaggccagtggttgtgtttggggctttgtggggagttcaggcaggaagtatccccagattcagtcccatgggagccagaaaatcaggaaagtcagataaataataaaggctcctgggcttgaccgggagctgccaggtgggccaagatggccaggggcaacagccgagaggggtctcagctggataagggagctggagcctgggcttcgttggctatgcttctagggtgggcctcaggccggggtgggcggcttctcttgaggggtccccctcgccacccggttcctctgctctccaaccaccctcttcccttggttccctgatgcccctctcgtgcccgtgaccctgaggttcgccctccatgtctctctagctgtagccagtgagagtttgcagcccctgtcaggcaggtcccctgggtgtcccatgctcttcttggctgacctggaacctgtggggtagacaccatcctggcattgcacggttctgctggtgctggacatttmtagctgctgtctccaaagctgagtggtgtattttatttacttttgactccatctgcgttattttttaacttattacagtagtgaaatatttagatgccatatctgcttatctctaaaagtggcttcgaagcctgtaatcccagctatgtgggaggctaaggcaggagaatcgcttgaacctggtaggcggagtttgcagtgagccaagatcacaccattgcactgcagcctgggcaacaagagtgaaacttgatctcaaaaaatttttttttaagtggaactttttaaaaattaataattaaaaagtaaagcttcttcaaagctaagtgtgcaacagacatcagcctgcgatgcttttggagccatgtcccagggttttctctttggagagaaaagactttgcaaaaagttttgtccctgattttttctggtccagtcttcgcgtctgaatttagtatgcctccttattgtaagcacaagttcataccactcctaataatttaaaacactccattttttaaaatgaagaaaataccctaatcttgagaaccctttaataaattcatttcagaatcaaggaaatggtgttcctattttcagtttggagtcacttatcctattccgctgtttattgaattggcaagaattaactatgttaaaawttaacactgatgcagttgttttgtgtgtaaattatcttcagtaaagttggatttttattttttattttatttttattttttttgagacggagtctcgctctgytgcccaggctggagtacagtggtgcgatcttggctcactgcaacctccgcctcctgggttcaagcgattctcctgcctcagcctcctgagtagctgggactacagatgcccatcaccacacctggctactttttttttcttttttatttatttttatttawtttttttttttttgagatggagtctcgctctgtcgcccaggctggagtgcagtggtgcaatctccgctcactgcaagctccgccccccgggttcatgccattctcctgcctcwgcctcccgagtagctgggactacaggcgcccgccaccacgcccagctagtttttttgtatttttagtagagatggggtttcaccatattcgccaggatggtctcgaactcctgacctcgtgatctgctcaccttggcctcccaaagtgctgggattacaggcgtgagccaccgtgcctggccgtaaagttggattcttaaaaggtaaaatgcagggcacatagcttgcacctgtagtcccagctactcaggaggctgagatgggaggattgcttgagcccaaaagttcaagaccagcctgggcaacatagcaagagcccttctctttaaaaaaaaataattataataaatataatctttaaaaaataattataataaataataattttaaaaaaataattaattaagaagtaatgttctggccaagacattaggtattatactcatcttgttctgatgaacaaagagtcagaatttagacaaggaatagctgaagggcccctgccacttggggattggtctgtgttagtgtctgtctttaaaaagtgtggctagtcatgattgtatgtgttctcctgtgtgtattcatagttgtacccttttcaacatgttttccccttagaaactcccacgttaacccacgaaaccttcaaagcactgaagccaggtctttctgcctatgctgatgatgttgaaaaggtaaggatcctctcccgtgtctccctgttcaactgcrgaatgtgttcaagccagttcttttcctttgaatgtggtaggctgtcttcacaaaggaagggggctttgacagtgctgcctgggcatttcatgccatttgggatggtcagaagagagaaggtgtgcagcgcgcgagcccagaggagaacgcgcccccacccggccccatcctctgactccaccgtgccagcgctcacttctccaacgtgggggtcccgaggtcttggtacaggtcagaagcacaaatcctgcaaacttacaaaaatcattatttgatagtttgcttattcaaatttttacgctaatttagtcttgtgaattttgcataatacatttttaattttttgttgtggtttctgatygaagatagcaaacattgactgaaaaaaaaaaattagtgttggccaggcatggtggctcacacttgcaatcccagcactttgggaggctggggcaagaggatctcttgagcccaggagttgaagaccagcctgggcaacagagtgagaaccctatttctacaaaatttaaaaattagctaggcatggtggtacacacctgtcatcccagctacttgggagactgaggtgggaggatcacttgggcctgggaggtcaaggctacagtgagccatgattgtgccacaggtgacagagtgagaccttatatttaaagaaaaaagttaaaaacgtattacaggccaggcacagtggctcacgcctgtaatcccagcactttgggaggctgaggcgggtggatcacctgaggtcaggagttcgagaccaagctggtcaacatggtgaaaccttgtctctactaaaaatacaaaaattagccaggcatggtggcgcacgcctgaaattccagctactcaggaggctgaggcaggagaatcacttgaacatgggaagcagaggttgcagtaagctgagattgcgccactgtactccagcctgggggacagagtgagactctgaccccatccaaaagaaatgtattatgcaaaatccacaaaaccaaataaatcgaaatttaattaaaattgtcaaataatgatttatgtaagtttgtagcattgctacttctatctaaagtccttaaagcttacagctgcactaatacaggatgcctggttttctaccaaggcactcacaaaatgggctatggagagagttktaacttccatttggttcaagcatttcttaagtcatgagctagtacattgctcttgtccacaaacgtgtcatggtctcagacaatgtagttcaagccttgctttcctgtagcttagttaaaaaagaaattgaaattagtgattctagagtgaccttacagttaaacctgattaaattagataaatttagaataagctcctaggatttttaaggccttacttgtttgagtaggtgacacacattcaagtgggacaaatgtccacgctccccagggtagtagcacagatgtccctcctactccaggctgcctcggaggcccacgtcctggctctcttagcatcctttgaggctggttgatgtgtatgtaaacagagtcatctgtattcttctccccatttttacttcacacccacggtggtgtccacaccgaggcctttggctttgctgctgagcaggataattagagagcgtttatgtcggcatgtgcagagcctccttagtttttttggctgaatgttattgcatggatgctgcacacttacctcatggaaccagtccycttytgaaggacatttagataatgtccaatctttctytcttgacagtagaaaaaggctgcacctgacacatacttcattacccacacatgcaaggggcatcgctcagatgaagtctctattttttttccccgagatgaggtctctctctatcacccaggctggagtgcagtggcacaatcwcagctcactgcaacctctgcctcccaggctcaaatgatcctgccacctcagcctcccaagtaaccgggaccatagatgcacaccgcaatgcccagctaatgtttaaatgttttgtagagatggacatcttgctgtgttgcccagggtggtcttgacctcctgggctcaagtaatcctgccacctcggcctcccaagatgaattactggagtggaatttctggataggaggaacgtgtttttcccttggacagatgcaacccacgtgtccccacagaatcacacctgtctacaacaaccagccacattcccagaccttcactttcatgcacacactgacataggaccttatccagccttgggttctggatccagcactctggcaggtgaagtggctcctcgttgtagttatcatggggtttagtgccaggagggaccccagaattgcctagtgccacacctttgcaatgtccagyggagctgaggcgcacctgagatcgcccgtgaggattggcacaggtctggatgtgggcttgggtcaccaggctgcagtagaacagcaggcttattctcctgacctgtcctccccctgccatgtttcacctggtccctgtgttcccacacacctgccagtaccacttgcatcactgtttcctgcagattttgaaaatcagaaaaaaaatatttatagaagcaaaggccagggatggtggctgacacctctaatcatagcactttgggaggctgaggcaggaaatggcttgaggccaggagttcaagaccaacatgggtaacacagagacacagcgtctctataagaagtttttttttgttttgatttgtttttttgggatggagtctcactctgtcacccaggctggagtgcagtggtgccatctcggctcactgcaagctccacctcctgggttcatgccattctcctgcctcagcctcccgagtagctgggactataggctcccaccaccacgcccggctaattttttgtatttttagtagaaacgtggtttcaccctgttagccaagatggtcttgatctcctgaccttgtgatccgcctgccttggcctcccaaagtgctgagattacaggcgtaagccaccgtgcccggccagaagtttttaaaaattagtcgggcatggtggctcacgcccttgtcccagctacttgggaggctgaggaaggaggatcacttgagcccaggaattcaaggctgcaaatgagctgtgatcaagccacttcactctagcctgggcaacacagtgagactctgtctccagaaaccaaaaaaacccaaaagggtggaagcagcacgtgtgacmctgtatgctgcacytgacagaccctgctttgctcttaccacgttcacagagcgctcagggaatccrggaactactggatgttgctaaacaggacattccrttcgacttctggaaggccacccctctggtcctcaaggccacagctggcttacgcctgttacctggagaaaaggcccagaagttactgcagaaggtgagcctggccattccccagtgccattagccagccctcaggggcaactgatgactgaaaacaactgctgtctcaccagtgcygcaccatcaggcaggacacagatgcttctgaagaaaagtttgcagcatcacttttaggtggagggatggtgggcagatgatgctttgttccttgtgacatttaaggttattcatgttttctggagtgaatctgtgttttataataaggaaagcaacttgattttagaagtgtactgtgggccgggcatggtggctcatgcctgtactcccagtaatctgggaggccaaggcgggcgaatcatttgagcccaggagttcaaggccagcctggccaacatagcaagaccccatctctaccaaaaacacaaaaattagctgggcattgtggcgcatgcctgtcatcccagttacttaggaagctgaggcgggaggatcgattgagcccaggaggtcaaagctgcactgaactgtgattatgccactgaactctagcctgggcagcagaacaagaccttgtctcaaaaaaataaataaaagcgcatggtgccttcaagggacttgatcctggtcagaagtttgtgtgtgctgagccccggtgctgcagctgaagcccgtttgttccccatggcagctgctcatcctgctcctggtccgatgctcagacgtgactgtcgaagggaccctgtggcctctcccagtcccrgcacgtcagggccaatgtgtctccagctgcccagcattccgcagtgggtcctcctcaccctccgtgctgcctccactcatttacctgcaggaggagggcacagggcacgcctgtcagggtccctcacagggttggattgtgcacgcgtgcaggtggggtgtgcagaggtgctgaagcttctgtgggtagatcttgctgaaaggtgggcaaggaaataccccccgaggccagggccctggtgaaggtggcygtctgccttagagggcttccggctcctttatctcacatcccaaagcagggcagtgtttggagcccagcaggcccagtgtgccccagcttcccccagtctatgcagcccccagagcccttctaarccccagcgggcttaggacagggtctccagggcagcatgggcctcaacgagcccgggcggtggattaacttgcaatggattagagaggcctgaacacactcacagaacatggcaggtgcccctggggtttcgttactgcctgccaatagcatgatgcaaaacccttaaccataaattctaaaggatgaagaaagccggtctgagtgcagtggtatttacaactaattgatcacaaccagttacagattttttygttcttctccacccacactgcttcacttgactagctagctagctaaataaayaaatrtattcattcattcattctaaaggatgaagtaacatctctctttacatttaggtgaaagaagtatttaaagcatcrcctttccttgtaggggatgactgtgtttccatcatgaacggaacagatgaaggtaaatggctggaagcacctctgtacagtggggctgtgcagtgaggtgggtgggagcaatcctgctgcttctaaccatccgccacccctccccgccccatgtgggagcctcctcccccgtccgatgctcaagtaaagaatcatggctgttacagccccgttctgattcacaattgacatgtcacaaaaggatctttttggggtcagtgtcagagacagattatcatcttgaccaaccccaaacctggcatgaatgaagcttctaaaaacattgtgtttttagttttaagaacatttggagagaatctccagttgccaccacatttagaatgttgytgcgttgttaattctaagagacatttaaggttcctcactagctcctgataggtcttcagtatgaccttgagagtgagtgtgtatggaggaggaaggggagcactgggttctttttctgcttcttccaaaaagaggaggccagtaataaccagaggagagacgcagcatttggtgaagtactttaggattcagcatgctgtgtctcaggacagtcggccatagctgctggattcatttatgagaaatgctcctctctgccgatgatctgaaggctgggtgtagtgcggaagtgatccctttatgctccccagatctgcaaatagtcatttaacggtcctgtgtgttatgctttcagcatctcaagtgattaaaataatgcctgtgacrctctcttgcaggcgtttcggcgtggatcaccatcaacttcctgacaggtgtgtgcacactgcatcacagaggctagccgatcacagacacctgcggagggctcgactgggcctttcgagagcaggagcctcatttctgctctttaagataacccctcagggtttggcagtgttgctgactgaccatagggtgttggggatgggtggggtcacccacctgwctcacaggtgtagatgctaggagtggggtgcttctctgcaggtctggggcatttttctcccagcacagcccctgccctgtcccctgcagaacatccaccaggacccccatcctctcatttctaagagaagtaacgaatcaaaccagtcatatcttccaatattgaatgtgatgtgaatgctattcaccttctaattggattcctctgctgtaggtggaacagggaacagaaacatctgtttttagaaacaagtgacaaggagtcatttttcttagtgcatgtggattttttgtccctttgctggaattatgggaaagagcagtgtttctgatgtacagacaaaaaaggaaagaagtttcctgtcaggtttgcccatttgccactttgggggatagaaatgttaggagatgggttgggagcctccgcctgagatgctctggggagtggagatgggctgatcagagcagggcccagctcttcctgggagctaagccagcggcctccctcccagctgatacrgcagtttcagtatctcccctgaaggttcatgctgtcccatcaggatccaaattaaaccacagctggtggagccattactcttgtcccttagatatrtagtgtacccttaaatggagatttgtcartagctgagctacttctctgtcttttctttcccctgagggcctggctttcaccctggcttttctgctgttctcgcgatcttactaatgccccwgtgctgtttttgcttgctgtgctccaggcagcttgaaaactccaggagggagcagcgtgggcatgctggacttgggcggaggatccactcagatcgccttcctgccacgcgtggaggtaacaagccctgccgaccacagcgctctttccaccccgaggccacaccgccatgggggtgcagggtggggcctgctgaggtgctgcggggtggggtggggggtggggttggccaggtctctggacccctgcggtcatttcctcttctgagagctggactcactcacagatgatgcttctggcttggagttttaattccaccaggaaaaaagccaaaaacagaaatttggtctttagaggggtgataaattagggaataactggaaacgtttgggccagaggatatgaagtgctgcctctctccccttcagggttccgaaaggaacaagagcagaaagattttgtccagttcataggttgggaggaagcttccagccttttcaagataaatatcctaaaggagatgaaaacacttcccattgaggcacctgctgctttaaaaacagttccctcctcacccactcatcctcctgttatgggtagttttccatggaagggtgggctcataggtactgatatgatcgtcgtcatgtctgggccrtgtttgtcagcatgggagaggttgcctgtgggaacgaagcaccgttcttcactgggatattggctcctyattgcctgctcctgtctcgcagccagcgacctagtgaacagctcatttaattggctgcacctgaccatcccctttctttcaaatgaattcagtgggtggaggagaattttctagaaagaccagcaggaaacatagttaccctcgttcttctccagggcaccctgcaggcctccccacccggctacctgacggcactgcggatgtttaacaggacctacaagctctattcctacaggtctgctttcgggaacaggcgtggggaggcgccatggggtgggtatgcagctcccagggcctcgcatggccctcttgaggtcatggatggcagatctgggaatccctgtgctgggaatccacccagacctctctctcctcctcctccttctcccgcctcctctgccctcctccttcatcctttaatgtgtctacagtatacgcacattcacccagacctctctctcctcctcctcctcccacctcctctggtccttctccttcatcctttatctatagtatacgcacattaacccagacctctctctcctcctcctcctcccgcctcctctgtcctcctccttcatcctttaatgtgtctacagtatacacacattaacccagacctctctctcctcctcctcctcccacctcctctgtcctcctccttcatcctttaatgtgtctacagtatacgcacattcacccagacctctctctcctcctcctcctcccgcctcctctgtccttctccttcatcctttaatgtgtctacagtatacgcacattcctccttgtgcacattcctccatgtgtgcttattctgctctactttggagaaggtttgagaagtgggagggaccatgggccacacaggagtgttccgggccacctattgccacgtgcagtcttcagtcgattcttgttataaagcaggagcatcccagactggtgtcgagtcrgtcccactcaccacagtgtctgcagctcctggatgagctcctgccatatgataggccctcgtgtgttgaattaattagctaagtttcctcaactctacagaaacaggcttttagaaggagcagagaagctcactaactgccttgctgcaagctcccccttccccactcggkctgggtctcagaggtgagcctgccatgacctgtacctgccatggcagctgccctcactgaggtgtcrttcccacagctacctcgggctcgggctgatgtcggcacgcctggcgatcctgggcggcgtggaggggcagcctggtgagtggacatgttgccccgggcccactttcacagcctctgccctccattctcagtgggaacgaggagcccctcgggagggcaccagcttggccctgcaggagaggtccctctgcccctcccaccccactgctgtcccgctgcatgctgggcacccagccaggccagggcatgcgagtggaggggtgtgctgcagatcttgttggtggcaccctgatggggcaggaacccagggtggtgttgtacctgtccaccttccaaggtatttctttctttattttgagacagtgtctcacttgctctgtcacccaggctggagtgcactagcatgatcccagctcactgcagcctctgcctgccgggttccagcaattttcatacctccgcctccccagtagctgggactacagatgtgtaccaccacgcccagctaatttttgtgtttttagtagagacggggtttcaccatgttggccagtatggtctcgaaatcctaccttcaaatgattgcctgccttggccttccaaagtgctgggattacaggcatgagccatgacacccagccccaagttattttttaaaagatgctgatgaaatcccttctgaagcactgagctgaaactgagggaaccagggaactgcacactcatcccctacattgggagctggctttagggatgtgaagacagaaccttgtacagacagcacaggagggctgtggggggtgctgggttcttgccgtcagggaaaggttttctctctcgctcatgattccagccttgcaagaacatccctcctcccttgctctgcgaagggtcatgaaatgtgggcttggcccttcctgagacatggagttgacctggggacacagcctgcatcagggccagggcctctgctccttataatgggcatcacagcgggcatggactcttaggagatctcaggattgccatggtctgcttcaggggctggggcacggccctgaggctggtggtgcctctcttccctgatggaactggccaggccacagaggccttcccaaggccttagtgtctgatgtgtgtatgaggcgctcaccagcacctacgtgtgctccagccaaatgcccttacctcagcccccagcgccccattggcccagcacccctgcccacttcttccgagggcctggtatctgacagggtaggatgttcaactggaattttcattctcctgtgcatgccctacttcagttctttctttcaaatcctggtgtttatcttcataatggtattccttttgttgcaaacaaaaaccatgtctatgtctcagaaacagctgcagcccttattctggggccaaaaaacacctattatttagccaatgagaaaaggcaggtacctctttgccctttgtggttcccagggagtcgtggctcagaccctgagtcctctcacacccagcagagcagcaagaaggtctcatggtctcctcgtcaggctgtacaaagtgcctgttttagacatttgggggctgtgaggacccaggagaatgagtctctgttttgttaccggttattgcgtaacagaccccccaagtagagtgaaagaacagcaaacagcagtcgcggctggaatctcacagcagaccacacaggctcatctgggcagcacctccgctggggtcctggggatctgtgcagctgcatgtggctgtggcagctgtctagaccctcccgctggggtcctggggttctgtgcaggtgcatgtggctgtggcagctgtctagacgccccctgctggggttctgggggtctgtgcaggtgcatatggctggggcagctgtctagactccctgctggggtcctgggggtctgtgcacatgcctgtggctgtggcagctgtctaaatcccccgctggggtcctgagggtctgtgcacgtgcctgtcgctgggcggctgtctagacctgggcgctcttccacatggcctcgccccagcagagcagcctgggacacttttgtggtggcttcaaaaaaggaaggctaccctgatgccaccatttcctgcccattccatcaaggaaagcaggtccaggccagagtccagggatgggaccagcacctttcggtgggacagcagcctgccatcctcgaaaggtgatactggggccagccctgggaccaatacgcttcctttgctggttttgagcccccagcttgtgtgtattggagcagcagattccattcaaggcatggtggcacctggtggcacttgttctggccctgccaccaacctaccagctactcacagcctcagtcacctataaaactgggtaatgatggctcccctcctaaaaggactgtcgtcacacttcactgaacagcccttggcccagtgcctggcacccggcgtgcccagggccgtgagctgggcatggtcctggtagcggtgtgcttcctggccaacgaggctttgctgccacttcccagggaggtgttgccttcccagtggacctggaagccactcagcttcccccatcctgtgtcaagccagggcctccgcgactcctagctcagccctagtccatggcggtgatataccttcctttctctttcctttttaatctctgtttcagctaaggatggaaaggagttggtcagcccttgcttgtctcccagtttcaaaggagagtgggaacacgcagaagtcacgtacagggtttcagggcagaaagcaggtacggggagggttgctgcctgttggtttctgcgggtgagagtggtggcctcctctcccccttgcctttcccacatcccatgggacgttccacgggaggctcctgacctctctttgaagagcctgtacctgccctggaagtgaaggtggtttggctgcaggggcctgtgtctgtgctgagagccagctccttccctctgcctctgttcaacattcccctgactgtcaccagaagcttcctcctgagggctgatttcctaacaggcctgcagggaggaaggactggaccagcttggggctgagatgcagggctgggactgggagcccaggcactctgtgctgtgctgggcgggaatagagggagggtctgcttccacccatcctgctcgaggctatggagcccgctggccctgggcaggctctagtgctctgcacccttgcagtttcttctgagagaaatgttcaaacgccattcccagactgggcactcggcatgaggggtgcatgccttcgcgaaccgttcaggtccttccaagtcaatcacccactggtgcgtgtaccggggggccgcatcaggcacagcaggactgcacagctgtgtcccacaggaggagccagacagtgaagctcatcgggaaagccttccaagagaaataacacggggcggggatctgagagggcgatcgcagctgtaactaggacagccaaggacggcctcgtggggtaacatgggatctaagacaggaggaggtttcaagaaactgcgcagatctgaagcagcagcaccccaggccgcacaagcagcacacaccggggccctctgtcagctgctgtgtttaatgaacgaggaggaggtggtgtggcttggtgggggacaccaggaggaaatgagatcgaagggttggagcatgggtctgtggaccrtgggaaccctggaagcactcggaaggatggggcctggtggaggaggactgggaaagccgggaagctgggtcaaggtgtggggtgtagaggcgccctcagatgtccacacggtccattggcctccggggtcctctgttcctgttctccctcaagccatgggagcttggcaagtgagctgggcctccacttccttatctatgacatagggagggtgcaggccccctgaggaggtgggactccgggctggcggagggggaatgtagggcagatggtcccaacaggccagaggccactggtgtcaggcatcagcagcttcctcctcagagtccaggtctgccgctgccttcgtgcccacggtcttcactccctgcgccgggaccaacaatgccctggctcctgagggctgcttttgacctgtgcggggagcagccccaacttggggtggggtcttacaggcttctggacctgccttttcctgacaattcaggtcagagtctcaagtcccctgggaggggccccaagcagctgtgaggcctgggtgctcggagcccactgaccgctagccttrtgcttgtccccagcggcaagcctgcacgagctgtgtgctgccagagtgtcagaggtccttcaaaacagagtgcacaggacggaggaagtgaagcatgtggacttctatgctttctcctactattacgaccttgcagctggtgtgggcctcataggtaagggggcccrgatgggctgagcaggaaggtcggggcggcagggggcgggggtggagggcgtgtgctccccgaggcagagggctggtggcaggcaagcaaccctgttgtcacatccctgcaggaggccagaagcagatttgagaaggcgtctcatcctgagtaggaaaagatcagttctttgagcccttcagtaaaacctcgtggctggtgacttgctgttgattccagttcctgctggaaggcaggtcctgccttgcactggcccacgttgtctcagactcagccactctgccctaccctgcagccctggctacaggaggcctcctgtgacctgcaggtggctgccctgtacccatgggagggatcagctcactgaatgtggagtctctctgactcaccctgcacagcccaggaagccagattagggcggaaaaaggtattcagagtttgctgaggctagtggtggtcaggctgtgtgggaactctggagggggttgcagagtcactatcatggtgagatcatcagaatgtatggcctgtggtacggataagaacactactgttttaaataagctgacacggtgccggctctctgggccctgcagcctccggcgggtctctgtgctgacaaagctaccactgactgggcctgggtggaaggtgggtggtcaaggtggaaggccaccaataaaccacccctcagtgtatttttcaagaacttttttttttttttttttacatttaggaaactgataccagaatactgttgctgagctcagttctatggcttcaggaaacatttcaatttctctacttttatttttcttaacttaaaattttactcaatttggggtcctgggttcctggtgagctttctcgggggacactgcagggttgggttgtggggtgaccctctcagcccccaaacccaccccacaccacatcacccagaagccgtcctcagagcacgtgagtgccgcctacagctggagggcctgcctcagaagccagtcagtgccttggggctcttgggctggcgttccccgtgccagcctcacgtctcagtggcatcgccaacctcacagtgctcctgcagactgggtgttgtgtctcccacagatgcrgagaagggaggcagcctggtggtgggggacttcgagatcgcagccaagtacggtgagtgatgctgcaggggccatctcagcaggggcaggcgccccgtgatgctcgtgacgcaggcgctggccctgactctcctgggtgtagcccctcctaaacaatggccacaggcaggggcctcggccccagctgagaaaggaccaccgtccttgtcccaccctcatggggtcgtgaggaactgggtccctcgattccacttcctcagatgccattttactgctactagggtaacccsaagagtgatttcccctgggatgtcccagtaagttcatgattgtcacacaacccttaagaagccaaggccctacagaatggagcctgggatgtggggtggagggctgtccccggggtcgcaggtgaccagcccagcagaccctgtgccacacactatgcctctccactgtctccttcacgcctggcccagcagccaagccttggtgaacatgtcctgctcttggttgcccttcccaatgtgtgggtccaaagagctcaaatttgtacatctttccagaaaaagtactacccttcccctcccccaaaagtggcttttttaaagcttttgtgtcattttcccatttgtgcccatggacactgggtatccacaactacagcaggaaaaggctttgagcagaatcccaggacagctcttggtggatttgtccttcctcaagagcaggagtggattgttctgagctggctttggtgttttctttccccagaaagcttaggttttatgcagcttgacacctgggagaggtgtccagggtcttagatgtagaaatgtggcttgggagacattggcccatgaccctaacaccaggcgtgcaaatccccttggagcccagacccagtggcagccggggttgccgcccacctgcctgtgctgtgcactgggtgccttctgcgctcagctgcggccttgtctgtgaatccggagtgcggagccagcgggtgcctgtagtgggtggaattggggtctgcacttgcccctccgcccccaggtgggagtcacctggagcgtgaagggacgtgtctcatccccagtgtgtcggaccctggagacacagccgcagagcagccccttctcatgcatggacctcacctacrtcagcctgctactccaggagttcggctttcccaggagcaaagtgctgaaggtaagggtgccctcaggtcacgccccagcccctttatggagtgaggggcctagaaccacttctccagttgctggggtcatgtcccccagcccatccctggcttccaaggagscacagcctcctgatgcacaaggctttcctgtctgtgtgatggtcccctctccctctctgtcttttcaagctcactcggaaaattgacaatgttgagaccagctgggctctgggggccatttttcattacatcgactccctgaacagacagaagagtccagcctcatagtggccgagccatccctgtccccgtcagcagtgtctgtgtgtctgcataaaccctcctgtcctggacgtgacttcatcctgaggagccacagcacaggccgtgctggcactttctgcacactggctctgggacttgcagaaggcctggtgctgccctggcatcagcctcttccagtcacatctggccagagggctgtctggacctgggccctgctcaatgccacctgtctgcctgggctccaagtgggcaggaccaggacagaaccacaggcacacactgagggggcagtgtggctccctgcctgtcccatccccatgccccgtccgcggggctgtggctgctgctgtgcatgtccctgcgatgggagtcttgtctcccagcctgtcagtttcctccccagggcagagctccccttcctgcragagtctgggaggcggtgcaggctgtcctggctgctctggggaagccgagggacagccataacacccccgggacagtaggtctgggcggcaccactgggaactctggacttgagtgtgtttgcctcttccttgggtatgaatgtgtgagttcacccagaggcctgctctcctcacacattgtgtggtttggggttaatgatggagggagacacctcytcatagacggcaggtgcccacctttcagggagtctcccagcatgggcggatgccgggcatgagctgctgtaaactatttgtggctgtgctgcttgagtgacgtctctgtcgtgtgggtgccaagtgcttgtgtagaaactgtgttytgagcccccttttctggacaccaactgtgtcctgtgaatgtatcgctactgtgagcygttcccgcctagccagggccatgtcttaggtgcagctgtgccacgggtcagctgagccacagtcccagaaccaagctctcggtgtctcgggccaccatccgcccacctcgggctgaccccacctcctccatggacagtgtgagccccgggccgtgcatcctgctcagtgtggcgtcagtgkcggggctgagccccttgagctgcttcagtgaatgtacagtgcccggcacgagctgaacctcatgtgttccactcccaataaaaggttgacaggggcttctccttctctgggattcctctcgttgagcgacagtagcatttgcccacctggcacctgagatccctgtttactaaaccttagaaaagctgccaaagggggtggcgtatttccagtcctgtcgacatccctctcgaggacacagcagtggagggcccctgggggctggggctggtgaagggtctggctggtggccccggccctcccagcgtctgttgagcacagctcctcctgtgccaggccagcagcccacagcacggccaggtgaggcctgggcacataacctcgagtgagctgcaagtccccatgtcattctgttcagcaaggatctggttttggtctggaagcgtcccaaaggtgtcgcatgccagggaaactgcagaccagcccacatcccgagtgcttgtgcctgaagccccccacaaccaactgtcacaggaggacaggatctggccctagggcctcccagggctgcagcgaatgctgatggagccacgtggtggaggcctgcacagagcaggaaaggacaaaagacaaaaagaggaacagtttcctccctcccgcctgggctgggtccccgccagcgcctttacttccataatatccaccagcttaaatatttaaagaactccggaggctgagaatcagacgcatgaaggtaaagccaaaatcaatttggtccatttaaagaaggtcggtgacctcatgcctgaaaaaggcaaacaactggaagttttccaaaagtgcaccaaataagtcatggaatatttctgggcccggcaaagtatgcaagtcatttctctctgagtgtcttttgtgataatgaagtaggctctcatttgtcaaaaatagctacacgtgcacatcgtaaaagaagcaaactagggttgcttgaaaattctgttccctcaggatgtgtgtattgacaagctcagacaggtctcacacgccccacatgccaccccagcccgcgtaccccacatcacttagcacccattgctgcccactgagctgcctcagtcctgcagtccccgtgtttggatggcaggatcccagggcagtgagtttcagggcataagcagacgttgccacgttgccttcaatcctactggacaagcatcggtgctggcctcccccatgtcctaacagctacagccagtttaatctttgccattctggcagatttaaaaaaatgataactggtagttttaatatgcatggatctaattcatcgggtatatctaagttgtatttccgtgaaacatctgttcatatcccttgccgattttctataagattgtcatcatttttttgttaattgtagatctttatttattaaggaaattatcccattatgatagaacgtgtccaaaaatttatctttttgtgacttctaggtttcatgtcataattaggaaggcttctccacagagatagttttaaaagttaaccaaaaggtatttttatattttagtttcttaacttttgttaagaaactaaacgtgcctggccttgttttttaattaattaattactttatttatttatttttgagatagaatctccctttgtcacccaggctggagtgcagtggtgcaatctgggctcactgcagcctccacctcccaggttcaagcagttgtcctgcatcatcctcctgagtagctgggattacaggcacccgctactgtgcccggctgatttttgtatctttagtagagatggggttttgccatcttggccaggctggttttgaactcctgaccaggtgatctgcccatctgggcctcccaaagtgctaggattacaggtatgagccaccatgccctaccttaacatttttaaatacgttcaggcacaacaaatcattgttgcagggtgaattttatttttagaaccatttcagagtcatcagaaggcaaatgtggccaggcatggtggctcacgactgtaatcccaacactttggagaccgaggcaagtggatcacttgaggtcaggagtacgagaccaccctggccaacatggcgaaaccccgtctctaataaacataccaaaaaaagaaagaaaaaaaaagccgggcatagtggtaggcttctataatcccagctactagggaggctgaggtacgagagttgcttgaacccaggaggcagaggttgcagtgagccgagatcgcgccactgcactccagcctgggcaacagtgagactccatctcattaaaaaaaaaaaaggtaaatgtgatattcagactagggtaataccatttttggataaaatcaaggatgatggccgggtgtggtggctcatgcctgtaatcccagcactttgggaggctgaggcgggtggatcacgaggtcaggagttcgagaccagccctaccaacatggtgaaacctcgtctctactaaaaatacaaaaaattagctgggcctggtggtgcatgcctgtagtcccagctactccagaggctgaggcaggagaatcacttgaacccgggaggtgaaggttgcagtgagcagagatcgcaccactgcactccagcctgggtgacagagcaagactgagactccatctcaaaaaatcaaggatgatgagagaaatgaggcagttccaggaaggagctctcaggagtgtgcaggtcgcagccatcagtggcagagtccccaggcaaggtctttgaggagccacacttggcgtgcagtctctgttagaggtgtttaatacgacctgtgtggaggccatgagatgtggggcatgtttgaaacaactggggctgttcatcctgcaacaaggagcttttggctggacagcaatataacaggtgtcttcactattactgaaggattgtcagacgctggcttttgccgggtggctccagaggcggtggaagttatggggacaccgctgtcaggtttctcactcaagcattgctcactcgcgcgatgaacgatgtccagggctgaggcgggcttgtccttggcatgtgccccttcacctgcgggcatcggggtgcttgagaaaggagcctgcgtgatcaggttcttccagtgtcttcacactcatcagattcttggattcggcttgaaaatgattttgaaaatcatggtcaggtaagcatacttacctctttcttccttaattgtaaatgaataacggtagtcgtgtttatggagtgcttgctgtgtgtcaggcatgatgcggactggactgtgcgttgtgtggtcagagattgaatcctcagcctcaaagtaggtaccgtgcatctccgccctgccgccgagagagaagcaggcctgcaggagcttggggacttacctggacccactcagatgcggttctgcaggcttcctacacccaaacagtgggctgccttacttcccaaagtggcaagtgtttccagaggaatgtttactgatcacatcaggccgtgtgctcattatcaaaggcaggtctctccactgaagaatcagccgtctccataacagtgtgcttgtaatgcttacaaaaatagttacacagttgagagaaataataattccctctaggcctcactgctgctttatcattttgacagcctctgattattttcctgttattgattcagtggataaaggtttccgtttaagagcttaagtgcagccttgtgaatcttagtacctgccacatgatttacatagttcagaagcagacatccccctataaggcctcctgtttcaagaagcctctctagaggtcagaagagcccacagccaagttttatggcacagcacagggtggtaggatggctctaaatacggcttccgagagggtcgagtgctcagctggcacagagctgtagttcctgcagacctaccagggaggacagccagggatcgcatggttttgtaaattaaaatgcccaagctcagaggcctgcaaggacttaccttaaagcaacaggcaggccaggtgcggtggctcacaactataatcccagcactttggaaggctgaggttggcagatcacaaggtcaggagttcgagaccagcctggccaatatggtgaaaccccatctctactaaaaatacaaatattagccaggcatggtggcaggcgcctgtagtcccagctacctgggaggctgaggcaggagaatggcttgaacccaggaggcggaggttgcagtgagccgagatcaagccactgcactccagcctgggcgacagagcgagactgcgtctcaaataaataaggcaacaaggagagtctggatgcagtggctcatgcttgtaatcccagcactttaggaggccaaggcaggcagatcacaaggtcaggagttcaagaccaacctggccaacatagtgaaaccatgtctccattaaaaatataaaaattagccaggcatgatggcccatgcctgtaatcccagctacttgagaggctgaggcacaagaatcacttgaacctgggaggcggaggttgcagtaagccaagattgtgctgctgcactccaacctagggggcaaagcaagactctcaaaaaaacaaaaaaacagggagagttttcctgttgatagtcacctgggctgtttcctgtttggagctttatgaataaggcttctgtgaacattcttgtgcaagtctttttataggcataggtttttatttcatttggatgaatatctaaaggcagaatggctgggtcatatggcatgtgaatgtttaactttataagaacctactgggctcggcgcggtggctcgcgcctgtaatcccagcactttgggaggccgaggcaggcagatcacgagtgtcaggcctctgagcccaagccaagccatcgcatcccctgtgacttgcacgtatacatccagatggcctgaagtaactgaagatccacaaaagaagtaaaaatagccttaactgatgacattccaccattgtgatttgtttctgccccaccctcactgatcaatgtactttgtaatctccaccacccttaagaagattctttataatttcccccacccttaagaaggttctttgtaattctcccaacccttgagaatgtactttgtgagatccaccccagcccgcaaaacattgctcttaacttcaccgcctatcccaaaacctataagaactaatgataatccaccaccctttgctgactctcttttcgggctcagcccgcctgcacccaggtgaaataaacagccatgttgctcacacaaagcctgtttggtgatctcttcacagggacgcgcatgaaaacgaggtaaagagatcaagaccatcctggccaacatggtgaaaccctgtctctactaaaaatacaaaaattggctgggtgtggtgacgtgtgcctgtagccccagctactcaggaggctgaggcaggataatcgcttgaacccgggaggcggaggttgcagtgagccaagattgtgccactgcactccatcctggcaacagagtgagactccatctcaaaaaaaaaaaaaaaaacctaccaaaccattttccaacacgcctgtaacattttacactcccattagcagtgtgtgagagttcctgtataatataaactagggttttcagctttctataaattaagagatttcagaggactttttttactgactctccagacattggcatagtattcagccttaaaaagaactgaatttctagccaggtgccatggctcacacctgtaatcccagcactttgggaggctgaggtgggtggatcacaaggtcaggagttcaagaccagcctggccaacatggtgaaaccacgtctctactaaaaatacaaaaataaaattagctgggtatggtggtgagcacctgtaatcctagctactcgggaaactgagtcagcagaatcacttgaacccgggatgcagatgttgcagtgagctgagattgcgccattgcactccagcctagacaacagggcgagactccgtcataaaaaaaaaaaaaaaaaaaaaattagctgggcgtggtggcacacgcctgtagtcccagctacttgggaggctgaggcaggagaatcgcttgaacccagtaggcggaggtagtggtgagccgagattgcgccacc

SEQ ID NO: 93783 - DNA, 64754 bp, Homo sapiens
ccattctcagaagctactggactggaaatctaccaaaatgtcaatgcctgcttgcacttaagtccaagataaagttaattctagttgaactaacatgaaaagaaaaccacaaagggtgttcctgtctatatccctcagacatgggcttgggtggctatgtctctgctccagccctaaagtagtgtgagaaacagcggttgtccctggcccagagtgacggctgatggggatggggcagttgtgagacaaagaagacattgaacggaaggaaggagggcaggagttctccagagccagagtccggtggtccttagggaaatctgtggagggccccacactggcagaggctgtgattttgggaaaggagtagaaactctggctattaagtctggcatgttcttaatgggactcatacacctcttggaattttagagctcaaggattcagaatttggatctcattggttcattttgcagatgagaaaactgaggcctagagatgtcaggggccttgccacatggcaggttggaggcagaacagagggcagaagccaggaggggttctaggcctctcccttggctccctgtctagtgctatctgtacactcaggagctccatgaaggaggaagccatttttgatccacacaggaggcaggacagtggccacagctcaaagttctcagagctttgcccttggagtgaccccaagatgtccctgtgatctcagagacttacagctctcaaatagcactaaaagtgacgcctggccttgagcgagagaaggcagtgcagctaccacagtaggggaaccccaggagaggcagcttgggaatggggaagggcattggcatgtgggggcaattgctgtgccccccttggccctgcaggcctggcagttagggactgttctcccaggtgtaatgattttcatggtgtcttccttgaacactgagggctgcaaggggtcttgtggggaagtctgttctatgggtggttgatggatgatgtccccagccgtgcatgctcatggatggctggggtgagtgattaagagttaccaggatttggtgctgctggaattgagttaccatgtcgctcatgctgaccaggagctgccccaccacagagcccaactgttctgcctcctgcaccgccctcagagcatcagagagcatagctgcctggccgggtatcccgcagccccaggaaggacgccaggcagttgctggattgcactcccacttcccagctcttcttgcgcttgtggccaccctctctcgtcctgtgcttcgctgtgtgttgttgggttgaccccgcagggtcaggggcgcactgcacttctgcagggctttgtgcacagtgccacagtgcatgaggctatggtgtgttgcagccatatgggatcctcaagccccctgctgaagcagatgtatgcgcagactccacatacctcatcctcacccggagttcatggggacatcgagaaataggagccagaagggaagggagccctgtcaccttgtgaagctgccaccatggcagccctagagatatagctgagaaagctcctcattttttcttactcaattttttttctcatctctttatctataggtaagcttgcttaaaagaactttgggtggcctggtaacttcaggacgcttcgccaattaccagaggaagtaaggcttgcccaaaaccgagcaaaccagaaccagtggcccctgtcacctttagatcattagcatatcattataatgctaaagtccccactcatagaagagaatcatagaagagaatcgttgccactttctgcacacgtgtcgtatgaagagcctgttcatgatctgcacctgcgtgtctgaagttcctccccacataagcttacatagctcctgccccacatctaaccctgttacattccccagctccccaccgctctggaagaagctgtctttagagcaagtgctctctccttctccatgcctggccgggaataaaacctgcttttccttttccccaatctggtgatctttctttgtagctgatgcagagtagagaaagaactcagtgaactggtgacgaagccaattccagactcccagcatctgggtcctgtacttgatctgagctctgccatgctcttctaaattctgtgttttggttttactgtgcatttcagctatttgaacagtgtctgtctctccccaatttgaactgtgacctgcttgcttgcagggaccaaaactggaccgtccttgtccaactgagagccctcagctcttggtggtgcacatgggagaagctcacaggtttcttctgagtgtcattggaaagaggtgtgtgtgtgtggggtcacagagacaaatgaagagaacaggaagagggagagatggaggagagaagaggaagggagggttttaccagctctttggagaccactgagtgcacagggagtggttggggatccgttatcagccaggactgtttcttgagcatctgagcactgcgactctggagtaatgggcatggcaggagctatgaaggcaaatggcgaaggccgtgttggtgggctctgtccctaaagctgttaaattaagatgctctggacgctatggctctgctacctactagctggtggcctcgggtgagcttctgtcctcctgcttattttcacacatgtacagcaagggcaagagcattcactgctgcaggttgtagggtcagtagtcacagctgtgttggcatttctggcctaaacattagtaccgagacagaagcgaatcccggattcccaagaaccctgccctctaagcacttcgtgtgtctgcagcccctgcctgacagcatccagcgttccaagtgagctctcctgaagttgaggccagcggcttcttagggagaagatgtgaccagcactgcccagatagcctgctgccctgtccaaacctctgagggtccttcgggatgcagggccaagagtgggtgctccttgtgcttgttcaatcttgtgcttgttctgcaagagttgatgactggctgccaggagggaggcagtggggacgaccttggcctgggctgtgacactcagaaggaaggtctcaaggccacctctaggtaactcgggcagcaagaagtgcagttctgcaccacctggttggttctgacatgtttggttctgaaatgatcacttcttcttatccaaccagaaggaacgaggtagcatttattttaaaacagagttagttctacctacttttctcattgcaactgtagaagaccttagaaacgaaggtagtaggaagaaggagccattgccgtgcactctccatggggtggctgttggtgccaggcccagtcacaagcagcatagctggtctcttctctcacagggctccctcctggtaggaggactaggaagataaacacagagctaataagtaacagccatggagaaaagtcaagtcaggggttgagactagggaatgagggcggaggtataactttatgtaggtgacagggaagaaagggctcttggatgaagggatgtttgaagacacctgaaggaggtgagggggagtctctgtggacaactgggtggagcattccaggcagaagggacatcgtgtggcagtcctgaggtgggagcctgctgggtgatgggaaggacaggaggaggctgatgtgctggagccccaatgagtgagagcagaggaagagggtacactggatcagggagggcaacgcttctctaacgtgaatgtgcatgcagctcccctggggcttaagatgcagattctgaggcagcaggtctgagatggagcctggcattctgcatttctacaaagtatccaagtgatgctgctggcccatggaccacacgttaagtagtgaggctatggcctgtgggccagggaatgatgtggtctttgttttgaggagactggggagcctttggattgttccaagctccagagcaagttcctctgactcttgttttaaaggaattgcactggctgctggttaggctgtcaggggcaagggtgaaagcaatttgaagcctactgaataatcctaaaagagatgggtatggttaggatggtagcaggaggggatggtgatgggggaagaggttagtgctgcaggtgttctgaaggtgagtcacaggatttgctgacaggctgcatgtggagtgtgagggggaggaatctaggatgacaagggtatgagcccaaacaacaggaaaatgccatttccattcactgacatggaagatccgtgttgtggggaagaatcccaggacttggtatgtttcagatgtgaatgagacatttgaatacaggactgagatgtggaggaaaggtccaggcgggaggtgtcaatatgaaagtgagaggctagagagctggctgctgtttcctagggggcaggggagaaagggggatttgagggctgagctcctgggcacttcaacacttggaaggcagagagaagaaaggcacccagtacagggcactgagaggcaatagtcagtgagtgaaagaaccatgcatttttcagcctcagttgttgtatcagttaccactgctgagttacaaaccatcccaaaatttagtggcttaaatttattccttctacaattctgtaagtggactgggaggttcctttgcatcccaggtgttatctggggtgactcatgaggctgccttggctgggacaggagcctccacattggcgtcattcttgtctgggagttggtcctggctgtggatgggacagcttcatcctcgccctgggtcccttcctctggaaggccagccccgcttcctcacagctcgcagctgggttccatgggaggataagctggggctacggggtctctcaggacctccacatggaactgtcacagcatccctcccaccaggctgtactggccaaagcaatccagccagccagggtcctcctctggacagagcagcacaccatcatgtgcaggcggtgcaggcgtgggaaggaagagttggtggccgtctttgggaccccctgccacagttaggagctttctcagtttacaattttactactcactgacctctgcctctcagtgccctgtactgggtgtctttaatattctattcaaatgaacttaggccaacgagctccccactgggggcactgggtgttagtcttgctcttcccttagccagctgcatgctctttagtaagtccttttatttatttgggctcagtttcctcattttttccacctggagtttgacagttggtgggaatggacagcactagataagtttcaaattaagtagactagtcgggtgccgtggcacacgcttgtagttccagatactcaggaggccgagtcaggaggatcgcttgagctcaggagttccaggctgtagtgagctgtgatgggaaccattgcactccagcctgggctacaggccctatctctaaaaaagtatcataaataaataaaggagaaaatgcaggtcaagcgctagcactgtgcagggcatgtgttatgctagtagatgtcactgattctccagctctaggtacactcctgtcttctctggcagacagcagcattccccagcaggggctggtggctagcccacgcagaggctcctccaatggcaggctcctcccctctgcaagccctacagctcaagggaaagaaactttcccatcacagagaactcaataaaccagttttccaaaatctctcttccctgtgtttacccgtttgttatgaatttacttcttgggtgtcagaatatttaagaactcggtggagaccagttttatacgtttccttctgtccttcctggctccacagctgcaaaaacatcatccccactactgagcttactatggggccacgcaagggtagacgcttgacagacattgtccaatgtattccttactgcagctgcccacccccgccgtccccgccccccagggagacattacttccgtcttccccaaaaggaaaacgaggcaccgagaagttaaggaacttgctcaaggtcacagagtttgaactcaggctacagatgctgcagcaactggagaaagtcctcatcgccccatatcacccaccaccgacccccagcaggacgtgacccccgccaggacggaggccggcagctggggggctggagcatgggacccagaacacggactcaggcttgcgcagcctcctggcttctaggcgggagcctagaaaggcgccagcccctttcgcgtgctgctgagactccaggggtggggttcactctcaggggcgcacaaaggcatgaaaaccttggcttcagcctctgagatgcggaactgaccgacctattgtcttgggacccaccagtgcgcttgggtgcaccagcccccttaacgttggtgccggctccctcccrgctcctccccatcccagagggtcccctcgccccaggccctgagcctgcgtcctggggtcctgggccgcacgtgcctctggcagctcgaagragctgtcggggcttgcaggagagcgtgcaaactgaaaccaaaacaggccgackcgaggaacatccgggtgggaccgcagactcaccggagcgcagcgcctgggccagggcctgggaccctgctccgccccgcgctcccctgcaccccttccccacgctgctcccctcttcctaagcggccccccctctcccgggcagcagaagaaggggtgggacccgggcgggctccgggagggggccctggaggaatggatggtggcsgaagggcggagcaggggcggggcccgcggagactccacggggcgccccgggcgtgaggcacccactctgggagcacagagagctcaggtagcctgcctagatggcggcgcgcaccctgggccgcggcgtcgggaggctgctgggcagcctgcgagggctctcggggcagcccgcgcggccgccgtgcggggtgagcgcgccgcgcagggcggcctcgggaccctcgggcagcgctcccgcagttgcagcagcagcagcacagccaggctcgtatcccgcgctgagtgcacaggcagcccgggagccggccgccttctgggggcctctggcgcgggacactctcgtgtgggacaccccctaccacaccgtctgggactgcgacttcagcactggcaagatcggctggttcctgggaggccagttaaatgtctctggtgagtgggcttcgggagacccaggacgcccccaactcttgggtcccgaggggactcggagcctctcgccagcggcagccgtccccgggcagcgcggatcgcagccctgcaggggcccctcctccggtattccgtccgccccgcccgctctaagcagtggctccacgtcacccmgtccctcatcccatcgggccccagatccacgtgcccagctcgggccggcgcccgcggggacccggcggccgcttgggacgccccgctgctggccttgctcggcgcggctcctcgctcggcggactccagagttgcgttaccgggtgcatagcgccgctgagcaagagccggcggggagccgcgggctacacccgagcgccccggagtcgggactttcccgttcccataccggggtggagggaaaaacaaagcggtggcggttgtcactgcgggctgcggtgcccggggatcagcctggggacaagccctgcccacgtaaacaaacagagctgtggcgggcgacctggggaggaggaaactcggcgtggcagctggaaccagttatttcttcgctgcgggcctggggcctggggcctgtggrcgggaaggaagtaacggcggcctccccgttctcgttctcggcctcagagaactgcaccccagcgacctggggcctgctttggacccgcggggtctgacgtcggccccaaacagttgactggtggtcagttgtttggaacttgctgagcagaggccctgctgctctgctaagatttggggctgggggtcgtacacagcaccctcgcccccacctaaggcgctgactgggcaccgagggggaggccctgaactgcaggcagggctggccacgcagggtgggtgccaagtgcgaggtgggctccggatgcagggtgggcctgggtgtggggcctgcggggaggggctggcagacacggtgttgatcagagggatgcagaccagaagggtggtcataaccagcttgctggatttgggagtgtttaagaaaggacctgcgggtctttatggcagggtcaccagggccccattttctccaactcctccctcagttgtccttgttgttctgcccccccagccctcagtctcctcattgtgaggatgggggcagtcatgctcagaggttaggctgagtgctgcaaggtgtgcagcagacccagcgcttactggtgacccataagcagtagcgattttagataacttcagaaatagtcatacaattatagatagtgtcttgcagttatttttcaaagaaattggaaggaactttggacctcccccactccccgaaattgtatattactttgctggtttaattaaaatgagtcacttactagataagtgttttctttaacattgagtcagcagcaagtgcccttgaactagtgggaaaaaaaccaaaccctttggtttgcagagttggggcaatgtgcccttgaaggagactagagcagcttgcccaaggacagaggtggaaagtgacctgctctggacttgtgaggccaaggtcatggggaacattcacagttggcctgtgcacacttgcagccccactcagataagacagtggggcggacctcctggggcyaacagcaaggaccttctgaacctcgctcggtcaggatcagggtgtggtcagcaagcattcttctgtctccttttccttcacttatttcttctgataatatggcctttatggctacgttagccagaaattgagcttcagaaaactaacttgaaaaacagcttttcagcagctttctcccctgggatgtgcgtgccctcctgttcatgggtcagcaatatctctttcctttgccggtgtctgcaaaccatagagaagacagtatgaaaaagggccaggccaggccatgactcttctgggagcatctagaaagtcgtgggatggatgagaacactttggtctgatctgtcagctgtgtgtgataaagtcagatggcttgttccaaaggaatatcactcttgaagaaagcttcacctcaccccctcaagaataccagtggttctcaacgcatggtcttcagacctgcagcatcagcattacctgagaacttttgagaaatacaaattctggagcccatcctggacatctggaatcagaaaccctgggatgggacctgacacctgtgtttataacgagcccttcagatgctccagaggacactcgggcttgagaaccactggcctgtaygcctcaaaccagggcagatgaaggcacttctaaaacagaattgggattagtgtcctggccttggccctattaaacaaacagcaagcaaatgatgggctgtggatggcgcaacacagtttcgtggctccaggtgtctttagaatcatgactcgggttgatttcttgctttccctgtactgtactttgcatgtttcctcatctgtaaaacaagggccgtatgtaactgaattctgtcctagttactattgatgtacatcaaaccacccctaagtttagtgacacaagataacaacaattttatattcctcgcagagtctgtgagtcaggactttggacagggcccgatggggatgactcatgtcaaagggcaaaattaggacaaatttagtttaaagaccttacttcactttattcgtgattatagaattgggaaacaccccattccataaaayagaaggaatgtttgatgagctgaacagaggaggatggttttatagacagaaggggctgaaggatgcagacatggagaacaaaaagtggactggttatttcaaagctacttttgttgtaaaggtgaaagtggaaggagctcccttatcatgccagcttgtttggagatttagctatctttcactctccttgtttcttagaaggtcggataaacaacttagtttccatttggtgacaccgcactttagcaagagtgactccatttttgtgtgatctattgggcctcatgcagctcagtccagaccagtggcctcctatacattttatttaacacttgctcctgctcctcagtgtctgaggttggagtcatctgcctgtttctcactcccaagtctggagcctggtttgggacaacttgcaggctggcttcagccagaactgtggcccaaagcacctcctggggcttgtcacagcatggtggctgggcccaggcaatttcctgcaaccagaggtccaagagaccagcacagatgttatcaggcatcttccgacctggggaaggggacctgagtgtttgcacctgttttgttatccatgggagtatctatcagcacacccatcccagggctgttagaatgaaatgaggaaatgcttgtaaggcactcagcactttcttaacacattatacatccccagtcactgactatttgttatttattaatgaagcatgtggggaggctgtgaccttgtgcttggccttcggcagtgctgctgagagagctgagcttcatctgaactggaccacatgggcttgcatctgatcagcctgggataggtggggaataggcttcggagagcatgcaggtggctgaggttgctttcaaagctccacagtatcctgcccatcccacaactccaatagccagttgaggttatggtgtctgagactcactgggcagggtagacagagtgtctgtgcccttctgtgacttgcttctattgtgtaaaactgccttgcagaaggttctttggagagccaggttctaaaagggattctttcccacctgtgaaatttggctctgtcctttgtagggctctgcagctctttttgccctgtggcatatcaactcaagatgtcaggaagttgtaaatgcagaaccagagggtaatgacatgtgttgctttcaaaacacacagctaagctctatttttaaaacccccaattttaagtgatgtttttcagtgtgtgtactcttaagcaagagtgtaaaaatcctctttgtaaccaagcattgagcactgggaaatttcttggatgctttttggagattaattgcaggaacagaggcccttttgctgtagttcctctgtgtttgctgtagtttcctctctgtggcatgcctctaatcgttcagaaggcaggacactgacagcggcaagacgctgtgcgcctgtgcttcattttcctcctagtgattccagtgattaaagtaacttttctaaggtttttcagggaactctacatgaaaaaggaacccctaatcttaggaggaggatcctcccgaggaatccaagtcctccccagctgtcaggggcacgacttactttaaataacagatgctttgggaaaattgtccaaaacaatttttgtgactgacgtaatatctcaaagcctgccagggaagattgctattaaaagaaagtccattgtgggccaggcgccgtggctcatgcctggaatcccagtactttgggaggctgaggtgggcagatcgcttgagcccaggagtttgagaccagcctggcaacgtagtgagaaccccatctcaaaaaaaaaaaaaaaaaattagccgagcgtggtggtgcatacctgtagtcccagttacttggaaggctgaggtgggaggatcccttgagcccaggaggtggaggttgcagtgagctgagatcacgccagcgcactctagcctgggcaatggagtgagaccctgtctcaaaaaaaaaaaaaaaaaaaaagctcattgtgaatagtaactccstattcaaattgaatttctgtatgctgggttccactttcagttagggtgtgtgagtgtgagggatgtatttaaataagcaacaagagtacttgaaaattcgtacgtgtgtgtcaggattgtaatggaaatcccaatactcttataatgcctttttaaaacaaaataccaaacccctgccccagccacgggcattggccgactgcgtccagctgtgttaggccctgggtggggccctgggcatctgtgagcgagatggagcgccctggctggccggccctcagctccgcatggcttgtcgcatcctcatggcaccaacatgaagtggttggtggtcccattgcacagatttggaaataaaggctccaattcatgtacagcaatgaataatccagaaaatgctcaataccacagagcccacattctaatgaggagatgaaccataagtcagtaaatgagtaagtccacactgaggtgggaggggaattgtgatgtaattcccaacgccagtctacatgataaaggaatcttagggacacagtccctgcccttggggaatggcattgtgccctgtaatggggaccaccagggagcatggggcagtgtgaaatggtgtgggcctctgagaggcgaaggacaggtcatccatcatgtgctgggaaacttgggaaaggccggaaataggaggtggagtttcagctacactttaaattgccatgggtccttgcccaactcttcttggaaatgctgagaaatggaattttcttgtctcactgcccatttctttgggcagatttttttttaaactttcttttcctcctccctctcttccccacttccttcctcctttccatccttcctcaccttcttacctccttcctccccctcctttctaccttttcatcctgaaattgaagcactagcaggaaccataactatgtgcgaagagccatgtgcacatgggtgttagggccactgtcccccaaaccccacatggagctttcttcaggtgcctgtgtggtctgagcaccagccatggtggccagaacaaagatgggggagggttgttctgtttgccttcttgggggacaccttgactccatctgacccacagccagaaacaacccaatggcacctagtccttccagtcccacccagaccaaggatcattatacccactccaaggattaggaaatgggcttggattaaatgatatgtgcattgtctgtggttagtgagtggctggacaggggctggactttagaccctgagtttttagtggtgactccaggctgccaaccagtggctcatgaggctggcaagtatgtgtaatcacccctgtcccaaaggaaaaagaaaaccattggaaatcttgcatctgcatagaaaggggatgtgcatgtaggtccatgtgcacacatcgtcagagtcgggtcccaggaccagcagcggctgcatcactaggatcttgttagaaatgcagatgcccagaacggggacggggcacactggctgcagctaacacgtcctctggggacttctgatgccactcaaggttgagaagcactgatttgggccaaaaaagagaatgtcttctacttaagggatgaagccacaaagacaagaagaggtctgctccctcccttgggcatgaggggaccacctggtgccagttacacctcaatatgaccctttggctcgaggacgcaagtggtctgttcctcagctctgtgctctggaccaggctacctgaacccagacctgagcaggacactcagccctcgccctagggagcgcagcaggcagtgagcatctggaagagttgggggatgcgcagggtctgggacagtgaggtgctcgggagagtgagcgccttgggctgagagctgcagtgtgggtgtgaggagggcacagtgccccaggcagggagaagccacagcaaaggcctgagggcaggggagctcaccagatgtggcccggtcagcagggagaggcaggtcattggggccttggtggccactttttgagcacctctgcatgtggcgaggcacctgggggacactgtgtttggggctctgttctgatctgctggacccaggccacctgtcagccctggaaagacagggacacagggcttatctcacgggccacccagccgcacctgggtgctgtccatcctggggctggcctgcccctctccaccttcctcacctctgccttcctgcttggtataaaatggtgcaggatgtcctgctgggctgggaggctgtgagggcctgtttgaagttgggcagtcactgtttctgagaagagtgtcctggtgccctggctgctgtgggagcaggtgaggcgatgagatgaatgccaaggcgaagtgtccagcgtggttcgagcccttcctgcttcatcttggctggggccttgggcaggtcaccaggccatgcagagggcgtttgctcatctacacctgggcaggccactcttccggggggctccagggtcaaatttggagtggagcaagtatgtcaggcagagcttttcagatatgagagtgggttcacatctcctggggcttcttatgaggctggttgggactcagcaggtctgggtggggctgaagatttgcatttgtgaccagctcccgggggggatggtgggtacagacagtgtcgatcctcagctagacattcccaggcttgtcatagcatcatagagtcactggaggtgacaggcaggcagcggggtgtaggactctctgtgtagggatggtctcctgctgattgttcagaagccagaagtccatggctttcatgtgaaagctctcgatttttaaatattggactggactcacacacgcatgcctgcacaccctggtcagggtggttagcacaactgtatgctggactcagcctagggaccacgttggctaatatctgctgtacccgtgtattaattttctccctggcagttgtgttgtttttccatctccttcagggtttacatgttcctgtcgcctgcctgaattggcctcactattcttctcaactgttctgtcttccgtctgtaagaccaagcctgattcatccctcctccccaattcccccactaccggcaaagctcgcttccctcccacttgttgcatagagcagttcttcaccgcctggtgaagaactggactgttaccgggggactttggagggtggggcggtgggacagactgtggagccaatctgcctgcgttgaatccagctctgcctctgtgtgaccttggccaggcagcttaacttctcggggcctctgttctcccatccataatgggagatgctggtggtgcgggcgctgtctccgtggaggctcttgcagtaattattgtttcagccccaggctgctcttgacttcccagggtttgccttcccagggtaaattcagctccagtgccctgtttggacaagtgtcatgagcctgccgccaccggccttgtgtgtttggtcacttttgcatgtttcttacgtttgcatctgtctcctgcacccatggcaggggcttcgaatctgccctggcatttccctcagtgttcagtgtggggccttgatcaggattggcacccaggactggttgggttaaaccatctcagggttgtatgctccttctttttgctcctaagagactccccaacacccagcaaaacattgtggggttaatgctacacttggcatgaccacagtgaacagaggttagcacccccagcyccccaacacacacagagatgttgtgtaaattcaggtctgccactgatccccttcttagtttgtcttcttgtttttattttcttctattttttgggcatgtcttctcttttatttttctgttaatagtagttcaaagaactttcctgtgtctsttactagtattagtaattttttcctggaatctgtctacatttgttacattttttgaggtgtaatttacaaacaggctacaggggtgaccctgagagaccaggtgggtgggtgctgctgcccccaaaaccattcatggggctcatgtccctgcatacctggggaccctccgataagccagtgagtgaggagagctggcttgagggttgccagaaggggctcagctttggaatctaatgagtagtgaccagcctgccagcggaggggccccgtgctgctaatcctcagtctcacggtgtgccacagagctgtttctgccggagggtcatgtgtgggagcttgggtaatggagagggagggagcagagccttctgcaaaaccaggacatttccccatcacgagccacttcttggaacaaggctggtttactgggtgctsgtggaacacgtgggggagttgggtcctcgtcccttcttgcacctttaaccttgggggcaggtcagcactgggcacatgggaactgcaggagccaagccctgaaacaggaacaacctgtttgcactgagtgttctttccaacagcttaggctgcagtgcccagccctggctgcacatcagaaccaaccatgggggctttgaggctttgaaggcccaggacccattggatggggtctctaggggtggcccaggagatgccaatatgcagccagggttgggtccactggtgtgaagcaaccacttcaaaatatttgcaggacatcaccttgtacctctgagatcatgtttgttcacccttctccttgcaagggggtagaaacatcatcactgatgaggacagggtctctgtcagtggaagaagagagagccacagcaaactagacccgctccaacccctcaacctggccgaattctcactcaaaaagcaccaagtgtaacatccgcaaaccctctttttgtacagtcaactgcttggaccagcatgttcggaagtcccccgagagcgttgctttgatctgggagcgcgatgagcctggaacggaagtgaggatcacctacaggtactgtgccctcgaatgttcaaggtgygagggagrcgcccagcccagtcctgtgtgctgagtctggctgtcagggaggggccgtctgagtctcagggagtgcattttggctttgcaagtgctctcttatccaggaaaagtaaatgtgaacgcaagcagaatgaaacacagtaaaagccggtctagcctgcctggccacactctcagcgccttgtgaggatgggacaataaataaaatcatctttagtagagttgttttgtttttaagctgatctttttagtctctgattccttaagcagattctatgtgccaagcatgcttcagatgctgtgtgctttgggcggtctgcactggccttccccaagctgcttcctgtaggggctgctgtgttggtgcagcaccttggttctccatgcaaaccccgtttgcctgaagctcaccttacccttacagagatgcctcaggcccactgtgcccctaaactgtgagttcctaagtccccatcacacacaatcatcgagcgtgattactctcctgggggcagctccagggtcttcttgtccaattacttagcaagtcttcactgggtgccttcgtgtcagtatgggctgcagtatgttgcagtaacagacaatccccaagcacatggcagagtgtggctgggtggccactgtgagctgaatagtcaggaaggcctcttggaggaggcaacattccagctgaggtcctgtgggccaagaggagcagccctgagaagacaggggcagacctggtgcagggatcccagaggtagagggaaggtgcatgtggctgggacacaggagcgaggggacgtggaggaggagcattccgacaggcaggtccacactgggcagcctgagagcagcggtcactgccctgccactcgggtgacctgggggygaaggggcacttgtagtttcctgtttgtttcttgaactccaattttatcacagaccaaattcaccaaacctgctaaaaccgtgctcatgctgacttttggaggcagaygagtgatgctagtggatctgctgcggctcccagtgggccctgtcctgctcgttcctccccttggcccccaggagccctcaggcccatcacagctccaccagcctcggccagggctcctttgctgacccgtctcccccaccagccagactcacagcctatacagcatgcatttcttatctctagtccctggttgcagatgccgtgtggcccataggccagcagcattcttctgccctggatcctcgggccccactggacaactgagcggccccccaggtggcccctgcacactggagtgtgcttggctctgaagacccaagctgctgcagctgcccctcgccacggtgggcccagctccatctgcctgcgaacaaagccccttctgagaaggaacttgaggctgctgcccctggagtagttcttcagtaaaagatgaaaaccctctgttgggggtcgggggctaaggagctaactggacacctggaggtccggcagggagggcccagccatggcactccccgaagggccagtttctctccatcagtctctcaggtgtgcctggaccctggggcaggcaggttgtgtgccacgccccctcggctggacgctgcccrtgggagcactgagtgtgtgctaagtagcggttcggtctgtgagcggggctggagccctgtggagacgtgtggttaaacataaaccatgtgagaattctcaggaccacagccagcctgtggaagctaaggacagcttcaggtccatgacactgaaatggccctggcaaagtacttattactctgtytctaaaaataaacaggggccggtcgcagtggctcatgccggtaatcccagcactttgggatggtgaggatcacttgaggacggtgggtggatcgcttgaggtcaggagtttgagaccaacctggccaacatggtgaaaccccgtctctactaaaaatacaaaaattagttgggtgtggtgatgtgcgcctgtagtcccagctacttgggaggctgaagcaggagaactgcttgaaactgggaggtggatgttgcagtgagccaagattgtgccactgcactccatcctgggtgacagagtcagactccatctcaaaaataaaaataawaataaaaataaattgacttcttctaaaatggtttgcagactttagccaggcttagtaccaggtgaccatttctatttactgtttgagtgaaaagtgttacctgtaattgcagctagtatttgagggatgtgagttcctcattgtcctggtcaggctaggtttctgatgtgaggttttcttcttcctttctctgaggaaagcccctagacattggcactggttgtcctcctgacagacacatcactgccactgaacacagtgcttttctgccmatgggcctcgtgccacagcactcgaggtgcctaggatggttgcaggcctcctcagctggaagatcaatgtccagactagcagcctgggccctttaaagaaaccccgtggggctggtagaggttgggacrctggtgccgatgcaggaagcttgcagggtgtgaggaagtctgtgtgttacaatcccaggtgacctggcaagggaaacctcccgactctggtccccacygtgaccttaggcacaggtgacgctgggtcagcacaggcagatgcagccctgggacgggtgcccatggcctttaccctgcaagtggaggatttgcaatccctgcttccccaggtcctctggggtgcagggtcagcagaaagaggcccgttctagttctagttcagtaccatcctgctgctggcctgtgaccttgtgcagctccctaatctccccgggtgtgactttcccatctgtacacccagggtaattatcacaatggagatgactgtaaagtaggcacagggagatgacagcccgaacgcactagcaagtaagaatagccgtgataatgatgtagctgctatttattgagtactcactggattctagagctgttttcagcattgtaactgggcagcgaggttggacctcgtgctggctggctgcagggcttggagaggaggaccccctcccctgccgcggttttgccccgcttcctccttcacaaatgcagtcctcaattcccactgggaggtgaagggctcagcctgggacgtgtgcacccatctcccagggcagtctgccacccgactccagggtcccagctccatttccagccttcctctgcccggagccagctgaggcagcccttctcccctggtgagccagcaggctgaaagcccagagcaggacagtgcctgccagaggctgtaggcctagtggccccaaggctgtggggccaggcagcactctgggasggcagtggctctttctggctgtttacctgcacttctccagcaggtgcccattttattttatttttaattattgatttttgaggcaggggctcaaaaatgtcacccaggctggagtgtagtggtactgtcacaactcactgtagccttgacctcccgggctcaagtgattctcctgcctcagcctcccaatagcttggtgtgtgccaccaagcctaagctttttattttttgtagagatggagtctcgctatgctgcccaggttggtctggaactcctgggttggagtgactgcccaccttggcctcccaagtactgggattgcaggtgtgagccaccgcgcctggccggtgcctgttttagaagactgtccttcacactgtagttcacatgggcaggttctagagaccctggggggtggccatgtggagaaatgcaagttcctctctttcggaaaagcggtggcccaggtagatgaatgaggctttgagatggctgctgcctagctggtgtgtttctccctgcctggagcctggagcctggggtctgggccaggaattcccaggctagggttggactccaggtgcaggaagcagcctgaggccctgtgcaggtccagatcttctcagccagcagggtatgcccccacacagaggagagagtggactgtgggtgccaggctgggggtgcctgcagagcctccaaatcagtgaacctcttctctgagggtctctgtaggggggtgtgaacttaaacttgaacttaaatgagagcatcttaagccagaggaccaagttttagctccggcttgtcctatggccttggacccatccctctgggctttggtgtcctcatctgtaaaaggagggattcaatggcyccagtattccagccctggcaggcgtgcatgaagcacggaggagcagagctgggccccgagtctgtgaggaagcacaggcatcgtgtgccactctgggagctgttcccccgtggaaactcctgctggtgggggtgatttctgtggctgttccttcctggcctttttattgggtggggtcgtgcacagtgagaaacccctgaccagagaagcagaggggatgtcaggcctcccccaaccccacctacctcagagtcccaggaagctgagggaggttttctccctgggtgtgctgtgctgggctgggcatggggctttactgcgaatctgtgaggcctggcacctgatgcggaggcctgcagggctgtgcatgacagggcctggccgttcaccctaggcagagggagctgccacacactccagctgtggtggggtggggactgagcctggggccacctctctgagaggcttgtttctgttgtcagccctggatgtcttcgaacacagccatttagggaggtcacagaagtggctggtcccttggggggagcaggaagcaggaagtcctgtcacagacacttaggtggagaaggctttgtggagggttgagttttgagaggcagaggaaggggaagtgtggcgaaggcaggagtgggggactggtgaggacatggcacggggaggagccagggtctgggaagtggtggaggcgggaggctgtgccctgcctgccctgtccctggcagggggaggggccagggcccaggacctggtggaggcaggaggctgtgctctgcccagcctgaccctggctgtggacctagagcctgtcactccacctctcccacccttggttttctcatttgcaaaatgcagtcacacttctcctccactgggctgctgggcgtggagaggggcatgtgggatgaaaaccagaggggtgtctggaggatgagggtccgtttcagctgcaggtcagggccaggtgaaggaaggccagcaaagggtttcagatttgaagaagggcaggacatgggtggccccatggctgctggggccgagagtgggtgggtggtgatttcaggggtgacggtactcagcgggactttgcctgggaggacacgtacatcagctaaagtgtgccccctccccatgtccctagtgggtgacccttgccccttgctcttctgctcacctcccaagttaattaccctagtgagcacactcccttattaaaacatcagggcagctgggggaggatcctaactcacgggaggctgtgggggaacagcctcgttgacccgtgtgtgacacagcggctgtcgtggaaggcaaactcggtgtggtctgtggggctcccatggtggggtgagkcgtggagtcccggcctagctgccccacctgagaggagggtgcccgggcagcctctgagacttgggctgggacccttggtctggaatctgcacgctacagccagaatctgataggatcccatgttactcggggtgggctgtttttgaagcagcatccacctttcctccagccccaggctgcggctgctgccactggaatatttggggtcttcctacgcacgctgcctgtgctcccttgcgttctcctgggtgccgaggtcctggcacgtcgtagtttagagaggccccatcttcagactgcagcacagtgacccacactgagggagtttatgtccacagagacctctttgttggggacaggacctttctgagaattctctggggcgaccacaggcaattctaggccagcgggtgggttgtggaacctgactgggctgacacctgggctccacaacccactgttagggcaggaggatcccacctgtaccttcttggatcccaggccactcgaatggagtctggcgtccttcctcctcatgcaggtgaccaaaccctcaaagtcactccagtgtgcaaaggcctttggccaccacagctgttcaaaatctgctgtaactaacaggctctggtcttcaccctgatgtatttattccacccacggtggcccatctcatgtggattcccagtaggccagcccgttttcaacaagaacagtcttctatcttcacattagaaacccattagttttttggacttcacaactaaattgtgggacagttttccaggctaacattttgtatggtttctggcatgttttcccagtgtgaatggggccacttttgtggaagggctcccctcccaaaggggtattctgcctggtgcagattccagcatccctggggtagtgcctttgaacagggatgagctgcaaggccacgtgcggtggcctggggacaagggctgccatggagagtctgtgggcgtgctctcagcccgtggccttatgcccgggagtacggtgccatctgtggaagcccagccgtgagcttatgcagaccctccatgccatcttaaacccagggtcagagggagtgtggcctggaggtcacacggggtggactgaaaaagctgcatgcttttgcttctcaccttccttccaaattaacaggttttttttttttttttttgagacggagtctcgctctgtcacccaggctggagtacagtggcgcaatctcggctcactgaaagctccgcctcctgggttcacgccattctcctgcctcagcctcctgagtagctgggactacaggcacctgccaccacgcccggctaattttttgtatttttaatagagacggggtttcaccgtgttagccaggatggtctcaatctcctgacttcgtgatccacccgccttggcctcccaaagtgctgggattacaggcatgagccactgcgcccggacaaattaacaggtttttattagcaattacttatccttaaatgaataattattcaataaaaggaatgaaatcataaattattaacaattattgttttataaaggggaaaattagttcaagtgaactttaagggtggcctggggtggggcatctgggcagcttctggggtgtggctgcaaagatagaggaggaggctgcccctggggctgggtggtttgggtattggggctgcaggctcccaggctggggctagtgtcaaacgggctccgtggagcagttgtgtgtgcatatcttccttgtgcagtcagtcctatcaggagccgagaatcagcggtggaaatatttgcaccatgatcactggcaaatgttataagtcaaggcttcttttgcagagaaactggctgttatccagcacagcactggggagcaggagcctcctgttctttggaggagtttgatgcttctctaggctgctgccaagaggcaaggaaagtcgctgggcccgaggcaggtatgccaagtggctgtgctctctggatttccacctgtgtggctgtgtctgtgaacttcccctccagggcttactctcctccaggtgttaatctggaatgttgtgtggactcccaggaaagcctgataaatagaaggacccccaacctgcgtccaggctctggagcrttctgtgtgaagttggctgccctgtgttgtgctgtgtctgtggcagccgaatgggctctggtagagccattcagagagacggaacagagggcatgtggggtgtgcaaacttggagtgggacctgaaaaatctcctgtggttttttttttaaccacaggggaaagtgaatgtttacagaatgttaaaacctacacccctttccaaattccacaagggaaaggactcacttctgtggctttctcccaggaggtaaacaagtctgtccagccaggggcgaatgttctgccagggcaccagctgttctcggggctggcttccaggactccagtcccccagtgtgctcttgtcctgggctgccagcctgcaggagcttccagagttcttcaggcattgacacctggttcccgcagtcatgtgagctgggctttgtgtctggaagggaaagaacttcctttccagagacaagacttgggccaaaggccaagtgctgaggtcraagggaaaaccaggcgttaacaggaatgaggacagagcttctctggagtctggcctggtactttagtcctacaaggctttcttagaagctgactgcatcctgggctctggttagaggagaaaagaaaaactaaggatgtgggatttgacctgcctgtgcctggggaggcatgccctgggcaggtggccctgaatgaggagccaaacactgaatgatgaaggaaaacgccattccacacccaccctcggccctgtcctccattctggggacaagaagaaaggctcaattgaacccccatgcgtgtggggactttgggcacttctcttgctaactttcccttttgaatgagaatcagcctcaggttcattcttagaataaatttatattaaaaaartgaactaactcaagaaaaatgttacatgaataattatagcattggcagatggcaaatcttttgaagtttgggagcctttgcaataggagtggttctgatactgaggagctggctgacagcaaggcccctggagctgggcctgggtttgaatcctgccctgactccttcagctgaatagccttgagaaagtggcccaacttctctatgcctcaatttcctcatcaggaaagtgaagaagggaaggggagctcagaacctatgggctgttgtgagggttaagtgggttctccatgggaacctgctctgtgggagcagccctgggtacaggatacttgcttgatagctgttctgtccttgttccatgggatggggctgtgaactgagggtggggtgaggacaagtgggaggaggggcaggggagggaataccccctggatgcagaggaggtaggaggccatgggcctggagaggaggtttcctgtgctggcagtggcaggcaatcatggctggagaagcttgggtagccagcaggggggcagtgacaggacgacatggcagatggtggtaggctgtgcagagcatgtggggtggaactgccttccctctggccttttggaagcacaggcctcgggctgagtgcctggaacccccagactggcagcaaccccaactgtaggaggctctgcatccttctcagatctactcccgccctcagcacctgccttgggggcatggagcaggcaggctgtgcaggtgagggcttcctgcaaggcattcacacagctgaggtgcatgtgccctgagccggcgacacggagactgcagcttccataaggcaaaccagcattttgcacctgccctcctgagaaggaggtgcctgaggtgcccacctttcttaaaggtccatcagtgttcaataattctctttttcccatgtcttgtattttctgcagtcattatggccactgtttacaggtcaccttcaaaggtgcctgcaacttcatatttggtctccacgaccaccttggtagtgggtcctattattaggccatttcacagatgagacagttcaggccccagtggtgtggggggctgtgttgggaaccctgctctctgatcagtcattgtttggcctcccgtgagactcctgagtgataaacttgcaggttcagcgctttccacagagtctagcaaaacctcagggaagagactttcactttccataaggaatttagaacacacatagctttagtgatcttgttactggctgagctggcatcactactagcaactcagctcatgtctcctgggggccctcgctgtgcctgggcccgccttggcccaggggaccattcatgttcaagtgcggctgccactttatgttttcacggcagcttctctttgctaaatgtcatggtcacgacatcaaataatgacgtgagaaatttcatacttggtttatgagccctgctagctgacttcctggtcttctgttctctcagcagagtgagcaaatcttaccaccattgaatgacagtcagtggctacagtaatgtcagggccagaggaggctgccaggagggaaggagtctgttccccaggcctgggtccatgagatgcgagctggccatccatgctttgcgtggccttccacgctcctcctgcgtgagaaggggtcagcctcgccaggcttcccttccctaaggctgatcctttcttctcttactacgaatatgttcctgacacagcatgctgaagaaaatatcaaattctagagacagcataggaatgtcctttcaagttttggatctagaccatggagttggccttccccagcccccatcagcaccggtgcttggagagaagtgactgagcctgaggaaatgctttgtgtctgtcagaggccttcacatatcaagacaattacctgggtttacttcccttattggcagaagaaaatgaaacgtttctgtaggctggtttctcagagggggtccttcccatttgcttctcagagcagcagcacatcttcatgccagcgtgatgcaaggtgacagcagcctagcccctcaggggaaggaggacacagggtgtctgcagggtgggtgtcgctcttggtggaggtccttcccacttcatgctcacctgctgcgcccatttgctcaacaaatatttattgagtaccttatatgagctaggtggatgccaggaggaaggcaataagcaaaacccagatctctacccaagcagaccttgtacttgatggacaacaaagaagtctgttagctaatgtttatttcatgaatactgactgccagaataattgtaagcaataaacaatcatgcattctcaatttctttctttccctctttctttctttccttccttccttccttccttccttcctttctttcttctttctttctttttctttctttcttcttcttctttttttttttttgacagagtctagctctgtcacccaggctgcagtgcagtgatgggatctcagttcactgcaatctccacctcctgggttcaagcgattctcctgccttagcctcccaagtagctgggattcagacatgcagcaccacgcctggctaatttctgtatttttagtagacacagggttttgctatggttggccaggctggtcttaaactcctgacctcaagtgatctgcctgcctcagcctcccaaaatgctgggattacagctgtgagccactatgcccagcctyaatttgtttatttcttaaacacgagagcacacacaggacttacttatcctgggccttcatcaggaaatgtctaggaggaaaagacactttcaatattaaccgtgacaaaactagctctgattgaaagacagatgaaaaaataaataccagtgtatttcttcctctcttttctctgaactctgtttccagctgtttcctgttttggactaattttaaattctgaggcggggggtggggggcaggggtgcagttgtaccgtctgagttcaggcagttatcgtgttggtcacaattacttgcagtcagattgtatctttagcattggataaaagttattcccaattgatgttaagagttggtaataagtcttcttccttccccaaggccagtcagcgttttcctagtgttaagcaccaggaacacaaggccacatttgtatttttgtgcacatcatttgcatacgtctgcaccaaaagcttgacccggcagagtacactgcagacaaacctaaatatcctgctcagtacctgaacaacaagtgttatatttcttcttggacttaaaagtaaaactctaactcattttagtgactcagaaagctgcatgtccccgtgctttggaaacccactagggtgctacataagaggatcctgcaggtagtgaggaagccactgtttcctgcaactgtagcccaaggcaccagtcactgagtggctgcattatctttctgatacagaaacagtaacatttcggtttgtggaagtctgagaaattatgaatatccaaaaacatgctttcaaatggttcctgagtacttggaatggcaggatcacttacttgaacaacatttatttttcaatgatttgaagacctaggtttgctgaccatattttccaataatatatgtctggaggatattactaatgaaaaatgagagtttaaacttaaaaatccaggcttcaaaaattggctgggtgtggtggttcatgcctgtaattccagcactttgggaggccaaggccagtggatcacttgaggtcaggagttcaggaccagcctggccaacatggtgaaacctgtctctactaaaatacaaaaattagctgggtgtggtggtgcacgcctgtagtcccagctactcaggaggctgaggcaggagaatcccttgaacctgggaggtggaggttgcagtgagcggagatggcacccctgcactccwgtctgggtgacagagtgagactctatctcaaaaaaaaaaaaagtcacctggaaagatggggagaaattgagatagaattagattgggataaatggaaagcctgctttaaaaaaacacaaaacatttccatggccataataggagcaagccctagttaaagggcatctgttacatgtattaggagttgggagggtgcaggttagtgacctcatgttgaatttgagccacctgtcaggtattttaaaaatgcatatggtcggccgggtgcggtggctcacacctgtaatcccagcacttcgggaggccaaggcaggtggatcatgaggtcaggagattgagatcatcctggtgaacactgtgaaaccccgtctctactaaaaatacaaaaaaattagccaggcgtggtggcgggcacctgtagtcccagctactccggctgggctgaggcaggagaatggcatgaacccagggggcggagcttgcagtgggtggagatcgcgccactgcactccagcctcggcaacagagcgagactccatctcaaaaaaaacaaaaaacaaaaaacaaaaaatccatatggtcggcctggcgtggtggtagctcatgcctgtaatcccagcactttgggaggccgaggtgggtggatctcctgaggtcgggagttcaagaccagcctgaccaacatggagaaaccccgtctctactaaaaatacaaaattagctgggcatggtggtgcatgcctgtaatcccaactactcgggaggctgaggtgggagaattgtttgaacctgggaggtggaggttgcagtgagctgagatcgtgccattgcactccagcctgggcaacaagagcgaaactccacctcaaaaaaaaaaaggttaaatatagaattgaggtcaagggtctgggtacccacattcagctctgggcaggcaccatgagaatgtgggggtccatttggaagtctgggggtgtctactgagatcgagtgccgtcatggagggctcgaccagagaacctggggaggaaaagcttccaagaggaygaggggcaaggagtattcaggaatttgaagggctgtcattgagaaattagatttattctgggaagctttaaaggtctgaggtaggactaaggggtggagtttgaagagctgcaaatcttggtccaatttttggtagactgtttccctattaaagtgacagagatgtggccccatgaggtgagctctggcagtgtgatgattaagtagaggctggactgctgtaggccagaatgtggctgccagatttcagaacctcaaggaggctgcaccgcctgacgtccaaggatcctttccacttcaaggtttatgaccttggcagagaaaataggaagggagagagctctgagatttaccggatcaaatccttcatcaggagcccctcctctggactcagcagcaagagtgtgagactcaccagaccctgcttcagctcttgggcccatgttgaggcccctcagtcttccagggaaacctggtctctagaccctccctggaggctgtcgtttagctgtccagcttcaatgactgggtgacttctgcccctatagggaaaatccactcttctttctgccccagtcctcctcccaacagccaatctatccagaaagctctccctgctgcccttccctgccacccccagtggctgtaccaccaagytgagctgctcagtgccctgcacaccttcacatgtgccgtcatttcctcatcggagctgtgctcctggaggacactctccctgtcaattcctttctcaaatgcaaacaccccactcactcccaaggtgcctagaatgggatttttaacatctcaggaattcactgaagtgagttagctggtttttgtcattttagaaaacgatttcaaacaaagatttctgagaatttccatctgatgggaaagacgatagctactgaatgtttggcagagttccaagtcagtcttgctttttattaatacttgtgacagctgtacaaggtggagggtgcttgctgtttctcagatggtcacatggcagctcagaaagataagctcccatgtctaggcagctactacagaaagctaccccaggcctttctgtagggacagtccagtgtcctttcttggcttcagattgctgccctccgtctgcagaacagggactaaatttcatcgccatttaactggtgagcataattcaagccttcatctctggtagcagcgaggcttaagctctcagagctatgaaaacggaatctggctgaagatgttgagtgactctggaccacggctccctcttcagccggtcacaggccaccccagcctcctccccggagtagcaggagtgtttctgagccctagattctgtagagcttggtgctgggggttttccgggggagtgttccgtcttttatcataaaccttggcaaggggtgcgtgggtggggcgccactgaaaggcgcctttgtcctccttctgaaagcctgaagggaaaacgatgaaatcccacagaagaggccgctggagccaggctgggcaggcgtgctggctgcggggagaactgcgggctggccttgcgatctggttctcatgtggtcccctctgcagatggccttgggaagaaacaaaggcctccttgaggcccctgcctgtgatgcggacagctcattttcattctgctgtggtttcccgggtggcctcgttgagcttcactgttctcgggagccctttccttgactaccctttgaacagaggagagctatgcaaacacgctgcgagcggccttgagagcccgaggagggtctgctttctgggcccctgcagagggcaggggtcgcgggctggtggtctgccccgcccagagagaaagggccttggcttcccctcattcttcgttctgtgttagctctttttattgcaaataattaattaaagtcagtacagcaagagtgggaaagtggttaatgcaattgccaggtccagattcagagggatgaggcgccgaaaggaaagacaaccttgggatcgcttccacttcctccacttcgcaccgcatggccggcaagttggcggctctcgcctgctcccagttttcccggagttgagtatggttgactctgactggaccaggttgggtcacgtgtcggccctgagccaatcagcttgcccagagagatgatgcgccctgagtggtgggtgaacctggtgataggccccagagtggccagagaggaagggcatgcgcacaccatagacataggcaacgtggtggacgacatgggggctgggcgggggtgctgctcacccaccttgtgcccagtgctttcccttccccttgtccatggtcccctagcttggggagaaagcagggtgcttgctctacccgccagtgctgtctcggggctgcagggagttgtggctgccctgcttgcggtcttcactcccaactcactgtggctttgcagagctggagtccgccctatctgggcttgggggtctgctccctgagagcattatttggtgcccctcgactgtgttgattcagaaatctgggacctgttgtttctcgactaaatgtcttatgagatcagtctttcttttggaggcaaacattttcggaagttttggaaccatgatgatctatgcctcagacacttgtggtccctgagaagctgctgctggaaaaaggggtccccatccggatcccaggagagggttcttggatcatgccgggaaggaatccaaggcgagtggcagagcgcagtgaaaagagatagtttattgaaagcttctcagttacatagtagggcatcctcagcaagaggaggaatgcctctgttttgtttctttcttatataggggtcttatctatgtaaaagctaagctatgtctccctgcgggtaggctgacraagtgacatttattactttgttgattgaaagaaagctatccttggcattttagtgcataagtacatcaaagcatgcctataatcatcttaaaagcatatattatgcaatattggggcatctggacattctgttgttgcaagagtttgtctttgcaggtattaagctacttcgtcagctgtaaacatcttatgactgtgggtcatgactggcaaggaatgtgccttgctagttttaagatggaattgattctaaaatggtgtcaccatggctcccctacgctcctgttcccctaaaaaaaccctgccgtaagcggacttaaggatagccttgtcaccctagcaatgtggcagtgaatctctgccaatagcaatctacaaatgttaaaaacttttctttttctggaaaagtactttccatgcattaagtattcaagtgcctgttttcctggcactgggctggatgtatatgacataaaatttgcagtattgctccacccccaaactgctctgcattttggccctcctccatctctgatggctttctcttccctgtgctgcagggaactactggagaccacgtgccgcctggccaacacgctgaagaggcatggagtccaccgtggggaccgtgttgccatctacatgcccgtgtccccattggctgtggcagcaatgctggcctgtgccaggatcggagctgtccacacagtcatctttgctggcttcagtgcrgagtccttggctgggaggatcaatgatggtgaggaggtgggcatggggagggaggaaccctggagttccctgatccttgttcctgggggcctggccatcagtgtagagaccatcagagtgcagacattaatgtcacacagacaaatgacagatcgtactagggacaggcacatggccgaatgagaatttgttctgtgggctgagatctgagtgcattggatttagccaggtgaaaaagggacagttccagttggagggaacagcagaggcacaggccaagtggaggaggagcacagcatgagggcctagtgcaggtgggtgtagtgcggcaggagggaagtgtggaggtgggataaggctggagatgcacagggaaggttccacaggtcaacaactggaaggcttctatcctgaggagtgaaggtgtggaccatatttggggatctggagtcaggtgaagggggtctttctgtctgcatgtgggtcagtgtgttttggacattgtgcagaacaataacttccttgttttgctgttgtcaaaggactgagtgtctggatggtggccctatgtccatgcagtctgatctctgcaccctgctgtctcctagagggagtccctgagctggcttcgcaaggcaggtgccaggttctaggtgccattgagaattcttgtgcctcatagaaaatagaactaatgggtagagttctcagactcctgttgacctccctctgtataaaaggctgggaagcccttccgcttcctttcagagtttcttcccccacgttcaagggtgatgctgctacctctttctctttttcttcctctctctagaactctgtaataccaactgtgtaccaggcactgttctaagcactctacaaaggttatgtcctttaatttaccttactcttcataagtattttatgcaataatactattattattcccctcccctaaaattactgttgtaaccatcttaaagtgtacaattcagtcacattaagtacattcacagtgttatgcagtcatcatcagtatctagtacctgaagtttttcatcactcaaaatgtacactttacacccattaagcagacattctccattcatccatgttgtggcatgtatcggtatttcatatttttaataggtgaataatatgcattcattgatggccatttgggttgtttccattttttggctattgtgaatagagctgttatgaatgttcatgtataggaacacctgtttttaattttgggggtatatacctatgagtgggcttgctgactcatgtggtaattccatgtttaacttatcaaagaactgtaaaactgttttgctaaggagatgcaccattttacatttccactaatagtgtatgcaggctccagtttctctgcatcttgttgtttttcactttaaaaaattacagccgtcatagtaagaatgaagttgtatctcattgtggttttgatttgcatttccctaatgactaataatattgaacatcttttatgtacttgttggccatttgtatgttttcactggacaaagtctacttaagctgtttgcccatattttaattgcttgcttgtctttttgttgttgagtatgtaagttacttatatattctgaatattagacctctatcagatatatgatttgcaaatattctcccattctgtgggtggtcttttcactttctcagtagtaaactttggtgtataaaagttttaaattttaatggagtctaatttatctattttttattttgttgcttgtgtctttgctgtattatttgagaaaacattgccaaatctaatgctgtgaagattttttcctatgttttcttttttttttctttttgagatggattctcgctctgttgccaggctggagtgcaggggcatgatctcagctcactgcaacctccgcctcctgggttcaagtgattctcctacctcagcctcccgagtagctgggattacaggcacgtgccactgcatcgagctaatttttgtagttttagtagaaacaggatttcaccatgttgaccaggatggtctcgatctcttgacctcgtgatccgcccgcctcggcctccctgttcgtatgttttcttcaaagaatttaagttttacctttttacatttagatctttaattttgagttgatttttgtacagggtgtgaggtaagggtccagtttcattctttgtcctatggctatccagtggtcccagcgccatttgctaaagaggctgttcttttccctgttaaatggacttggtactcttgttgaaaataatttgaccatatatgtgagggattatttctgggctctctatcctattccatttatccatatgattacctatgtatctattattatctcagtatcaaactgttttgacactgtagctttgtaagttttaaaaccaggaagcgtgagtctcccaactttgttcttcttttttcaagattgttttggctcttcttgctttcttgtattttcataggaattttaggattagcttttccatttctgcaaaaaaagatgttgggattttgattgcattcaatctgtagaaaaattggaaggtattgccatattgacaatattaatccacaaacatgggatatctttccatttatttaagtattttaaaatttctttcaacaatattttgtggtattcagtgtacaagtcttgcatatcctaggctaaatttattcctaagtatcttattcttttatgaatttttataaatggaattgttttcctaatttcctttacagattgttcattgctaatatgtagagatacagcaatttttgcatagtgatcttgtatattgcaaatttaatgatttattagctctaataaatagtttttttgtggattcattaggatttatacatagtagatcatatcatctctgaatatagttttacttcttcttttccaatttggatgtcttttatttcttttttttttttttttttgcctgatcactctggcaacaactttgtttacaatgttgaattgcagtggtgaaaagtgggcatccttgttttgttcctgatcttagggggaaggcttcagtcttttaccattaatatgatgttagctgtgggttttcagatgctctttatccattaagttcccttctattcctagttttaagtgtttgatcatcaaagggtgttggattttgtcaaatgcttgctctgcgtcaattgagatgtgttttttccttcattgtagtagtgtgatgtattacagtgattaattgttgcatgttgaaccacccttcctttcctagggtaagtcctgattggtcatagtatattctgttaatatgctgctggatacagtttgctagcattttgtggaagagttttgtatcattgtttatatgagatatttgtctgtagttttcttttctatagtaatctttgtctggctttagtatcagggtaatgctggcctcataaaatgaatttgaaagtatctcctcttcaattttttggaagagtttgagaaggattggtgctaattctttaaatatttcatagaattcaccagtgaagtcatctggttctggtctttagaaagggaagaagatgggtaaactgagacacagagagtttaagtgacttacctaaggtcacatacctagtaagtgacagagccaggagttgaacacagacattctgctgccatagttgatgctttcagcattatgctaagctgccccttttctctcttgctggtgtggccatggtcacccagtgcttctgttgagattgtttgaaacaagcaatagcagttgactcttggtgacttcatcatgtggggatttagtagctggatgctggggcagctcccagaacctcagaattcctaaacaaccaagcatgggagggcaggggccatgactctgtcctgaagaggactctgccctgatatccttcagcctttttgtgcagctctgcaggtaccaggttcctggggacaagattctgttgagatgggtatctgtgtcctgttgggtcaatgaggggctgttttggttttctattgctgtgtcacaaactactccaaaacttagtgtttaataaaactgaaaacaataaattttagtattctatttcatgggtctgtgggacaggaatcagatggggacaggggaatggctgttttctgctccatgacatctgggacattagtcaggttgacttgaagggttggggactggtgggcctgtctttctctccacgtggcctcttcacatggctgacttgggcttcctcatagccttgcagccttagcagtcaggcttgtcacatggcagcacatggctccaagaggaaggaaatagcaactgccagtgtcctacagtccaggctggcacaggcctggcatcactcttgccttactagattggccgaaccagtccgtggccattctagattcaaggggaggagacctggatcctgcttctctataagagcaggtgaaagaatgtgcagccatcttcagttggccactgggaggtgggtgtatattgtgagtctgaccgctaggctctcacatgtctgggcagccaccttagtcagcaggtgcagttccagagttcagtcccctggcctggcttccagggttggaccatccctcttcatttgtcttccctcttgctttaggctgcttgaggagtggagagtgttgcaggggagggtagaggtcaggagaatggctttgagagagactgtgggggtagaataatgacccactcagatggccacactgtaatcccccagaagctgtgctatgtcacttgcatggtgaaagactttgcacatatgaataaggcaataggatatccaggtgggctccatctaatcccacatccttaatgcacagaacttgctccaactagaggcagaggaagtgaagcagaaggggaggtcagagagattcaaagcaactttacccgccgttgctggctttgaagataaacagggccacgaaccagggcaggtggtggctgtagtcgctgagaatgacccctggctgacagtcagcaaggaaaaggcgaccttaatccctcagtcgcgtggaactgagttctgccaaccactgaaatggcctggaggtggatactcccccagagccaccacataggagccagccctgtccttgactttggccttgtgagactctaacagagaaccccaccaagcctgtccagacgacagaactctgagctaaaaatgagtgttctgagccactaagtttgtggtcatttgttatggaagcagcagaaaatgaacgcagatgctggtacctgctcaaaaccagggagagaaaattgaatcctcccagagtggcatgtggttcctgccagcacccatgctgtggcccagccttggagggcgccagtgggccagacatgctcatggtgctcagaagctcctgggtacttcctagaggacctcctggagagcctactgggcagggaggccctggacaggtgcgagtcaggagtgaggtgtgcgccttgggaggtggggaaggaactgcctgctgtgtagtgtgatttcagcatgttgcatgggstggggtcattgtatcgtgagagcttctgacccccatgagctttctttgtctcccgtccccttgagaaaggttcattccttcctgctggtccatctcccttcctcgcccatagggggcttacctggaccaacccctgcttggggatgtaggtctggaaagtctctgataggctccacccaactgacttggtttccccaggtgagctatcgctgaggcttgaaggccaaagagtgtgtgtagccacggctcttggtgccagatgcaggggtggctgcatctgggcaggtctagggtatctctctgacccccggatggtgctgtgtgtgctggaaaattctcagggaaccctcatggccatgacatctccagggctcttaggaggagaaagggtgggcctgttgtgcaaaagtgctttcagatttatttaggtaggactctcccagaggggacattgaggccagagtctgtcttggaagtgtggtagggcagtggtggctctggacgggaatgtggcacacatgcctcaaatggctccatgcaaagggtagggagttgcaggatttgtaccccaattatggagagccattggtcgagggttccccagcacttctgcccatagctctgcaagaggcctttggtgcagaatgactgaaaggcccaagggatgtgggtgaggccctgccagtcagggtcacagctgggcatttgtcccaggctcttcctgaggggctgtgtagtaaccccccgcagctgtgatccctctgggtcatcccgcactggggcacagcgtggaggacacctccttttcctggggtcttgaggcccactgtgcgtgcacccctcttctctgctctgggcctacccctaggttagccatggaagctagggtcctcctggcttccccctgggcctggctgagcaacattggtcattgaagagcaggtgtgggatcaggagggccttctcctgaaggtaaggtgggcaggcagctcccagtcatccactggggtgtggtttctgatctctggacagtgaaggctcttggcccacacaagtcactctagacagggcctggccacatgggacacctttgggcttggcctctggttgtccagctttcttgttctctgcctctcggtatttctctgtcaccttgattgctgcaggtggcatgatggcctctttcctggggtttgctcctgggcagacaggagagaaaggtggaagtctggttgggaaattgtctttatgctgctgactcaaggaggaagagctgagcttcaaagtaatttatctctggttccttcccctcagcctcagaactggacaaaggcctggtgcttcttcatggcacacaaaggctggagagcaggcagcccctcactttttccattgagtcttttactcaagattggactgagtttctcacactcctaggcctggatgtcctatgtgagtcagagctatgagggttaaagtcgggaggagactgatcagaaatgtctgtgttgtctctgttagccaagtgcaaggtggttatcaccttcaaccaaggactccggggtgggcgcgtggtggagctgaagaaaatagtggatgaggctgtgaagcactgccccaccgtgcagcatgtcctggtggctcacaggacagacaacaaggtccacatgggggatctggacgtcccgctggagcaggtgggttacctcgctttgcacagtttgaggmgaggtcatatcaagttagctggctctgaggcttctcgggttgtggttctcaatttgggttccctagaggtgcccagggttcctctgtggtatttggtgagcttgagtcctgactgggaagataaaactcctataygacaagcatgttggaacacttactgtaacacaaatgcttgcacccacgcttttgttttgtgtcctttccacatttggaattgaacttggacaggtcagagcaggtgaattctgaatcctgtgtgtggagtcctgctgcggagggggagtgctgctctcagagaggctgagtgccctcggtgggctgtttgtttcttctccctgccaggaaatggccaaggaggaccctgtktgcgccccagagagcatgggcagtgaggacatgctcttcatgctgtacacctcagggagcaccggaatgcccaagggcatcgtccatacccaggcaggctacctgctctatgccgccctgactcacaaggtacaggcctgtgcgggcggtgctgggcccttggcagggatccaggcaggggcagggctggaagtcctcctgctgcagagcgaggcctgtaggtgtgagaggtcagtgtttcttcctggcctattcggggcagggccccctcgagtcctcccaccctacagctcctcagggccctggctgcctcaagcccccactgcactgtctggaaactcccagataatctgatcatgtaacgcggcagcaggacactaagggccattcgcccaaagatttttaaaaactctttttagaacagatagagaaaaccacccaaattaaatgcatggcttaatgaattattataaggcaaatgccactttgatcaagaagtggaaggccaccggtttctcagaagccccttccaggcccatatggscacagccccgtccagcatgtcttgatgtgtcttgtgcgcctgccctgtttttattttgatagttttgtgacccatatgagcatccgtgggcactgtagcttactgttgccaattaaaatattgttttttcttttgttttgttttgttttgttttgttttgttttttcatggagtctcactctgttgtccaggttagagtgcagtggtgtgatctcagatcactgcaacctttgcctcctgggttcaagtgactctcctgtctcagctttctgagtagctgggattacaggcacctgccaccacaccctgctaatttttttttgtatttttagtagagacagggttttgccatgttggtcaggctggtcttgaacttctgacctcaagtgatctgcccrccttggcctctccaagtgctggaattacaggtgtgagccaccgtgtccggcctaaaatattgttgatatgtgttttaagtctttttaagcctatgctcccccatttccttacacttggccatagtcacatccagccatttttctctggtgtcctttggtctgggttgtgcctgttgtccctctgcctctgtgtttcctgcacgtgggcagttagatcctgagatgggatcaggctccactcagytgctgtggaagaataaaggggattcggatgtctgtcctctcatgctcctcgaagctgatgatgcttgatgccattcttggccttttttgcttttattttttgtagttcttaaggggtttaaaaaatcgtggcataaggtaatgcaaaaaggtgtccatgtgttaaacgtacaactagacggactctgcagtgtgcccacctgtcctgctgctggaggccatttgaggagccagctgcctctcacagctatggactgcagcytatgcatgcctatttcctagtgacctggtgtgaacatggtggagtggggggacaagctcctgatgctcctttcctgtctctgcagcttgtgtttgaccaccagccaggtgacatctttggctgtgtggccgacatcggttggattacaggacacagctacgtggtgtatgggcctctctgcaatggtgccaccagcgtcctttttgagagcaccccagtttatcccaatgctggtaaggatggtgaaccctgtttgggaccccatgctggtgtcaggggagagagcctgaggctcgaggcttgtggagaggttcatggaagggggacgcctgggttctggtgagggtgtggctctccaggtcctgctgtcgaaatgcccggtggggccaggccccaggtcttcagaaagatctgacaggcagcagcagggagtctgacttggtgctggaggacatctcaaggcccctgctcctgcactcctgccctctgacttaaactgccggcctcaggccatcgctttggcatccttctcacctctaggctgcttgcccagatccagccctttctcaaagccagggccagctgcccgccacttctgtgtccccagccctgcccctgagccttcagggctgtccctcaaaccatgttaggcatggcctagaaccatctccattaaattgagatcactttgaagacaaggtgatgactggctcccttgggcatcgtcctcccacacagcacagtgtcttcaaatattttctttaatgtaagcagatcatggtggctctgcccaaaggctgctgctccagtgttccatggcactgacaactgtgcatggactgtgttatcacctcccagtgctccatccctgcctttgggggctgggtgtgctcaaggaagaagttgtaggggcaagaccagggattaagggccatggcccaggtgctgtctcaggccaccacttcagcccttagaagctcagtgttccatgtggaggggatggtgtgggtagtgggtttacaggaaccaggggtgtgcatgccgggcacatggccctgctccctgggacacacgcagtggcagctgtactgtcaccaggggaagcaccagtcaccactttagagcccatgtgagtgtgatcgagtgaaagctctgtgttaatgctccatgggttattaaatccacgtagtatcaccttgaactaggccatcaccctaagcctggtgaagactgttcctgaatgtgccgcccatggatctggggagtgcttggaggagagcggccattggggacctgtcccatggggcttctttccatctttcactggcsggggtggggggttggggggatccctttcatatggacatatgcgcgtctgcacatgcccagcactcaggaagtcttggctgatctctgagtttaaagtaaaccatgtcagctctcctgctgacagtgaatttcggcctttctgtaggtcggtactgggagacagtagagaggttgaagatcaatcagttctatggygccccaacggctgtccggctgttgctgaaatacggtgatgcctgggtgaagaagtatgatcgctcctccytgcggaccctggggtcaggtgagyggcctgccctgcagcaggagaggttgtgcttgccctagaccctcagagccaatacgggcttcagcaggacttcagtcatgaagctgcccggctttgtatgtgtgaattcacgcaatgccagaccggatctggtagaaagcaccagcacctcttcccacctgtaagctcctccccagagctggcagcagttaccwgtctggggaacaacgttccagacattttctgtgccgttgtttctgtgcccaatttctgtagcttaatcttcattaggaatacttacccactcaataagttaagggtcaggtcagttctttagtggctgcatgggatttaactgtataacttagctgggtgtggtggcaaaggctgaggtgggaggattgcttgagcccaggagtttcaggctgcagtgaactaggattgcaccactgcgctccagcctggtgacagagtgagactcagtcgtctaaataatagtaataatagtataactacagtttgctaaacactgccccatagttggaccttttgattgtctccaagtctgtggagtggataccatcctgcacttttgccctgctgttactgtagacatttccaggcagacagttcaaagcttaggcctattggtaatgttgatggatattgccaaatcacatggaaacattttggaaatgtgatggtggcatggtttcgacagtatcagcagtgtctgtctttcgggctggtgctgggagggactgggtgctggtgactgctgttctctctcctgtccctgccacatttcatgtctgccttgacgtgtggtcacgcgtggtcagccacctgcttggtggcttttcacyggggaagcatgcagggcagtgaccatggaagagtgtcccattctgccacatacatccttgggaagggagcatgtacctcccagtgaacatgtgattccactactactgggtgaccatgaggccatgcgggcatccgggccacaggctgagaggcacagcagctggggctgtgccctgcagagctcaccacttgttcccaaatgtgagatggggatgagacctacctacagggtggcgaggatgccacagagggtcagatgtgagccttagtataatgttcagcatggagatgattaatggagagagctcctgaggaatagcaggcatccaatgactcctcctcctcttttcccttattttccccattaacagtaaaaaccttctgtttctcaaccagctttctagattaaaaagcaggaggagtttgaatactattaataagagcaaatatgtattaaatgcctttatcttcacatcagtcctttgagcaaacagcagatgttgtttcacattacagagaaggaagaggaggcacagagaggtcagagaaccggcctgaggtcactcagcaagtagggcagcctgtgttgaacgcagcacttggttctagagtctgtaaaactcactctgccccccacctgattgatgggctctgtgcccccaccctgtaccctcaacaggtcccttgccatactgtcccctccacctctcagaaagagtatggggttcctttctagatggtgaatcttagtttgctttgtgctgctgtaatagaataccctgaaactgggtgatttataatgaacagaaatttattggttcacatttctggaggctgggaagtccacatcaaggtgttggcatctggtgagggccttcttgctgcatcgtcccatggtggaagggcaaagagaaggcaagagagagcaagaggaggttgaactcacccttttataatggcaccaatcccactcatgagggtggaaacctcttggcataatcacctcataaaggttccacctcttaatactgttacaatggcaattacatttcagcgtgagatttggaggggacaaacattcaaaccataataagtggtgagtttgggtggtctctcttggcatgctggagctgggcttgagaggcccgtgtgattctgactgcctgggccatgtagtgcttgtggactgggaacaaacagcggggtggccagggccatagaaactcgcccagatcctctaggtgttgtcagcagggccacctgagtgggccctaggcattaggtggggacagggctgaagggcaagatttggttttccagatacactcatgggatttgtctcctgaaggaaggttcacggggtccaatgacaaggggtaccgccctaagtgcatttcaggaaggggtgtgctctggcagctgcattagagtgggatgtgtatcccagcagcctctgcctcacctaggggtccccacagacttggaacacctctgagccagggggccagcccccagcagaggctcagctgggttttgtgtatttagctggttgataggcacattcctattcctgttgcataaccggttctagccgcagagccctgcgggaggccaggtgctaatcacacacctcgctgttctgttctcggtatacagtgttggcaggcagcgtggcgtcttgtgatgtcttgcacctggggctcccagcacctcggagcagtgctgggagtcagtgtgttccacaccttggccagggccagcgctgtgctggcacacctgtcggtgcaattccacagcccagacccattccaggcagctgggatcagccctcatgacatttaatccgttgagtcgtcagaatcccactcactcaagacattccccctagatttgtatttctcaaagcttttttaaactttcaatttcataagtaatacatggatacactcttgtgaaaagaagaaattggagcattgtacttaaagctgatgtccttaggagctgggcgtggtggtacgtgcctgtagtccctcggctacttgggaggctgagatgggaggatccttgagccccagaagtcgaggttgcagtgagccatgatcatgccactgcactccagtccaggcaacagagcaagatccttgtctctctctctcaaaaaaaaagaaaaaaaaaaaaagctgaagttttcctcgacctctgctccaggggttgttgctcctgcgccttcggccctgtctctgcagttaagttcctgtagtggatgcagctctgttaaatgacgttttctttaacaccaaagttaccacaccgtgctatgatgctgtaatgtttcttttaagattgtagaatctgcatttttccacacggacctgctttgccgtggggattaccctggcttgtgtggtcacagccccgtggctgggtgcaggctgtcgcagtctcccagcgtgtccaccagcgctgcggggcatctccctgccccttgtggatgttctgagtgcaggtgtgacacacaagacactgagctgccaatgtggccagcactgatcatgcagcatggatgcgggggccactgctgggacaggctgtgggttgtgagtggtcctgagcaagaggcaaccaccagcacgagagtatttcagtgttttagtgayagcacgtctagcctggtgagttctggctgagtgctggcctggtgtggaaatgtcataaggtagacactgagaatcctagggtgtacacatatcttcttcctttctattgagatataatgtgtactaaagggtacagatgttaagtgttcaacttgagagatgtttacgtgtataagtgctacagaaattcctagtccccagaggcccccttatggctcctcccagttacgagagttacccgaaccatgaccacagtgtggcctgcatcaccacggacagatccggctgcacttgaacctcagctgggtgggatcacacagcacacccctcccttgcccagcgtcatgcttcagactcaccagtgccgctgtgggtcgtggaggttcgccatcttctttgcaatgtggcgttcctctgcaggagcgtgccatattgtatttagccacctactcctgagggatgtgtgtggtttctaacatgagcagagctgctgaggacaccctttacatagccacttctggtggcatctgcagtcatttctgtggggtgtacgtcaggggtcatgttttgaggtatttagctgtagtagattctgccccaagcagttgctcagagtagttgtattggttgtatggagttttaaatgttaagagaaacatccagattgctcctcaaaattgctgaaccaaactatcctcctaatggtgtctgtgaaatcctgttttccccacattcttactggctttttgatatccatcatctaatggtaaaaacacatcatggtcatgtgcatttctttgatgaccataaatacggtatgtctcactgcattttcaggtctccttgtatgttcttcaaaaataaaaatcacggagctgttttctccttaaaaatctctttatttggctgggcacagcagctcacacctgtaaccccagcactttgggaggccaaggcaggtggatcacctgaggtcaggagttcgagaccagcctggccaacatggtgaaaccccgtctctactaaaaatacaaamaattagccgggtgtggtggcaggcgcctgtaataccagctactcaggaggctgaagcaggagaatcgcttgaacctgggaggtggaggttgcaatgagccaagatcatcctgggagacagagtgagactcagtctcaaagaaaaacaaaaacaaaaaacaaaaaacaaaacttccctttggtttcaggtttatttgcagcctgttaacatctttttctttctgtgtggtttcagtgggagagcccatcaactgtgaggcctgggagtggcttcacagggtggtgggggacagcaggtgcacgctggtggacacctggtggcagacaggtgaggaggcctggggaacaggttccggtctaagtgctgggtctgcagggtcaggtgtgaggctgggactggggtccaagctctcaacagcaggtgcgatagaagacgcttcaacgcccgagactgcggaaaccctggagcctagagtgagggaactcagaggtcgcctggctgctgtttcccacctgtgggacctcttgtcacaacttctctgaggctcggtttcctcctttgtgaggtgggggcgccccccacacgcctgggtgagggtgaactgaggtgacacagctcagcttgctgcccaaggcctggtgtgcagcaggagctcaggggccgtgtcccttcctagtgcccctttctgaacaggggaacatctgatgagacaggccccatcttctaagggagcatgagtctaaatttaaattttagtgggaaaaggaatttttcctgtgacattttgtttggatttgtccccccttctcttgggtatctgacttattaggaggcttggggcgagagaccaccatagatgtaatgaatgtaactatctgagggctcatcctcaagccagaaaatgaggcgttcccatgggacagtcccatccattcaggaaaacctgggacagagattctctagctgagtcactggggcatttccctggtacaggctggaaataatgtgagggtaggatttgagagcatcttttttcgttgttgggttcatgtcaaatgggcgctggcccagaagcagttctttttcyccgtcttcatgtgcaagtgggtgggctctgccctttcccacttcaagcaagggcctgacatggcgagggggcctgcacctggctgtgggatgccagagctcctggggctgaggccactgtggggccgcctctcatatccacagtggagggcaccagacccacatctggtttgcctcaaagatcgttgtgcccctgaggcgtttccttgcccrcaacagggacagtcccacctaccacccactctggatacacgtatccctgggtccggggccgattatgcatttctttcttgtcatacctgcagaaacaggtggcatctgcatcgcaccacggccctcggaagaaggggcggaaatcctccctgccatggcgatgaggcccttctttggcatcgtccccgtcctcatggatgagaaggtgtrtatgggcctcccccacatgggggtcatgtgcttgccctcccttgtccctgcctgcccagcccagctctctcctgtgtgcccaggtctgtacctggcaggaggctgctgaccttgcagcgttcactgcagctggtatcatgcactgggtagtggccacacaggtggcttggggccctcctcaggggcagaggggagagctatggacagctcccttgagggcagggcttgtcattttttggcacacttctcacccagagcctgccctgtctcacttgcatgtccggggtctacagggcagygtcrtggagggcagcaaygtctccggggccctgtgcatctcccaggcctggcygggcatggccaggaccatctatggcgaccaccagcgatttgtggacgcctacttcaaggcctacccaggtgagcaggctgtcagggaccctctcattccttttcagctgactgctggaatcttattctcagaaaacatttttaatgggatttgagtgcagcgtaacactgtggccaggaataggtgctcgcgaggccagagtttgactccgcacccctctccctttgctgtacctcsctggctttccttatcttgacagtgggagtgattccccactcggggactttcttggggctacttaggtgtgggtgtgaagtcctgcactgcagccaggcccatggtaggatcctgttagctacggctgggagttttcttccagtttacttttattttttcccagtttccctttttgtcgtaaacaagactcagtgttttggagaagcatcttggatgtgctgcttgtataccttctgctccccaaagtctcgatatctcggagccacctgcccatgctctagaacatagggaagcatcggagttgcaaggagggccgatgggcgagacttcagccgcgtgctgggctgcagagcttcacgcttactgaggttgggacatgggtcctggctcagggttcctggtgctgaatttccctgctgtggtgcaggctattacttcactggagacggggcttaccgaactgagggcggctattaccagatcacagggcggatggatgatgtcatcaacatcagtggccaccggctggggaccgcagagattgaggacgccatcgtgagcacaggctgggcctcctccttcactcctrcacctccatgatgcccctgtggacctgcaagttggggtgggagtccctggcccgagtcacttctagcacccggggccgccacattttgcccttttgttctctgttgtacacasgccgaccaccctgcagtaccagaaagtgctgtcattggctacccccacracatcaaaggagaaggtgagtgtcctggagaygagctcctccctgattcctgaccccacacccattatgggcacctctgtacgaggagcagactctggagagtggagtgataggggatactgtgggccaagctctcagtgttcttctctctcaagtggaaactgtaggggaggaggctgaatagcactcgtgttcggtcgggtttctgaaatgccctggttctgctgtcctttcaggacacacatccacagtggccatgacccagttgggcttggctaagcttggggggtttccccttctgtccatggtgtatctggtggggacaccgtccagccccattacagagagtttatgagaaaatgtccagcctcatgtatcctcacgggcttggtcatagcactcaagccagctctgcagccgccacgcgtgtgtgccagagtgtgctctggagtgtgcaggctgtgtgctgcgctgggactctttggacgaatctgacctgtggttcccactgcacagcgacatgctgggggaatgcagaatgagggactagaatggcctttaccaaggccacgctttgtttcgagtctgccagcttcttggtggctgggtctgggaaggggcgggagcacctaggtgttgcaatgccaggtccatccaggcacactgcctggcctggcgtgacctggacacacactgaccccatgccagggcactgctgggcagactggcttctcctgccctgcccagtggcttggggtcaggcttgccctcccgctgggaggccaccctgtgtcacagtgtgtcccagatgtcaccttcctccctgcacttctatgtgccgttattccattatttacttaaatgctctctttaaattgacgcattgcaagattgagaatttgtttcagtgctttacaaacagcattttcagttgccatggaaaggctatgctggtaaggctgggatgtgggagagagctggtagggacccctgcccggtgacatgtccagatgtgatcaggagggtcagagaggacggagacgaggacagtttctcaggtgtgactagggtaacttagtgcccccctgaggttacctcgctctggcaggagcctgggcccctcctctgaggactcctgcatttcacatctctgggctgggggtccacagggcactgacgtgtcctgggatttgaaagccccatctatgtctgagtccagtggctgagccagtactccctggggccactgagaggggtccgggcatggtccactgtgtctggggattcagcagcccctggattgaactccataaagcaagtgcaagatcaaggaaaggacaatggaagtgacctttagacaaacgtttgggcatcacaatcactgtctttcatagggtggcctagccttaggtctgttggggtggtgttggggcatggtctgctgtggacgctgctgcccagggcacgttctgcgtgtgtggagctattgcaagtctggtgttgccaggcttcttaatgtctgccagatgtgtggggataatttgtctatcatgtgtatgatgatgtgcattttcctgatttctaatgaatttgagtatccattctataattatgaagagctgatgaacagctcttggttggctctaaagctgcctgtgaatatygtatatttgtccccactctctctgttttgcagcagctctgaaaaagggcagcccctggaccttgtctaggacctagacccagcaagcctctggtgctgctggccaggctcttgtctctcttgtctccagtgtcctgagccttgcctgcctcgtcctggctcttaactggctcctccacccatgtggaaggtttcctccctccagctccatcctcagaactcaacagtccaggcccacttctgatcccatatcaacgaccaagatgagaaaaacggtgttctttccctcaaagatctaacagcctagtggggtggcagcagggggactgacagctgttcccacatagcatgtgccataaactagattcatgggtggagtcaggaaaggcttcacagagcaggaggtggctgaactgagtcttgagggatgaataggagttcgccacatggatataggaaggcctttcaggcaaaggctgtaggtctttacagatcatagcttgttcagaaaaccaatcatccattcatgcacttaacaaccatgtgttgagcacctcctgtgttccaggcatggttctagatgctggggacacagcagtgagtgagaaggtctctgaccccatagaggggtcaagagtagaggagagagacagacaaagagcaagaaagatgatcaccaaggaaacgacacagtcagttaggtgctacatgccagggaagaatgggtgaaggtggcatggggctggggcagatgagcagtaggagagccacacatatatagaagcttcgagggagagacagagcacctcacaggccagtggggacgggcaggctatcagggatggcaccgggatgagcaactccttatatggacaacaatcaaattagatccctcttcacagtgtgaactcttcctggaacatgccagggtactgaaaaacgaaagctagtatttatgctataatgtgggctggcccgtgctgcccagcagaactctcagctgcctctcagctgtctgtgttgtccagggtggcagcctctggctgctcatggtgctgaatggcacttgaagtgtggctcatgcagccagggagctgctgatttaattgaactgaaatagctaccctggcccatggcaccatgttgcacacacacccccaaaggctggtggtgcccatttgctgtgcatctgtgcaccttctcatggaagtctcattccatcaaaccacattatgggttatttcacagatgtgtacacagagaggggaggtcccatgtcccaggtcacacgcagccagtcagcattagagctgagatgccaagctctcagccacacatgtgcactcacctggaacatctgtggagctgttagaatcgctgccacttttcatgaaactgaagtgcatctttgggtttgcaactaaagaaaccagctgctacaatgtcactaacataggattcaaaagcccttcggatttctggcagtctgtgcatagcaccctgcctcgggagttggctccttgtctagtatttaatacatccccaaacttggctttattttcagctgcctttgccttcattgtggtgaaagatagtgcgggtgactcagatgtggtggtgcaggagctcaagtccatggtggccaccaagatcgccaaatatgctgtgcctgatgagatcctggtgagtgggcctcccacaaagatggggctgtgctgctgttcttcccacaattgtsaagtgacaatgatcttttaggagcatattactcttttccaattagcatcaaaayggacactagctgtttggttttcctggctggtggtgaggatggtgggtctctgtgttgtcatagagggagaagtgagctcagccagcttacttgtccaggaggtcgcctaggcaggtttccatgctcagtgggctcatctgtccaggaggttgcctaggcaggcctacatgctcagtaagctcacatgtctgggaggccacctaggcagstttccacactcagccagctcacctgtccaggagttcacctaggcaggcttccacgcccagccagctcacctgtccaggaggtcacctaggcaggcttctgctctcgtatgttggcatgtgcaggctagtcacagaaatggggctgctggtgaagaaccttagggattttcattagagacatggggacagtaccagggttctccagcccctgtgtggttcttgagcacttttcctggtggcagtgaaggagatcgcagacccccaacccagggggtcagaatcaggggaggattgggctgcctcttcaacccccggcttttcattccctcctttatgaacattgcgcgctgtgactctgggtttggcggccctcagaggcggcagggccaggatccacttggtattacaggagttgacacatttggcccagtgaccagaatttcaggagacccggactcaccctaggtgaactgaactatttcaaaagacagaatgactgtcaaagatcccaaacacagctcttaatgcattgccatttgcagtgaatgggctgtagttgtttgagcatgctccatgttagcttttcaaacactaagacaaaatttttctcttaagtagttctcacctctgatgtaagacaaaacctgccaagtcccaggccagagaatggagatgaggcacccagtgggtgcttggatctgctgccacctgggtgcctgcacgtggcacagtggcaggacagacggacggcagtacggggtgaacccggcctgggtggaccctgcctggcggagagcatcggggtggatttcagcttaggtccagacagtaggaggataaagccaagacctcgggcctcaccgttctctggggtggaggcttagacatccactgtggatccccgggagggcatcccccctgagcagagcccttctgatcttaatgcagtccacgctagcacagaggctgggcaccatccacgctctaacactgtgcctgttccttgccaggtggtgaaacgtcttccaaaaaccaggtctgggaaggtcatgcggcggctcctgaggaagatcatcactagtgaggcccaggagctgggagacactaccaccttggaggaccccagcatcatcgcagagatcctgagtgtctaccagaagtgcaaggacaagcaggctgctgctaagtgagctggcaccttgtggggctcttgggatgggcgggcacccaagccctggcttgtccttcccagaaggtacccctgaggttggcgtcttcctacgtcccagaagcagcccccaccccacacatgacccacaccgccctcacgtgaagctgggctgagagccctttctcccatccattggaggtcccaggagtgtcacccatggagaggctatgcgacatggctagggctggttctgccatctgagtttggtttcctggaatgaaaaggcattgccatctccattcctctgccctcttgagccagcacaggaaggtgaggccctgggatagcgcgcctgctcagataacacagagctagttagctagtagcaaccgtgttttctccagatctgtctagatacaaaggtcagaaatcttatttttatacttttatattgtggaagaacagcatgcaacactcacatgtagtgtgtggatttacttgaacatgttctttttaacatgtagttatgaaaatctccttttttgcctctactggtgaggaaacatgaggatcagaggccacatttttaattattgttagtgtatttggaagtctgaattggagatgtttgtacctctgtctaaacagttcccttgagaacttccaagcctccggcatcttttcctggtgagtgtttctcctgtgcttggttgtgtataatggagctaactcctaagcggtggggtgaatgtggccgccttagttctgaagctactccagttatgttctgtttcttcaagctgtgatccagaaagatttttgtgcccccagatgcctcttgataggagaggcaacatactccaaatagttgggttcttcagggaagctattagaaactcaggtgacttgttagagcactaacttggtcagagccaaatcctggcaaacgctgcctgaccttcactctgtggttggggcagtgagaaccactgaggtccaatgatgagacttggaggtctggatccagtctctctttgttttaatgtgacttaggtgctgtcaacattagcaagataatggaaatcacgacgccagtgggtgcttacctccctgctaggcatgcaggggctggcggttggcaggggaaggaggcccagtgagccgggtcccttaggggagggagagtttgtcctctttgccccacagtctacccttcagggccttgtggcagtgccagtgttcggggggtgtctgggccactgagtacccactcggtcgtggttgtgctggcctcttgggtgagtgaacctgtgaagcccaggaggtggtgttggctgcagggtacacaaatactgagtggtggtcttttgttacaggcttagcaacaaagctgtgccctgggcatggggggctgtagtgtagctacagttgtgcgtttgtgaaatggcttarctttccatgttgctgagaggaacctggacatggtcccgggcatctgaatgatctgtaggggagggagttcaaataaagctttattttgttcattttctctttgtggtgatttttttgggtccagtaatgctactctttttttttcctgaatataatcctacagacaaaattggaaggggccttttctcctggggggttcacactcacagccctgactgctccttggtgagctcacctgccttaccaaggatggctgactgcgctgatgcatcagccacacgtggccacttaactgtaacttaaacagaatagaaatttggttcccagtctgcagttgctgcatttcaagtgcccagaggccatgcacagcaggtcagataggcgcactaccaccatcacttggaggccgcaggcggcactgggctagagcacaggcaagagcgagggacaacctggctctgagtagcgtgcatgaggagcatggcctggtccctgggtcatccctccgctagggtgggctggtccttcatcaggacacactgaatcagtgccacagaggcagaatctcagcagtctgggtctgctcctgacacccatctgccagcccctcgatcttatacttcctggcctccatagaaacagatttctgtggtttaagccacccagcctatgatatttagttacagcagcaaatgaatacaaacgaatacaactttcctacttcatattgtacagaggttgtgacaaaaaagaaagggattctggaccatgctgcatgatgccctaccagcagagttcccagggcaagccgcctctctcaaactgcagatttgggaagaaaagcaaagatgctgtgaaatactgccagccagctacttgcttactttgatgctgacctgtggttactctgtggggtgctcaccaatgttcccttggttactacagaaataattaacaaacagagctgctccagggcttctggccaagggttcctccttctccagcttctaggatcctgttctatgtttgtttggcatygctgcaatacccctctgctattccacaaagaaatttttgcagagcaaacagactggctatccaacctgctcccagatatcctgtgccagggccaggtctgcagaggtacctgctcttttgggggtacagttctggcttttctacttgacattatgacttctttgcatcatggattgtttggaaaaatatttctaattttttttttttttttgagatggagtcttgctctgtcacccagtttggagtgtagtggcaccatctcggctcactacaacctccacctccccaggtcaagcaattctcctgcctcagcctcccgagtagctgggactacaggtgcacgccaccacacctggctaatttttgtatttttagtagagacgaggttttaacatgttggccaggctggtctcaaactcctgaccttaggtgatacacccgccttggcctcccaaagtgttgggattacaggtgtgagccaccgcgcctggcctatttctaaaatttctaaacatttagtttttgttattttatagtttttgttattggtgtttagcttatttgcactgtgatcagagagcatgctctcccatgacttctgtgctctgaagtttgttgaggcctgctgcatgcctcaacctatcgccaatttttagaaaggtcccattcgagatggaaaagaagtattctgtaatcattgggtagaagattgtatacgtatccactgggtcaagttgctgatcatgttgttcaaatccatgtcccatctcacttttactcagttgtttcatcacttactgagacagacttgttaaaagttcccacttccactgtgagtttctctagttctgtcagtttttgctttggacattttgaagctttatctatttgcatatttatctagcacaattatttatgtatttatctatttgttgtgtattaggtgctatttaaaattgttataacttcctgatgaattgactctaaaagaggcatccccctttagtctctaaatgtgctttcttttggctgtaaaatatatttcttctgatattagtatagtcacatcagctttctttttgttaatatttgcatggaatagtttttccatccctttaattttcttttctttctttttttttgagacatggtcttgttgtgttccccaggctggtctcgaactcctgggctcaagcaatcctcctaccccagcctcccaagtagctgggaccacaggagaaaaccatggtgtccagtggatcattcctttaactttaatcttattatagccttatgtttttgatgtatctcttttaaatagcatgtagcttcaccttggttttttaaatcactctggaaatctttgccatttaaatgatacatttaatctacttacatttaacgtaactagttatatatttgggtttaaatccaccatctaactcagtactttttatttgccctgtttgttctatgttctctttttttttccttcctttagagtgaccattttttattattctaatttttgccctctccccattagcttgaagttataaactcttaccattttaattgttaccctagattataagttgcagccttcaatattaattggtaccttaccctatttccagtcaatacaaagactttaagaacacactttaacaacatataaacctctcttccaacttataaatcatgcattttagttttctctctattttaattctacaaggtagtattattatagttgtatgcatcttattattgttctatatagacaatattaacttagatttacccatatatttatcattttttggtatctcttctatacctccaaacttccatttggaataatttaccttctgcctgaaaggacttttgtcatttcttttaataaaggtctgctgataagaaattcattcagtttttgtctacttggaagtatttatttcatgatcactcttaaaggatattttgactgggtgtataactctagcctgttaattatttttttcagcactacaacgatctcatttccattggtatctgttttcccatgtttctgttgagtagttggctgtcaaactaacaaatggtcatttaaagttaatctaccacttttcctttggctgctcttgatatttctccttgtctttggtttttgcagttttattttttgttgacttttttttttaatcttgcttgggttctgcaggacttcttagatctgtattgatgtctgtatcattttggaaatatctcaaccattatctctttaaatatcatttttgcctattctctcttcttttgttgaggaccccaacttcccatatgatgaaatttctcacaattctaatttctgtatctcttgctgccttagcctgggttgcctggaaagcagagcctgatataaaggcttgcatgcaggtacattacttacggatgtgattctaggaacaaatgtgaggaatgaggggtatggaacagggaaggagcaagaaccaatacaagtatttgactgagtcagctggtgtgacagacaactcgggctgcatctcaggactcaggaggaatcttataaaatatgtccctgaactcactcattcacaaagagctgttagaaatacagcttggcacaaagctggaggcatcacgctacctgacttcaaactatactacaaggctacagtaaccaaaacagcatagtactggtaccaaaacagagatatagaccaatggaacagaacagagccctcagaaataataccacacatctacaattatctgatctttgacaaacctggcaaaaacaagaaatggggaaaggagtccctatttaataaatggtgctgggaaaactggctagccatatgtagaaagctgaaactggatcccttccttacaccttatacaaaaattaattcaagatggattaaagacttaaatgttagacctaaaaccataataaccctagaagaaaacccaggcaataccattcagcccataggcatgtgcaaagacttcatgactaaaacaccaaaagcaatggcaacaaaagccaaaattgacaaatgggatctaattaaactaaagagcttctgcacagcaaaagaaactaccatcagagtgaacaggcaacctacagaatgggagaaaatttttacaatctacccatctgacaaagggctaatatccagaatctacaaagaatttaaacaaatttacaagaaaaaaaatcaaacaaccccaacaacaagtgggtgaaggatatgaacagacacttctcaaaagaagatatttatgcagccaacagacgcgtgaacaaatgcttatcatcactggtcatcagagaaatgcaaatcaaaaccacaatgagatatcaactcacaccagttagaatggcgatcattaaaaagtcaggaaaaaacagatgctggagaggatgtggagaaataggaacacttttacactgttggttggactgtaaactagttcaaccattgtggaagtcagtgtggtgattcctcaaggatctagaactagaaatactatttgacccagacatctgattactgggcatatacccaaaggattataaataatgctgctataaagacccatgcacacgtatgtttattgtggcactattcacaatagcaaagacttggaaccaacccaaatgtccatcaatgatagactcgattaagaaaatgtggcacatatacaccttggaatactatgcagccataaaaaaggatgagttcatgtcctttgtagggacatgcatgaaactggaaaccatcattctgagcaaactatcgcaaggacagaaaaccaaagaccgcatgttctcactcataggtgggaattgaacaatgagaacacttggacacagggtggggaacatcacacactggggcttgttgtggggtggggggagggatagcattaggagatatacctaatgtaaacgacaagttaaggggtacagcacaccaacatggcacatgtatacatatgtaacaaacctgcacattgtgcacatgtaccctagaacttaaagtataataaaaaaaaaaagaagaaaaggaaaaaaaagaaatatggcttggcatctcaactttctcctgtggaggctgcatacacacccaggggaaaaatggctacaaggccaggtgcggtggctcatacctgtaattccagcactttgggaggccaaggcaggaggactggttgagctcaggagttcgagaccagcctgggcaacatagacctctactaaacatctctactaaaattaaaaaaaaaattagctgggcatggtggcacatgcctgcagtcccagctactcagagggctgaggcagaaggatcatctgaacctgggaggctgaggctgcagtgagccctgattgtgccactgcactccagcctgggcaacagagcaagaccttgtgtaaaaaaacaaaagtggttacacaccaggctcatcatcctgggtctctgttgttcccagatcctggtccagcaattccacaccagtttcaggctctccgatttcttcaagcaaatgctttaaatattttgttcattgttgtcccctttgggagtgtgagtctatctaattagtcatcatctaaatggaaaatattgcataatgttccactgatgtttagcagcatctctggccttccccccacagatgccagtagcatcctacctagtcatgatcataaaaattgttgccagacattgacaaatgtcccctggtggacaaaatggcccttggttgggaagcgctgggttagaccaaccggaacccacctctaaccctggcactcacttccattagaacactggcccaygtggaggacgtttatctcaacaaaaacaggttctgccagcatgtcagaagaggcacatgatgctggcaggcagcccacagtgtgcctcacagctcaaaccagaagcaaaccctacttctagtccagtgctttttcccagtcccatgctgtttcaactccttccactctcaggaggctggggt

SEQ ID NO: 93784 - DNA, 30942 bp, Homo sapiens
ttcatgaccttagattaagcaatggcttcttaaaaatggcaccaaacatacaagcaaccaaaaaacagagacaacttgtacttcaacaaaattaaactgttttacatcaaagaccctagcaagaaagttaaaagacaatccacagaataggagaaaatatttgtaaatcatacatctgataaaggtttagtatccagaatataaaaagaatttgtataactcaatgacaaaaggaaaataacccaattattacataggcaaaagatttaagtggacatttctccaaagatgatatacaaatggccaaagaacacataaaaagatgctcaacatcattagtcatttgagaaatgcaaatcaaaaccacaawgagatacaatctcacaccattaggatgactataaccaaaaaaaaaaaaaaaatgggcaataacaagtgttgaagaggctgtagagaaattggaaccctcaaacattgctggtgtgaatgaaaaatggtgcagctgctgtggaaaacgctttggcaggtcttcaaaaagttaaacatagagttaccatatggtccaacaattccactctaggtatatacccaacagaactaaaactacatgttaacacaaaaacttgtatgagaatgttcatagcatcattgttcaaaatagcctaaaagtgtaagcaacacaaatatccatcaatttatcaatggataaacaaaattggtatatcaacaatggaatattattaagccataaaaagcaatgaagtaccaatacacactacaacatggataaactttgaaaacattaagaagccaggcacaaacggacaaatattgtatgatcttacttatatggggtgtctagaagtattcaaattcatggagacagaaagtagaatattggtttccagtgcatagggggaaagggagacagagatttattgctaattggttacagtttcagtttcggaagatgaaaaaattccggaggatgtggtgatgagtgcacaacagtgtgaatgtactttatgtcactgaactgcaaaaatggtaaaaatacttaaaaatggttaaaatggtaaattttacattatgtatattttaccacaataaaaaaggaatgaagtactaacatgatacaacttggatgaatcttgaaaacattatgcttaagtaaaagaagacacaaatgattccatttaaataaaatgtccagaataagcaaatctagagagagaaaaagtaaattagctgttgtatggagggatgttgcttgttggataggaggaagggagaaattgagagtgattaataggtaggaggcttcttttaggggtgtatatataagtgttctggaatcaaatagtggtgagcacaaagcacagcattgtgactatactaacaaccactttatattttattcttaaaaatgaaaaaatcatgttttgtgaattttgtctcaatttaaaaattgggcagatagtcttcccccagaatgagtaatctaagcacaagacagacagaaagtatctttttatgacgcagcctcagaagcaacaaagcattacttctgccatattcatcagaagtgagtacctaagtctggcccacattcaaagtgaggcttaacatttaccctatcatttcagtttcacaacatagggaaactattactgtcttccatgtgcagataaacacactgaggctcagagaggttgaataaacttaccaaggccacaaggccaatagatggcagagctcctatttgaatttaaaaatacctgactccacaacctgtgcttttaactaccatcagtggtggttcttaatttgcccatttgtgaaacctatttgtgcccatttgtgaaaccaaaaatgcttggggcctcccaaaaacctattgaaacatcatttctaagccaggcacggtggctcatgccctgtaatcccagcactttgggaggccgaggcgggcggatcacgaggtcaggagttcgagaccagcctggccagcacagtgaaaccccatctctactaaaaaaatacaaaaaattagccaggcatggtggtgtgtgcctgtaatcccacctactcgggagaccgaggtaggagaattgcttgaacccggtaggcggaggttgcagcaagctgagatcatgccactacactccagcctgggtaacacagcgagactccatctcaaaaaaaagaaggaaacatcacttctgggcctgtaatcacagcacttgaatggttttgttggttggttggttggttttgtttttttgtttgtttgagacggagtctcactctgttgcccaggctggagtgcagtgacgcaatcttggctcactgtaatctccgccttccaggctccatcaattctcctgcctcagcctcctgagtagctgggattacaggtgtgcaccaccacgcccggctaatttttgtatttttagtagagaccgggtttcaccatgttggtcagggtggtcttgaactcctgacctctagtgatccgcctttcttggcctcccacagtgttaggattacaggcgtgagccaccgcgcccagacagaatgtttttaagctccccaagtgtttctgaggtgcatcctggatttggaacctgccccctgtctctgatggttttgtattattaatatgggctactgactccagctggatggtaagtatcttgagggcagggcccccacctcaagcttccttgttgatgtcactgtgatatcacaatgtctgcacaaatatcattggatgaaaggattcagagcaactgccacccagaatgtcagttgccagggagctccaacagaactgagggacgaacagtaggtgcctgagagctggccgatctggtcactctctccagtgggccacaggggcccacttggtgggcagtctctgctgccagctagggcatctcagctcagcccagagcaaagacgtgtagggacataacgctttcctcaagcttcctttcccaggtccaaacttagaggcccagtttkgggcctagaattcactgaggtttgtggctgtttgtccaacagtcaccatggatcaccgaagccgactacggggcacaggcctgaaccgaatccctgggactcagtcccgagccccccgagtcccactccccttccacgtgcaacaggaggccagggaaggagaagactgggagcgagagccacctcgtcagaggcctcctatctatgagccaccagaaagtgaagagctgccagataatgttatgggtaaggacacaccctccctcagcagaaggaggctggcatcacctttttcatcctttacctccaggaagcaggggccgggaggcagaaagcagaatatacagtgggcagaactagggtgagggatgagtttggaaaggggagattttctatctgccacaaaagattgtttcacaaggagtaaggataaaatatgtgaaagcaacttgaaactgaggctgtctgcaatattaggtgttatttataaaatcaggtgtttgcaatgtcagttgcttactgtgggccaggttctttgggaaacaaagacctattacacattgatttcagccccagacagcccacagtctaatagaggaaagacaaacttaggatggtttctgcaggattcagaaagataacaggtgcttacagaaaacaaacttaacatgttctcacttaattgtgggagctaaaaattaaaacaattgaactcatagagatagagagtagaagaatggttactagaggctgggaagggtagtggggggctggggaggaaagtggggatggttagtgggtacagaaatatagaatgaataagacctagtatttgatagcacaacagggtgactatagtcaataacaatttaattgtataccctaaaataactaaaagagtataattggattgtttgtaacacaaatgataaatgcttgaggtgatggataacccatttgccatgatgtgattgttacacactgtgtgcctgaatcaaaatatcccatataccccataaatatatatatatacatatacatatatatatacatatacctactatgtagccacaaaaaattttttttaatttaaaaagaaagataacaagcacttgcaggaggacagagggcaccctgggatcatacaggctcatgcctgtaatcccagcactttgggaggccaaggtgggcggatcacaattagctgggcatggtggcgcgcacctgtaatcccagctactcggcaggccgaggcaggagaattacttgaacctgggaggtggaggttgcagtgagccgagattgccactgcactccagcctgtgcgacagagcgagactctgtctaaaaaaaaaaaaaaaaaaaaaaacaacctaacacagggttaagttgcaacattgcctgtttgccccatagttcctttccagctggaagagaagaaatggtctagggatatggcttttcaggttagacttttcttctccaagttttctggggacctgaaaagggctccgacttgagagaggagtcatggctgttcacaaagatcactgcaaggaaaagaataagaaatgtctgttagagggataaaacgcgagctattcagaggcagaaaggtcagtttccctttgaggggcgggggtggcgtgggatgaggaggctttttgggagagatgggcgtggaaggatgtctaacaagtgctggcggcgagggtcgttggcacttcaatggtgggaagacagccatgggcgaagctttgtggaagaaataggtgtgaaggatgagaaggcctacaacagtgctgagggcgcgaggccagtcacctgcgaagttttgtgtacaagatgggcccagaaggatgaacagggtctaaaacagtgctgagggtgggagtgcagaagatcggtcacaagtgacgacacaaggtggtcttagtccagttggtggacgctcggtggcctgggcctgcccccagtgcgcagacgcacacggcaggttgcagcggcaagcggggcggtgcccacggcggggagatgggtggggagggcagggaaaaggccaggggttgggtgatggggtaattgtcagaaaaaggaacaacactgctgggagagttttctggtaacttttcaagtcttcatttaaattaaaaaaaaaaaagctgtctttgaaacaatagattaggtcactaaaaactgcctgtacgcccttgcatgctggaggaaagtaaatggttagacctaccctccctaagtttttccaggacttaaaagagctgcaagtagtgcagatcatggccccgttcacacaaatcacttcaagaaaaaaaattagtaaatgtctattagatcttgaaacttattcctgtctatctggaacttggtaacctctgaccaacaactaactccccattccttccctctcgcctcgccttccctacttcccaacctctggtaagcagcagggtaaatacagtcaataataatgtatatttcaaaatgaataagagtaaatttgaaatgtctcaccataaaagtcataggtaaacaaggcgatggataagttaatgtgatgtaatcatcccacattggatacatatttcaaaaaatcacattgcatcccacgaatgtatacaattatgatttgtcaagtaaatataatttttaaaaacgttaagtgactttttaaaaagcttattagaagtataaaatgcaagccattcacaagcatataggttagattccgcttgtgaggggcttgtgtgcagtggtgaggctttgtggaagagatggacgtggaaagatgtctaaaacagcgcggaggtcaggagaccttgtcgctgccttcacagagttgggcaacgctcccggtcctggtcagccgcgggacgcaggcgcaaatgcaggcttgggatgggggaggtgcggccggcgcccacgtggcggggcggggagcagatagggggggtagggggaggagctggtctcgcgaggccgcgccccggttcgcgcgggcgtcgtgcacgcggttgtagctgcccggcggcggcagaagcggcgctcgcgccaagggacgtgtttctgcgctcgcgtggtcatgkaggcgctgccgctgctagccgcgacaactccggaccacggccgccaccgaaggctgcttctgctgccgctactgctgttcctgctgccggctggagctgtgcagggctgggagacagaggagaggccccggactcgcgaagaggagtgccacttctacgcgggtggacaagtgtacccgggagaggcatcccgggtatcggtcgccgaccactccctgcacctaagcaaagcgaagagtaggtggtgtcccgccaaagggtgggaggggagaytccggagacacgtgtaccccggttacacccccggaatctgggcttgggcggcaccccctgggctgcctccgggccctgggcgggcctggttctcacctaggagggcggggaggggaataaaggggagttctagctgtgaagaaaggtatggtttccactgatcagattttagaagaggtagtggttaccccaaaagccgcagctgagggaaagtgggtggccytagtcccgagtttgcatcgaggatgttgggcaaactgaaacagttcctgaaacatctcaaagtgccttcagcacatcctgtctttttcaggtactatttcagcgaaggaagacattgataggttgaataatgattcacaaaaagtttgattaaacagaaaagttgctaaacacagtgctcgggaggtcaaacatttcatttttctttcttcctttttgtttgcatcttacaaagattattactgaaagccaccttccccaaagcctgtgtagttaatggatattccttatgtttctcagacatgaagaacctattacagagtgtacttttgagggaaatgggggaaaaggttagaagtatgcatttgggttgatgataaacctcgtggcaaatttgtgtcctgccaatttggtttttgattatttgcatttctgtccagtgtacaaagctaatggccactttcaggaatgacacgtcagacgaagtagatactgtgaaagttgtagcctgctacatctggatgttaaaattaaccaaaagtgaacagtggctatagataaaggctgtctcttgcttgctattcagtaacctgcttttcctgcagatcatttgacattctgtaggtgtgtagttggtttttatggttcagttacagcatgttccatgccagtattcagtgaaaaaagtaatgcttcaaattctgaatccctagagttaaatggaatgttgttatgacttaggatgggttggttgggagtgataaatgagaaaaactgttttgtcctcttaaacatttacagttcttacttgctgaaagtaagtactttcagttaacyactttgggactttttttttttttttatttgagatgaagtctygctctgtcacccaggcacccaggctggagtgcggtcgcgcgatctcggctcactgcaacctccgccgcccgggttcaagcgattcttctgcctcagcctcccaggtagctgggactacaggygcgcaccaccacacccggctattttttgtatttttagtagagacggggtttcactatattggccaggctggtctggaactcctgacctcatgatccgcctgccttggcctcccaaagtgctgagattacaggcgtgagccacggtgcccrgcctactttgagatttttaacaaaaccagtcttaaattttaaaatcagtatttccaagtcccactggttttacttgcctgggaaagtattttaaatatgtcagccagttaagtgtttacttacattacatatattttccataggaaacaaatctacttcaaagctttccctttaccagcaaaacttaacattttagttgtttactacatttctctgtcacatgtaggcttatctataattaaagatacaaagacttttgttagtaaagactattatggagccattaaggccatattttcaaataatttttagtaatatcaaaaactgttcataattaatttactgtttcctttaaggagaaaaaaaaggcgggatgcaacacgtggcaaatttgtgtttaaaaaagaacggaaaggccaggtgtggtggctcacgtctataatttcagcactttgggaggccgaggccatccgatcacctgaggtcgggagttcgagaccagactggccarcatggtgaaacccygtgtctactaaaaatacaaaaattagccgggtgtgatggcgcatacctgtaatcccagctactgggcaggctgaggcaagagaatcccttgaacccgggaggcggaagttgcagtgagcccagatcacaccactgcactccagcctgggcgacagactgagactcttgtctcaaaaaaaaaaaaagtaaataactaaaattaaaaaaaataagactagaaagacagacatcagaatgttaacagtagttgatgggagttatggagagagaggatttaagtattctttgtacttctctgcatttaccagaatctttatgttaattacataatttatattcaagacaatttttgtttttttaataaatgcaagggattgctttgggaattccatttatagatcttagcaaagtaactaccattcttaaccaaatatttccaaaatcaattttcagaacaaaatttatttttcaaatatggttttcccagtatgctaaaatcattaaggcgtgtcattgtaatagatcattacaattattataacctctcacttgagtagcattttaagtaatttatttaaagtatatataattgaatactcttctgctgtctatttctccctcctggcctttacctaatcagatcaggattatatatatgaggtaggatgctggctcaagataagtaatcatatgttatatattaatttttaagagaaattcatgttgtttgtctctattttggagtgacmataaatggtggctgttacagagaagtataagccttactttctaggacccttagccaaacttagaagcaagcattgacttcagtgtttgtaaggggtctgaaagtataagtgctatctgaatgtgttaacagagcatgaaggtgcattagtatctaagtgtgttggctaaaattactgtacgcccttacaagagagcagcatgaactgttcagtttccattgggtcacttgaaacctgttcaagggagtcttctttcaaagccctctaggaaaatgatcccatggtctgggattttacacttctggcctgacatatttgtacattccctcctcattttgtgtagcctcatctgcagcaggtcctccatgtgtatgtcagaagctggacaaactagtacatctggaagactgccattagagaaaggaaaatctaattatttgaaatgtaggaagttgacaacttgaagcgggactatagtgaagtatccaggagggtttagtgcagggtagaatttaaggggtctgtgagcatgaataggggaaaaaagtatttattttcactaatccccatctgaaatttagtgtttccttctattatgaatgtcagcaacaaactacactatcttcagcagcacttgcttgtacctttcaccaatagaatcacttattttcttgctacatatggttatcgcaggtatcctgaarcaccattttcactcatcattatcttacgtagttgtcagattacractagatcttgcagttttgaagtgttatagagcacatgtattatgatatcaccaatttttttwaatatttttataattgcatttaaatacaattggtttcttttgtaattctatgtattttcctttttgcattcaataacactcttttaagaagtctgtaagcttcaccagactgccaaagagatctaaaggtagccctgatttttagtgattttctaaagatgtccttctaccattccaccaactttctcagtgttacagaacatcatgtattttwytttcttagtttccaagccagcgccctactgggaaggaacagctgtgatcgatggagaatttaaggagctgaagttaactgattatcgtgggaaatacttggttttcttcttctacccacttgatttgtaagtaatacatgtaaatagctagtaaaatctcagtctttatcaattatttttcaggagtatcaaacaaattattttgttcagctcttggtttttaaaaaggcaagctgaagtaaagaaatgtatttaaaaaggtaacatctaccatatatttcagagtcataacacaccgacctcaatacttatgtctacatgattatgttataatggaataattagaggaaagctacaatatattcattaagctatacctactaaggcaagaaaatggactgataatatattagaaagcatttaatagcaagacctatgccataattctttttactgtatctctcttgattagaaaattaattctgtaatcccagcactttgggaggccaaggcaggtggattacaaggtcaagagatcgagaccatcctggccaacatggtaaaaccccatctctactaaaaatgcaaaaattagctgggcgtggtggtacgcgcctgtagtcccagctactcgggaggctgaggcaggagaattgcttgaaccctggaggcggaggttgcagtaagctgagatagygccactgcactccagcctggcgacagcgagactccatctcaaaaagaaaagaaaaagaaaattaagccattttctctagtgataccatgtaactgtggtttttccatttttattctttgctgcatctgttgcttttctgggatttgaacattttgctgaaaatattatatactgcttaaggaataaggaataacacctgtgtatatgttatggttattgtggggtttctcgtctttttttaactctgtgacagtgagcgtttttgtatatggtcagaaagttgactaaaagtaaatacccttacagctttattcacgttgaggatttaattttattttacaaaacactattttgagtgtttttcaaaattcatgaaagtgagaagagaccaaaaagagttatgtcaatttttatcttttattctcttggaacttactttttggttacaacaaataactagaagtttcctcctctatctttgccactgtgcctttttccattaggactaatctggaactacatagatcaaatttaaacttgcagggagggtatacttaagctcattgctataggttgtttctaggccagggattaacaaattttttctgctggatttggcctattgacctatttgccaaccccygctctaagccacaaaggaagaattctcatgaaaattattacattgagactaaagttatgagtctgcataatatataatcttttaaattataagaacttgcttctttctaatcaactcatattgtgacttgatttttttaagtatagcttaatttctaatagaaaccagaagtagaaatttcagtagacataaaaaatgacaggccttctaaattcatgttgttataaaaccagaaggttaacatgtatgttaaatatatacgactaacaccctgaatttggaarttagtctaatgtagcagaaaaatatgttctgtgtttctccattgttattcataactccataatgggtaagagatagttaattggagcatgttgttagcaatggtcttctgggacaaggagctaagatagcctcttcctgttttcatgtaatgctggactgtgcctggttagagaaggaagaattctggggcatttgccacagtctacaaggaggaaagttacaaacgtaacccttcagtttcctgccaaaactttttctgtcttcactaagaagttggtcaaatgtatctctaggtagcattccttgaaataagaagaaaggcagaggctgggtgcagtggctcacgcctgtaatcccagcactttgggaggccaacatgggcggatcacctgaggtcaggagttctagaccagcctggccaacaaggtgaaaccccrtctctactgaaaatacaaacaaaattacccgggcgtggtggtgggcgtttgtagtcccagttactcagcaggctgaggcaggagaattgcttgaacccgggaggcggaggttgcagtgagctgagatcgcgccactgcactccagcctgggtgacagagtgagaccctgccacaaaaaaaaaaaaaaaggaaggctgaggctgaccattcctacccttwagaaaatattaaaaatacattttatagcccaggtttccagggacatcatccgagatyagaactgtctacttggacatgacagtgctgtacctgaatacytgaaacatgttaaaatcctgtattggtatctggtaggaacttgtgccctaactaagtctatgtttttcaaactttcttgaccatgtctcacagtaggaaatacatttttcgttgtcagccagtacacaggcacatatatatacggtarcattccatctggatgcaccagcacagccatgctccttaaaatactgaaaaaccctcatatcatgtggtaaatagccacttccctttcctcaccaactagttagtcctcctgcctgatccctttcagaaacctccagaactaaagccagctttgagttaagattgttaaatattttgaatatcatcactgttgaagacaaacatatatatttgtayatataaatatgtgtttcataatttacccttastatgtatgatagagtctcctgttttctattcgatttcactttttaaaaatattttttagaactcagttaatttaaggagtccctaccacggtttgaaaaaatgccaccctagtaatattctgtaaacatggcctgacaacatgagggtattaaggtataaaatccctggctgcacaggactggtagacaaggtggaagaggaccttatcaagaaaggaggggtgggggtactggaaaacattgcctcctctccaaaatacacatagatgcatctaattcatagggttggtataggaatattaaaaaaaaaatagtgaaatgacataaaatytgtatagatcctttgaaagctataaaatactatataaataaaaggtattattaaataaaagtaataaaatgaggggtggctattgctataagggagaagggaacattggttgactactgatctattaagttgtaataagaaagtttattgagatgtagttgggaactctgtaatatgtttctgtcttaaatatttgattaaatgacagtcttttagactactccattttgaaaaggttcaaatataaaattgttcttaatgtgcatttttattattaaaggtatttgtaaaaattgtcatttgaaagtttaggtatatgcttatttggagaatactgaatatttttttttttttacctttcagcacatttgtgtgtccaactgaaattatcgcttttggcgacagacttgaagaattcagatctataaatactgaagtggtagcatgctctgttgattcacagtttacccatttggcctggtcagtatcttacacttatattcgtagaaaaaaaagaatggatttactcttaaagcatggasagataactcttgatatgatataagaatatagtcatttatcagacaattcaggaatagctttatctaagagtaatacatgtaactacacattttccaggttaaaaaaagagagaagagtaatataatcagctgctataataaaaatgcttaaggattttataggacatttcaaaataaggggaaaagttaaatgcaatagatgtgatttctatagcgaaaaccactgaattatatgcttatgataaattgggttaccataatctggaggaaaaaaatctttaaaatatgccatttctctgttacacagttatatagtcaaactcagcttttacaattttgaagaaacaatactttttaaaaatgaattttaaaaaatgtttaaaaattcattaatcataaaaagatgttttacctaaattygttataaagaattgcaaattaaaatgacgagatgccaattttccctgtctggttggccaagatttaaaagattgaaaaaatgtatccactgtggacaaaaattgaagaaacggcactcacacacagctgtttagcatttctggagagcagttgggcaacatgtctcaaaattggaaatttacatgttaatatgagtttttatagtgtccacagtcttgtgcagaaaactttgtgcacaataaagaccattcagaattgggctgggcacagtggctcatgcctstaatcccagcactttgggaggccgaggcaggcagatcacctgaggtcgggagttcgagaccagcctgaccaacatggagaaaccccgtctctactaaaaatacaaaattagccaggcgtggtagcaggtgcctgtaatcccagcaactcaggaggctgaggcaggagaatcacttgaacccaggaggtggaggttgcagtgagccgaggtcacgccattgcactccagcctgggcaactgggcaatgagagtgaaactccatctcaaaaaaaaaaaaaaaaaaagattcagaactattggttttaaaacataatattcaatttattaaagttamaaatttgaaacacaagcttttctcatttataatctgtgtgtgtataacaaattttcattgcttggtgagctacaatttaattaattacatttccctaagaaattaattcccataagtatttttaaatgcagttatatatttwatatatttgaattccttaagtatctcaattttcagacaaaccttcccaaatacttaagtagttctaatatgccaaattctcttaaacattataaataacttaacatataaatatgtactgattatttcttaatrtaaaaatattaaaatagcctggcatggtggctcacgcctataatcccagcactttgggaggtcaaagcaggagaatcatttcaacccaggagttcaagaccagcctgggcaacatagtgagaccccatctatacaaaaaataaaaaaaattagccaggtctggtggtgcatgcctgtggtcccagctactcgggagcctgagatggaaggatgacctgagcctaggtggtcgaggctgtagtgagccaagatcataccactgcacttcagcctgggcaatagagtgagatcctgtctcaaaaaaaaaaaaaaaattaaaatataggcttaatttgcttcatcatttcctttaaaaaaagaaagacagggtcttactatgttgcccaggctggagtgcagtggcacaatcaatcatagctccctgcagccttgaactcctgggctccaacaatccttctacctccccaaatagttgggactgcaagcttgcaccaccatacctattttaatttttatttttgtagagatggagtcttgccatgttgcccgggctgtgcttcatcacttctgtagtaattataaatcttccgaggattaaaatgcatatccactaaggaaaaagttayggcatcccaaataatttgggattgctttcccaaggaaatttggggatacattctcagcctgatagggttcacatcaaccagaaatttctacttgggtgtcagaactggggctccagatatctagagcaatgtcgttttgttttctatctgctgtgtcagtaccctcctgttagagcatcagcccatgtctcctggtttcaagttacagaatacagattgagcgtccctaacctgaaatccacagtgttccaaaattcaaaatttgagtgctgacatgatgctcaaaggaaatgcttagtgaagcatttcagagttcagattagggatgttcaaccagtaagtatgcagatataccaaaatcggaaaaaatcctaaatccaaaacacttctggtcccaagcacttccgataagggatactcaacctgtagtgaagactgaggcatctgatattataactcacttccttcactgcttcaagtggactttgcatttgtctctcagaatattaaaatgtcatccatttgtatcctgcctgtctgttcaaggctttatcttatgatcacactactaaggttatgcttttgatactacgtatcttttgatctatcagtttcactttcagaaatcaattagacaagtgtataaaagtaagaatacaaggatgttttcagcagtgtttataaagcaaaaaaaaaaggtaaatggtttaaatcttcatcatggaattaagtaaaatacagtaaagatgttcctgacttacgatggtttgacgtataatttttcaactttacagtgggtttatgggatagtaaatacatttttagctaatgatattttcaatttatgatgtgtttatcaagacacagccccagccgggcacagtggcctgtaatcccagcactttgggaggccaaggtgggcggatcacctgaggtcaagtgtttgagaccagcctggccaacgtggcgaaaccccatctctattaaaaatacgaaaaatagctgggcgtggtggcgggtgcctgtaatcccagctacttacaaggttgaggcagcagaatcacttgaacctgggaggcagaggttgcagtaagccaagatcgtgccattgcactccagcctgggtgacagagcaagactccatctcaaaaaaaaaaaagaaagaaagaaacaaccccatcttaagtcaaggagtatctgtgtatccatacattaaaaatgtgttataggccaggcgcggtggctcacgcctgtaatcccagyactttgggaggccaagccgggtggatcacctgaggtcaggagttcgagaccagcctggccaacatggtaaatccctgactctactaaaaatgcaaaaatcagccaggtgtggtggcacatgcctgtaatcccagctacttgggaagctgaggcaggagaatckcttgaacctgggaggcagaggttgcagtgaaccgagatcacgctgctgcactccagcctgggcgacagagcaagactccgtctcagaaaaaacaaaaatgtgttgtaggctgagcacaatggctcacggctataatcccagcactttgggagkgtgaagcaggaggattgcttgaagccaggagttcgagaccagcctgggtaacaaagccacaccccatctctacaaaaaagtgtttaaaacattagcccagtgggatggtgcacacctgtagtcccagcttctcagggggctgaggcaagaggatcgcttgagcctagaagttttaggctacgctgagctatgatcacgtcactgccctgcagcctgggagacagagcaagaccctgtctcaaaaacataaaataaaaatgtgttgtgtatatatatttttaatgtttaaaggatatgaatatattaaatgggaaaagcaagaaaatagaaagtatattagcctgtttttgttagtgaaagaatgtgtgtatttcatgtgtgtgcgtgtgcatgtatagagaaagagtgctgttttaatatatgccgtttacttagctctgagaggtaagcgttctgtttgttacaggattaatacccctcgaagacaaggaggacttgggccaataaggattccacttctttcagatttgacccatcagatctcaaaggactatggtgtatacctagaggactcaggccacactcttaggtacctttcagtggttttatattatgacaaatccaagcgtgtttataatcctccttgaaatagatgttatttatgaaataraagaacaaattttgatcaagaaatataattttgaggccaggcacggtagctcaagcctgtaatcctggcactttgggaggccacggtgggcagattacttgaggtcaggagtttgagaccagcctggccaacatggtgaaaccctgtctctaccaaaaaatataaaaattacccaggcatggtggcgtatgcctgtagtcccagctactcgggaggctgaggtgggagaattgcttgaacctgggaggcggaggtttcagtgagcccagatcatgccactgcactccagcctgggcgacagagtgaaaaaaaaaaaaaagaaataattggctgggcatggtggctcacgcctataatcccagcactttgggaggccgaggggggcagatcatgatgtcaagatatcgagactatcctggccaaccaacatggtgaaaccccatctttactaaaaaatacaaaaattagctgggcatagtggcatacgcttgtagtcccagctactcgggaggctgaggcaggagaatcgctcgaacccaggaggcggaggttgcggtgaggcgagatcacgccaccgcactccagcccaggcgacagagcaagactccgtctcaaaaagaaaaaaagaaagaaagaaaaatgttactttgttctattagtctttaaactactaaacttaaaccgttagtttatattaccctgattaaactatgttagcatcatagacttttagagctggaagattatttagaggtctttcacccaccctgtcatcttacagataaaagagacagattcatagagttccgtgatcttagccaaagttatataataatttaattgcagagcccagacttaaatccaggtcccccaactccttgtccatttctttttccttttttgcaacctgactccagtaatgtttttttctaaatacaagtgtcatactacttagcaaacctgtgtctttggagtaggaaaaattaaggaaatattttacccagacgctctcactgggttacttgagctaacaaacattaatagaattctttgaaaagggggcaattttagtgtggaacagttgtaatttggttgtattgatttgctttgtagtgccaatagtttttcttgaatgttttatgtgaaagtgtcagtattttataatcctgtgtttttttataacaactttattggaatayagttcacatataatacaatacccatttaaagaatacaattcagctgggcatggtagttcatgcctgtaatcccagctctttgggagacctaggtgggaggatcccttgagcccaggagtttgagactagtctgggcaacataacaagacccttgtcttctacaaaaaaaaawaaataawttttttttgttaaattaggccattgtggtggcacattcctgtagtcccagcctactcaagaggctgagataagaggatcgctagagcctggaagttcaaggttgcaatgatctatgatcacaccactgcactctcgcctgggtaacaagagtgagaccctgtctctaaaaaaataattaaaattaaaaataaagaatacatagccgggcgcagtggctcacgcctgtaatcccagcactttgggaggccaaggcaggcggatcacgaggtcaggagatcgagaccatcctggctaacacggtgaaaccccatctctactaaaaaaaatagaaaaaattagccgggcgtggtggckggtgcctgtagtcccagctactcgggaagctgaggcaggagaatggcgtgaaccctggggggcggagtctgcagtgagccgagatcgcgccactgcacttcagcctgggcgacagcgagactccgtctcaaaaaaaataaataaataaagaatacatttcagtggtttttgtgtattcacagagttgtgcaaccatcaccacaattttagaatgttttcatgctccaaaaaaccccatacccattagcagtcactccatgtttcccctaacccacttcccctggctttaggcaaccacaaatctactttatgtctctatagttgcctattctggacatttcatataaatggaatcctacaatatgtgcttttatgactagcctctttcacgcagcataatgttctcaaggttcattgtattgtatcatgtattgctaccagtagtttcccctcttttgtacttgctaagtatttaatgttttctgctttcataaaatctgttactaagttaatttccaagaataaatatgccccaaaaacgactgaggcagttttaaaatgtggaatcatttgaacattaaccaagtaaaattatctaacgttagctatattawttgacctgagccagtagtttctttttaaaatttttttgttaaggccgggcatggtggctcacgcctgtaatcccagcactttgggaggccgaggcaggtagattgctcaagtccagcagtttgagactagcctgggcaacatggcgaaaccctgtttgtacaaaaaatacaaaaattagctgggcgtggtggcacacacctgtagtcccagctactcagtaggctgtggcgagaggatcacttgagcccaagaggttgaggctgcagtgagccgagatcatgccactgcacttcagcctgggcaacagagtgagatcctgtttgaaaacaaataaaaaatttattatttattttcaaaataatacatgtacatatgcacatagtttttaaaggtcagattatcttcaacaactgtaaatactctggtacatttcttagccaaaaacaaatttttaaagctgcagttttacagtgataattccaaattatacattagattgagggagggatgtccacaggtgtgtgtacgtgtgtgtgtgtgtgtgtgtataccattggagtaggtaggtagtgtggtgtttgttctgtatagcatccttttgtgtggatggtataggaattcacaatacrtaaatgaraagaaatgacctcatctctaccattcttctgttttacagaggtctcttcattattgatgacaaaggaatcctaagacaaattactctgaatgatcttcctgtgggtagatcagtggatgagacactacgtttggttcaagcattccagtacactgacaaacacggagaaggtacctctcccttctaaccttttgattttttagtttgaaagatagcatarttagttaggtttcttatcgtaaaagtaatcgatatttccaaagttttctgattatttacaaattattagcagatccttttaacagaccaaattataatttacagtgctttaacaaaatatcaggccaggcatggtggctcatgcctgaaatcccagcattttgggaggccaaggtaggaggattgcttgagctcaggaattcaagaccagcctgggcaacccagtgaaacctcacctctactaaaaatcaaaaaaaaaaaaaaaaaaaaaaaaaaaaatatatatatatatatatatatataaactaatatattctgcttactaaatgagatgcaaaaatattcactatttgcatagtcctttttgataaactcaaagacaaaagtttctgctactgcaatttttaaaattatgtttctgcaagcttagaatgtgtcaatctggcaacatttagtgatgtagttttcatttgcctctttgcattattgaatttagccttttaaataatccttgatcacttctctgcctttcagctaagatgaagtatagtaatgtaatctctgggcttattcagtatcacatttgtaatctacaagttcatcattttgctaaaatagaacacattatatattccttttaaaaatgtcactgagtcaggatgcattctaatgtctcttttgacaaacagtgaatcatgtcatcaktacaaagtactgmagtatacatggcaaacaagcgtactggaagtttatgtaaatttggaggaatttttgccatgcccaggcctttcagctcaccagattcccaaactttccaactgtattagaggggcaatcaatttgatttcttatattttaaatgtaactaaacataattggtaaaaatgaaaatagattagctgcctgcttatgagctccatgactaaaattccttggtgtcaacaggcagctaatagaagtcatgtgctcrgtggtctggaaatgttcttattagtatattctattcagtttcatatagaaacagaaaaagtcagttgctgaaggtaactgaattctgtttttaaaatgtcttctgcctctttttgtttcttttagtctgccctgctggctggaaacctggtagtgaaacagtaagtatatatatatgtttttatgttgagttgatggttagagttgaaaaaaatgctggccgggcgcagtggctcacgcctgtaatcccagcactttgggaggctgaggcgggcagatcacgaggtcaggagatggagaccatcctggctaacatggtgaaatccgtctctactaaaatacaaaaaaaaaaaattagccgggcatggtggtgggtgcctgtagtcccagctactcgggaggctgaggcaggagaatggcatgaacccgggaggtggaggttgcagtgagccgagatcatgccactgcactccatgctgggcgacagagcaagactccttctcaaaaaaaaaaaaaaaaaaatgctaaccttagaataatcttcccttgttactagaactgtcttgattttgtaaatgaagtaaacattgctaagcagaaatcagagtacagacattctttggcctgtaggaagagtagctgaaaccggagaaagcagaatatggggcgtgatgctgtgaattttaaagccaggtatacagataaatacaccgttcgaaaaaaaaaagtagggcagagtggagacttggtagaataattcagaggtcttataggtcatgtatcgaatttcttcctgtattgggacaaagaaaacagtcacaagcaaaacctttctatgcatagtaagaggttttgagaaaatctagctcaattaatactgaagataatgattctctccttgtcatgaagaaagaaaagattgaaacacgtatattctttcatttaggaggctgtataatttttttttcttttttgagacrgagtcttgctctgtcgcccagactggagtgcagtggcatgatctgggctcactgcaacctccgcctccagggttcatgcaattctcatgcctcagccccctaagtagctgggactacaagcctgcaccaccacacccagctaatttttgtattttttggtagagacagggtttcaccatgttggccaggctggtctcaaactcctgacctcaagcgatccacccacctcagcctcccaaagtgctgggattacaggcatgaggcaccgcwcctggcccaaccaacctatttatgaaagcatttattaccacaacctaaaattagaattaggatataactccaagggcagggactttggctgtgttgttcactaataaatactgcctatcataataccttgaatagtttccatatagtgagtctgttgaaagaacgtccaaacacataaatatatacaactattatttgtcaatcaatcaaaaattaaaaagaatgaccaccacagtatgtgataacacgtatgcatttttctggagggagaatccatagttttcaccagattctcagagatttgtggcccccaaaagttaatcatgtaaatagtcaacatgttttccgaaatgtccggtactcatcctataatacctttcagagtgaaattgtacttcttgggagctctcactgatctctgggaacttggacacctagcacatgcctgtgattggagatgatgttttcatcagtcacagagggttttgctgcacctccagggggaagtgccccctaccttgaagatgtgtctgaaatgctttttaaggcttcttaagctgctgcttaagccagcagcttctgattcatatttctttctataagcctcataatcaacaaatgtaaactaatgtgactgatttatactttaaggtacctartggtcaaagtacctttaatgtgtaatttcaaatcccctttgagatccatcagattaacatagagatgagtaagtttgctattgtaacattaactttgacctcaaagcaaaactgttttgcaaacccatcagaaattgattcagaatcagtcaattacaaaagttacaataagttatttttatatatataaagatagatgtactttacctataactagcaaataacataatgtgaggycaaattatattggaaattttttttaagtctaacaggattctaaggctgtgatgctcttagagggaacacaacagtattcattaactattgacagtagtgcttgatgtatttgagtttgggttttttttttgtttttttttttttactttgcagcttgagatttaaaaggtgtattctggactttagtgagcccttagtgaacacctgcctccttttcagataattgtgacataccatcattttagcagcatgattttaaaagtacattaacatctgtagccatgctctctaaatgtgtttgacttaattagatcaaacctgaagataccatgaaagcctggtggccaagagagagctgtaagtaagttttggggtgcttgagtacagatgttaatttattcacacaaaataaaaatatttgtcttttggaatagccgaaattagtaggcaggacaaatctcatttttttctaaatatacaatctgatatacaaaaataatttttagtcaaggcatgggcaactaatgtcagactactcattatgtactttggctttaaaatgaataatttcctttcttcgttttgttttaacagataatcccagatccagctggaaagctgaagtatttcgataaactgaattgagaaatacttcttcargttatgatgcttgaaagttctcaataaagttcacggtttcattaccacattgtgttgcagtagtaatttcttggagaatataaaaatccacatcaaagtccaaagatatttagcgttagcgttagacactgatgccaaaagacaagcagttattctctgtctttccaaaggaagaaatgggagattgaatcaaactgagtaatagcaataatgacatttacggggtacatgccatgtgccaggccttgtgttaagcaggttaggggcattatttaatcctcacagcaactcattgagttctttattttacagatgaggaaactgaagtgcaggtagattacttacttacccaaagtcacatagctagctagcaaaggcaaaatccgaccttgcacccagacaggctaattctagtttctgagctcttaacactccactgtggctcacctctccatacctttgagggtagcggtaaagaacgggttgtgagcacactcaccttccacagtaataggaatagctggccccatggcccactgctctgtaataacataaagccttttgcccccgccgccatctctaaatttacatcttcagcttgtaccaaatttataagttagatatttagtttaacaaaatttgaatccttaaatacatataactagctcttaacaaatgaccatatacaaagctgaactccagtgctatttcatcatcccatttgccaccccaatatggcaattactttattgtcattatctgtagacatgccatgtagttaagagaccaggtacccaggagaattaacttcatcctgtcttccatgctaatctgctaatctctgtccgttttgtttctgagacagggtctcactctgtcacccaggctggagtgcagtggtatggtcttactgcagcctcaacctcacgggctcaggcaatcctcccacctcagccccccaggtagctgggactataggcatgcaccaccatgcccggctaatttttatgttttttgcagacatggggtttcaccatgtggcccaggctggtcttgaactcctgagcctaagcaatccacccgccttggcctcccaaagtgtgggaagatgcatgagcccctgtgcctagccatcccctctcttaatacaaaaagcccttctcctggggaaaggccatcactagaagtggtggggggattactgggcttctggctgaaattgaggtctgtcgcaaatggcgggtgatttgtagatacacaggaatccagctgccatttataacctttttctatagcagagtatgttctaatgctagtttacagttgaagttttataaaccaatctattagtaaagttgaagactgctagtactttgatatctaaacaggtttgtgataaccttgtcaataggtccaatacaatgggaattctatatgcagatttcctccttccaatctaaaaagtacaaatgttttactcatgaaataagctggtatccctttttttaagagtcagggtctcactctgacatcaatgtatttatgtgtctgtatatattcatacacgtacactccaagctggagtgcagtggcataataatggctcactgcagcgtcaaactcctggcctcaagcgatcctcctacctcagcctcccaagtctctgggactacaagcatgcaccagcagcatcttcttgattaatagtttccattctttggagcttttctagcctcctgttcattttagtatggtttacaaggagaactatttgtaggtccaccctgaaaaaccagtcattaatgtttcattcaacattcagcaactattgaccacctaaacacttggcgtacatcaatgaccaaataacaaatttctgccctcaaggagctcagtatttgattactgaagcgggtgctgatagaatagtaatttcttggtactcacaagtaagtgaagatacataccctgacttgccactttttttttttttttttttttttgagatggcgtctcgctctgtcacccaagctggagtgcagtggcacgatttcagctgactgcaacctctacctcctgggttccagcgattctcctgtctcagcctcccgagtatctaggattacatgcgtgtgcctccatgcctggccaatttttgtatttttagtagagacggggtttcgccatgttgctcaggctggtgtcgaactcctgaactcaagtgatctgcctgcctcggcatcccaaagtgctgggattacaggtgtgggccacagcgcctggcctctcaccacttttcgtattaactgagtgatatacatagcttccgaataaaatagcactaaatgcaccccttttgtcagtgccttttataaactatcccttcaaagagctgacttctgaaagtccataaatccaagcttacatcttaaaagatggtctcgtggccatttacaagactggaaaaagagttgagaaaggatagtcccctgccctactggagacgatggaccctgggcctaaccaggatgcagctactagagacctattcccagaagatgctgacctaccataatctggagcagtgcttctcaatggggagggatggagattttgcccccaggagacatggcaatatctgggatgtttttattgtcaaaactgaaaatacagccgggcgcggtggctcacgcctgtaatcccagcactttgggaggctgaggcgggtggatcacgaggtcaggagatcgagaccatcctagctaacacggtgaaaccccgtctctactaaaaaaaatacaaaaaaaattagccaggcgtggtggcaggcgcctgtagtcccagctactcgggagtctgaggcaggagaaaggcgtgaacccaggaggcggagcttgcagtgagccgagatcacgccactgcactccaacctgggcaacagagtgagactccgcctcaaaaaaaaaaaaaaaaactgaaactactactggcatctggtgggtagaggccaagggtgctgctaaacatcctacaatgcacaggacagtcccacagcaaagacttttctgcttcaagatgttaactgtggcaatgttgagaaaacccgctctagagactaaggaaaggaggagaccagtatcatttagtagctgcctgtacagcaggaggtcagaacaatgccacaacagtaggagcttacccaaaataatagatcaagagatgacctgcccacaaacatttaaaaaatagtaaataaggccggacatggtagctcacgcctgtaatcccagcactttgggaggctgaggcgggcagatcacctgaggtcaggagtttgtgaccatcctggccaacatggggaaaccccrtctctactaaaaacacaaaaattagccaggcatggtggtggatgcctgtaatcccagctaccggggaggctgaggcaagagaatcgcttgaacccgggaggcggaggttgcagtgagccgagatcacgccactgtactccagccttggcgacagagcgagactctgtctcaaaaaaaaaaaaaaattagtaaataaataggaggccaggagcagtggctcacgcctataatcccagcactttgggaggccaaagtgggcagatcacctgaggtcgggagttcgagaccagcctgaccaacatggagaaatcctgtctctactaaaaatacaaaaattagccgggcatggtggcagacacctgtaatcccagctactcaggaggctaaggcaggagaatccattgaacctgggaggcggaggttgtggtgagccgagatcaggccattgcactccagcctgggtaaaaagagcgaaactccatctcaaaaaaaaaatgtaaataaataggtgactgactggccgcggtggcacacacctgtaatcccagcactatgggaggcctaggcgggtggatcacctcagatcaggagttcaagaccagcctgactaacatgatgaaaccccatctctagtaagtacaaaaaattagcttggcttcgtagtggacacctgtaatcccagctacttgggaggctgaggcaggagaatggcttgaacctgggaggcagaggttgcagtgagccgagatcgtgccactgcactccagcctgggcgacagaatgagactccatctcaaataaacggaagtgacctgaagtttctatgaaacacaccaggcaatatctttccagtgcactaatatatgaatgacatctattattccctgcttctccctataatttctagtcttctgttgaatatttcacatttaagcctggccagtgttctgaggtttccagtgatcatggtggacagctctttcagggatttcttagtccctagaatctcacacaagagatcattcctcacgccctccccaccacatccccattgtctcttctctgtccaagagctcatctaaccctacatcctaaacttcccatctgtcactaggtttccaggttgtatattttgttctcaaacacattaactactattttattatttaatgatattttggtatcctaacccccctatgaactttgtgacaacactatgtcactgagaaatctttgaatacaaggttattaatatataagatgtaacaaaatatgtgtttcaggtaaataatttcatagaccgggcgtagtggttcacacctgtaatcctagcactttgggaggccgaggcgggcgaatcacttgaggtcaggagctcaagaccagcctggccaacatggtgaaacctcgtctctactaaaaatacaaaaattagctggacgtgctcgcttaaacccaggaggcggaggttgcagtgagccaaggtcgtgtcactgcactccaaccttggtgacagaacaagactctctctcaaaaaaaaaagtttcataaaagtgtctgcagtggaggggaatatatatacacatatctatgtatttgtgtgtctatatatattcatacatatatatagggtcaaaaaacttttacagctgggtgcagtggctcatgcctataatcccagcactttgggaggccgaggcaggaaggtcacttgagcccaggaatttgagacccgcctggacgatatggtgagacctcatctctacaaaaagtataaaaattatccaggcgtggtgtcttgtacttgtagtcccagctgttcctgagcctaaggcaggaggatcatttaagcccaaaaggtcaagccctcagtgagctgtgatcacaccactgcactccagcctgggcaagagagcaagaccctgtctcaaaaaaaaagaaaaaaagaaaagaaaagaaaaagaaaaactgtttttcctctgttctcacatgacaacaatcaatacagaagacttctgtgaccaaatgtgtagggtgtagggattttccccaccaacaggcaagcaattctgcagtggacaccagccaggaatcttctgatccaattcaattctgatgctgtccacctggatatagcatcagataccacaggttgagggctcagacccacaggactgcccccacttcagacaccagctcccaagtacaggcctctggaacttctgactgactgacttcaagttggggttcccatgaccccctctttaggctcaattgttagagcagcttgcaaaactccgggaaaygcccacttacacttaccagtttcttatgaaggatattttgaaggatacgaataaacacccagatgaagaggcacatagggcgaggtctggaagggtcctgagcacgggagcttctattcccgtggagttggggtgcaccatcatcccaacacatgggtgaattcttgttcaccttcctgcaagccttcaccagctcagctgtccagaagttctgcgtacctggtcctcttgggccttttatggagacttcattggataggcatgactgaagcatggacaaccgtgtcaaaatgtgattggatcgcttctcggccttttggctaagatcaagtgcaaaacgtgattgggcaaaaagggcatgatctaatgctaatagacg

SEQ ID NO: 93785 - DNA, 39882 bp, Homo sapiens
ccagtccctcccagaactccctggagtcgccgcactgtgccagaaaccgcaaaggaggacaccacgggcgggggtgggggccgactgctgtccccagactctggacacagtctggcccgcccgcggagctcagtcacagccagccgagtccctgggcccagcagcccttgcaacgccggccgcgtctccagcacccgcggtccgggaactgggagggtctctccgcgcctcaccagcagcggcccgactcgcggtccgagcccaggccccagcgaggtgccaagcagtgcccaacctagcgccgggggccgccgcaccgcccgcgcccgcacccaggccccggagcccagtgccaggagccgcagcagcgcgcggctaaccagtagctgcggcggcccgggaccctgctcttcggtgcccgcgtccggcccctccagggctgccaccagcagcgccggccctgccgggctctcccctgcaggcctcagggccagcaccaggcccagctccgccgccggccacgggcccccgggtggcagcagcactgccaacgggggtgtctcggtcggaaagggctccaggacccgcaagacagccagcgccatggtgacaggacaccaacgaggagggtgaaggagcgcagcttccggagccagagagccagacgactagtgtgcgcgagggccgcttccgcttccgtcaggggaggccagaggaaaaggggaggggcgtcgggtgccgcgaacttgctctgagggggttagctgcgcctcggattgatctgcgtcgtgcctcgataggcagtaaccttcatcgctgcggttgcgtagcgtttacccatgcgccatttgaacttgtgcttaagggatttatctttgccttctacggaagtaatgttctcttaactatttttccccgtggcatgaacgtaacagtttattgactgataaatgaacagtcagcatgctcgggatgactgggcccagtactgggagctctaggtgaaatgtttcggaaggagtccgctcctctgcggagctcctgcagcttcccctgtggaactgtgagcactgaggtttgagggttgcaggaaaggttgcaggagggagtagcaggattagaaaactgtctcacacttgcttataggtatatagtggctgctgagtgaattactagatgtgattcatacagccctggagtgcttggtgccaccacacatgttccagcacatctggcacaaaacccatgttccaggacttcttgccctgttcattgttctgtttgttttactcccaccaaacttaagttgaagacaaaacagcttttctttcaccccccccccccaaatccttgcagatcggaaacccattcactttctatcctagagcggggcaggcagcagagcaggcagaaggaaaggagttcaaggcttctgtcagcataacaccaacagtcgacttcctgcgtgtgctgttatttagattccatccttctcttcacctccactgttctgtacaagacactcagctagtggtaggccacatttccttttttatggcaacagggtcctactctgtcacccaggttggagtacagtggcacgatccccattcattgcagcttctaccgtcccaggctcaagtgatctcccacctcagcctcccgagtaactgtagccgggaccacaggcacacgccaccatacccagccaattttttttttgagacggagtttcggtcttgttgcccaggccagagtgcaatggcacgatctcagctcactgcaatctccgcttcccaggttcaaagaatctcctgccccagcctcccaagtagctgagattacaggtgtgtgccaccacacccagctaatgttgtattttcagtagagacggggtttcaccctgttggtcaggctggtctcgaactcctggcttcaagtgagccacctgcttacgcctcccaaagtgctgggattacaggcatgagccactgcgcctggactaattttttattttttgtagagacagagtttctctgtgttgcctaggctggtctcaaactcctggtctgaagagatcctcaggcctcagcctcccaaagtgctgggactacaggcataagccatcatgtcccactgcatttccaattattaacaattattttcacttacaataaatgaattggatggtgccaatctccattttctagaccttacattctctttcagctactgctcagctttctccatctctcctttcttcttgaggcagtcttctattttgtacattatacattcctgaaaatttgaaagacaaatatatgaaaactattagatttgcatattataaggggctgggcgcagtggctcatggctgtaatcccagcactttgggaggccaagtgggtggactgcttgaggccaggagtttgagaccagcctggccaacatggtgaaaccccgtctctactaaaaatacaaaaattagctgggtatggtggtgtgtgcctgtagtcccagctactcgggaggctgaggcaggagaatggcgtgaagccgggagacagagcttgcagtgagccgagactgcgccactgcactccagcctgggtgacagagtgagattccgtctcaaaaaaataaataatagaaaaaaataaataaaatagcatgcaagaatgtactaaccaggaaccatggcttgtgtctataatcccagctatggggaggctgaggcagaaggatcacttgaacccaggaatttgaggctatgattgtgccactgcactccaagtgggtgacagagcaagaccttgtctcttaaaatatataaaattaaaagaaaaaaaaactaaataaagaatgttctaggtacctagattcacatggatgaaagttcccatttggtagtgctactatatgtttcttggtcccctatgtcccagaggaaccaagggctagatagatggtacatgggcctaaagaggatatgcctgctttcctcagtagcaggcaagctctaggcctcaggactatagtgctccttgaggccttggagatgggtaaaaacatcagttatcttgcctggatcagcactcatacagacacaaatacccacccacaaataaatgtccttttctcccaagcttttctcccagcaggtaacagcgggcatgtagtccactttgtgttaccctgaaatcgtcattagtcaccgaaagccaaatactacttctgtaagatcgccaggaccctacatttgccatcttcacttcctcacctcttgatgctcactcttccactcactaaaaacggtcttccactctctgaaaaaatcacccataatcttctaattgcagaatcaagatgatgctgttctttctctgacactactgaccaattgtcttttatttcctttgccattatgacaccagttgtcctcctacaactctgatcacttccagaaatcatcctcaactcttccctttccgttaccgtcccccccacaatacaatgaatcaccatatcctgttgattctacacattttcatgctccatcctctcttctccatccccacggccactgtcttgtaacattgctctcctgggtacctgggtaagggacacaggttttgtgtttttttttttttttttcagatggagtcttgccctgtcgcccaggctggaatgcaatggtgcgatctcggctcactgcaaactccacctcccgggttcaatggattatcctgcctcagcctcctgagtagctgggattacaggcacccaccgtcatgcctggctaatttttgtatttttgtagagacggggttttgccatgttggccaggctggtcctgaactcctgacctcaggtgatccgccctcctcagtctcccaaagtgctgggattacaggcgtgagccactgcgcctgaccttttttttttttaagactaaatattttattttatatagaattttaaaaatttattttttgtacatgaataagttctttagtggtgatttatgagattttgatgcagccatcacccaagcagtgtatactgtacccaatgtgtagtattttttttttttttgagacggagtcttgctctgtcgcccaggctggagtgcagtggcatgatctaggctcactgcaacctctgcctcccgggttcacgccattctcctgcctcagcctcccgggtagctgggactacaggcgcctgccaccacgcccggctatttttttgtattattttagtagagacggggtttcatcgtgttatccaggatggtctcgatctcctgacctcgtgatccgcccgcctcggcctcctaaagtgctgggattacgggcgtgagccaccgcgcccggcctccattgtatcattctcatgcctttgcatcacaggtttcttcttttttttttgtagacggagtcttgctctgtcgcccaggctggagcgcagtggcatgatctcggctcactgcaacctccacctaccggggtcaagtaattctcctgcctcagcctcctaccgggttcaagtgattctcctgcttcagtctcccgagtagctgggactacaggcgcgcgccaccacgccccgctaatttttgtatttttcatagaggcatggtttcaccatgttggccgggatggcctcgatctcttgactcgtgatccgcccacctcggcctcccaaagtgctgggattacaggcgtgagccaccgcaccctgtctaatttttgtatttttagtagaaatggggtttcaccactatggtcaggctggtctcaaactcctgacctcgtgatctgcccactttggtctcccaaagtgttgggactacaggcgtgagccaccgagcctggccacaggtttattctttttgtcgtcattgttgctgttttgagacagagtcttgctctgtcgcccaggctggagtgcagtggtgtgatctcggctcactgcaacctccgtctcccgggttcaagtgattctcctgcctcagcctcccgagtagctgggattacaggcgtgcaccaccacacccagctaatttttgtatttttaatagagacggggtttcgccatgttggccaggctggtctcgaacctctgacctcaggtgatcctcctgcctcagcctcccaaagtgttgggattacaggcgtgagacaccgtgcctgcctggtttacattctctcttaatcctttgtttatacacatctgtgattcaccagactgcgaactctttgtgggcataaactgagtcttacccattagaacacggacttgagcagggtggcaagtaagggatggatttcctgagacagtcaacaatgaagttgcttttccactgcgttcccaactgctcaaatctagctggttccccaatcccagtacacttgcagtagcaacggggaccctcttcctaaagttgcaccaagccagggattctccactcatttcgcccaggtcctagccctgccaggcttcccctttgctcctctgcaacccctgtctagggaggcgggtgtcttggaaggtccttgggagctccctccatcaattttgcatctgcaattagggctactttaccccagtgaagaaaggtgccctccgtattagggcttccttcctccaattccgactggacagggtagcagagcgggcaaagtgtgagagcctttagaaggaaagagcagggctccaagcgccgcgaagaatggccgaggccgacgcacagcagacgctggagtgcagccctcctagccaagcttgggtttccccttatccccgcctccttctctaagctcgacccactttagggcgggaccacccacttcagccaattctggaagccgaaccctggcggtttgtactatttctttccaataagaaaaaaaggaagcagcttggctccaatgaccaatccgaggaggcggcgcctggttgtcaggcagttttgtaggagttcgggccaattggaggcgcaggcaccgctcgacccgggcgcagcgcgcaggcggtggcgaagagacgccgagcgggccgagtgcggccgagcaaagccggagccggagcggggccgcaggagacgggccgggtccggacgggccgagatgccctataaactgaaaaaggagaaggtgagcgtggcctttttcccccaccgccgccttggagcctgcgcggagctctgggaggggccggagccaggcccgggacagccccagactgaccctcccgtccagcccccgcaggactcctggggccagccctccgcccccgcggctggcagcacccccagcttgtgccgcagctaggacagctcccccaccttgccccggagagactccccccacatacacctccctcccttcttcccttctcttacccccggcccagggtaacctccttcttccagatctgccccattcccaggtcactgtcctgctttttctgtcccccccatcacccctggccccgatcccccttcggtttgggcagcccctcatctgaaactgcaccttcctccagaattgccccctcgccccgccctgagcagccccttgtctcctcttcctacccgcctgggacagccgccccgcagtcccctacggccccttctctttccatgccaagcccctgacctagaacagcgctgctttctctctcctccacccaaatctggcctaggcccctccctctagttcttccttcacacacaaacttgtaagcaggactgagcccttctgttgatggaacctcacaacgttggtgctggaagggacctctgagcgcatgcagtgcaatccctaatggtacagatgaggagactgaggccccgacagggcaagggacttgtccaaggtcacacagcctgctggaggcccagctgcaatatcaggtctcctgacttaaaggcctcttttgtatcaaagccctcctaactgtcacccaagtgcatcctagaccagtcacctttcctaatctgagtaggctcctcacccttattcttaatcctaggataacctttgcatttttcctttttttttttcttttcgcaccagtgctggatttctgcctttcctaagctacaccatcttcaaattgggaatttgtcctcactgtcagattattgttccttcttagcctgcaggccagccacccctgaacacccatgtctttatcatgatgtcctgacacaggccatttctttttttttttttttttttgagatggaattttgctcttgttgcccaggctggagtgcaatggcgcgatctcggctcaccacaacctctgccttctagcttcaagcgattctcctgcctcagcctcccaagtagctggaattacaggcatgcgccaccacatccggctaattttgtatttttagtagagacggggtttctccatgttgatcaggctggtcttgaactcctgacctcaggtgatctgaccccctcggcctcccaaagtgctgggattacaggtgtgagccaccgtgcctggcccacaggccagttcttaatgttgccttctttcaccttcctcatctacctcggtgctgccttcccctgctcctcatccgtgcctttttctaccctctgtttcctgctgttgctgaggtctgactcagaggtgtggttcctttgaggtacagactcacacataggatgctaggataccagttccagcctcccccagcttctcctctcctggggctggccctttttggtgggggttggctctggcctggtgttctggccacctgctcgatgaccccagaggtatattgctttcatttgccctctgattggctgggttactgggctgccatctctgaccttttcaatcaaactttttctcctggggctgttctgtatttgccaggcagctctgattctgagttgtccccttaacctttcagggcctgaggttctaagtacagggttggtgatggtgtactagatagtgagcctcctgggagtagtgagctggacagggttttgtgccccacccaggccctgtccttggggagtgggcatgcggaggtggtttgggtagctcagtcgtagacaatgcacacagaaatcagccacaacaggggctaagggaaatggaattcrgggaaagctggtgaggtccccacccatttgtaatttttagtctgttggactagatactgtccyatccacagaaagcaatagcctactagattgtgaagaagacaaattgccagtgagatttgctaggaccatgggtgtaaacgtttggttgggaaagggtgttggaagtaacggggtgcatggagccaggcataactctcacctccctataaggtttttctgctcttgattttcagttgcatttggccttcttcaatggttggcaggctctaaggggcaggggggttgccagtgtgactgaggtttgtctggatggctgtgggtggaggatctttattgctcatctatgacctgtcccctctctcctggccatctttcacagcttcctctctaaagcctttctgagccctcagtcaggagtgaactctcctttcttttctggatttgcagaacacttagtaggccacttatggtccttttgtgtttggccttggatgggaattaattgtggacaagacttttcttcccctttgagataataactaagtttcattttggtttgacaactccttttcacacggtaagtacgtgcttagtggataggtgctaagataatctcttggagggattcgcatctctcctcttccttcatgttctcctctgggacttacctcttttattttcctgagtagggtgcccctgccccctccgatttttttcttgttcataataatagtaataacattgaccagcactacggttttcatgtgccttaacactgtgctgagggaagagggtattatgattgtcatcatctaatagatgaggaaactgaggctcagagaggctagttaacttgcctgtgattacacagccagtaagagttgggcccaaaacacagggctgagtccaaacatgttcttttaacctctgtgctacacagcatttgactactgagctgggctgaaatgtgtgtgcttcacctgttctgcaggagccagggagcaagggtggtaggcctggttcctccatgcccactcacacccacacactaaggcagctggatctctcttaggctcattctttgaaagataygtctgaggcatcatgctgagtgctgtagggtgggtggaggggtacaaaaaagaataagcagcttatggtctaatagattggagatgtatgaagatgggtcagctttgttcaaggggttcatgtctggggtgtgtgcagacacctcaatgttgtgtcctgcctgcaccctgcccccggcctatttctctccaccccatgctctcagccactgataagggtcagtgyggccagctgggttagtatacagcaggagcgtgctcaggccaaagaaggaactccttccccctactgcatggagctgctctacaccacacctttcttcctccccrcctccaagaagccttccccctactccagcccacacagagctctcttctccctgaaatccttttgcccccatagtcacaataactcgatttaacacttctcactgaaggggcttggctgctattgaattgcacaatctcagagctggaagtgatttccaagatcctccagtcctcattaaaggcttgaatttcttttgcaacatgccttacaggaggtcaccaagcccctgcttgaatgttctcaggggttggggagctttcggcttcactaggtggccagttttagtgcaattgctccatgataaaattcttccttgtttggagcttcaggtggcttgcaacttcagcccattgctctcgtgcctctggtccatatggacaagttgcatccaaggcatccaagttgcatcttcatttgtttaagatccatcttgcttctccatccctcatgactcctcccttccattgttaactatcccagttcctgcagctgttggtcttgggacatgcctttgaatccactcccagtatgggttgcatttccctctaagaaacactaggatttgtcatggcccctcccaagcctgatgctcatgactgaaccagatcctccaggatagccctgtcagtgccaagcagtctgcacaggtcttttaacaagatggaaggtcacatgagctgcacatggatgatttgtgttgagcttgcagtcagacctaaatccccaagtctttttcacattttccctatcctgtccctgtgcagttgctttttttggctcgaagcataggaagagatgctgggcaggccagggctctgagccagctgccaggttcccaaaggagacttcagactagtgctcactctttgtaacagttcagggttttacccccatccctgtcttagtgcttgtcaactgaggtgctcttggcattttgagtgggacagttctgtacctgttagcattcctgggccttactgattaaatgctgagtagcaccctcttgtctgtgcgctatttgtgacatccaaaaattgcctcccagtctttccaggtggctgtgaggggagagtggtgactccctgcactccagcatgaaagcctccggcacacctttgaccactttagccagaaaccagtgagcagctgttccctgatgctttttctttaagcctcctcaccctggttctgacctgagcaaaggccctcccaggcccaacctctgcaccagcctgatgaggtgaaagatggagcattctcacgctgaattagtgtgtgtttggggtgacttcctaaccagattctaaactctttggaggggctgaatctccttctgcgtagatccctccacccaccccagctccgcacaaggtagattctaattgattgattcaactggacagaggatatttgcaacaaagatctaagggagccagataagacctctcccttctcctggcatctgctaactttactttcatcttttcctttcaggagccccccaaggttgccaaatgcacagccaagcctagcagctcgggcaaggatggtggaggcgagaacactgaggaggtaatgaatgtaggcgtagccttagatgtggtgcaggtgccacccgcaactccatgatggctagttgggtaggggatcccagggggtgaggcagaagggaaggcttccatatcctgggagggacctggacagcccatccagactgccctcaggcaggatttacctttggttggtatagaccaaatacattctctagttcttcagactccccagagattcctatgaaagttgtttctctgcttaccaacttggaatgttgagaattcctttttcttagggcaaaaagcgggaggttctgggatcctgggcaaaaggggaaaagtccacagacacttgatggggtaacaagtgacttcagcatggctcgggtggggcaggggattgggaggggctggtgtccctgagttgggcccagctgggcccactgcccttggtcctgattgaatggcagcatgactaaaagacagtcctgagcagagttcagcgcagcttagcaatctcgggttataaagcaataaacagcaagccgagagaacaccagaagagggagagacttaaggaagtacacagtatgtccatgaaagtttrggagygtgcacagtgggatgctctggatggtgaaagatcctgtgaacatacacagcgagcatccaccacatcctacctggaaactggtgtttggtgctttctctgctttctccctctgctctaaactgttcagagggatgaaagagaactggaaacacagctctctagttatggacaggtcttatggttttttgggagaagagattgatgagcaaatgtttggggttaactatgcgtttagatgtttctcagtacttctggtgataggtcacctctaaagagatacaagcacttttcacacctcattttaggcctcatttaagtaatgagaagctgagtaggttttccccattttataggcatggaagttgaggaccacagaagaggaattattctttcctctgcacttatgcagtattctacttttttttttttttttttttttttttgagatggagtctctctcttgttgcccaggctggagtgcaatggtacgatctcggctcactgcaacctccacctcccgggttcaagcaattctcctgcctcagcctcctgagtagctgggattacaggcgcatgccaccatgcttggctaatttttttgtatttttagtagagacggtgtttcaccatgttggccaggctggacttgaactcctgacctcaggtgatccacccgcctcagcctcccaaagtgctgggattacaggygtgagccactgcacccggcccttatgcggtattctaaatatctccttaataatccttatcactcagctctgtgacgatttgtccccatctgtgtctctcctctcagactgtgaactccaagggaaggagctatgttattctgcattgcttctttcctacctctgtgtacttgtgcagttggttcatagtaaatgcttctgggaagacacactatgggctcagtctccctttcaggaatgattataattgtgggacccacagggaaggtggttggaagctggtaacttgacatttagagcagcaagaaacaggattttctaagtcctgaaaatcctgggagaggaaggaaaatttaatggggagttcccaccttttgcctaactcctacttctttagttcttagatgggatgtcgtttccttaaagcagccttctttgaccacccacccctatccccaggacctcgcgagggcttctgttagttgctgttttggcactcagtacctggtagcgctggtagcacctaaccacaactgtcatgaaataattccttgtgaattcattgttttatcggctgtctcttgtgttagcacgagagctccatgaggctctcattcactcctgaagggcctgacacagcagaagcacccagcatttgaatgtattagtgagtgaatgagtgaacgagtgaatgaacaaatgcaccaatttcacattagagctgaaaaggaccttagggtctaacgttatcagttcatagatgggaaaatgaagcctgaacaggttaaggagtatgctgagaccaactgctatgatttatccactgcctttcaaacaaatatgcctaagacaatgggtctattacaagcaatctgggaaaggagggtgttgagttcaccttgggctgtttggtgaaacgctgctcagggttcacaggtatgagatggcagcaggaattatccatgattttgtagaaatgtacccacgtctggtatggcaggggtatggggaaaagttggagctaggatgtgaggctgtggtcttcaaaagctgtttggcacagtccttcccttgccctttttcttttgagatggaatcttgctctgtcgcccaggctggagtgcagtggcgcgatcttggctcactgcaagttccatctcctggattcacgccattctcctgcctcagcctcccgagtagctgggactacaggctcccgccaccacgcctggctaattttttgtatttttagtagagatggggtttcaccatgttagccaggatggtctcgatctcctgacctcgtgatccacccgcctcggcctcccaaagtgctgggattacagatgtgagccaccgcgcccggcccccttgcccttttcttgtccggaattttgggctcttctagccagctttgctctgtcaggcatttgccagagcctttctaattgatctaatagttatagcagctgacatttattttatagagcagttactttgtgttagtttcctagggcagccataataaactactacaaataagcccggcatgctggctcacacctgtaatcctaatgctttgggaagctgaggtgggagaattgcttgagggcaggagtttgacaccagcctgggcaacatacagagaccctgtctctacaaaaaaataaaaaataaaaaattagctggatgtgggggcatgtgcccctgtacttccagccacacgggaggctgaggcggaggatcgcttgagtccaggagttcaaggctgcagtgggccatgatcgtaccactgcactccagcctgggtgacagaacgagaccttgtctcaagaaaacaaaacaaaacaaattattacaaattgggtggcttaaaacaatagaaataggctgggtgcggtggctcacacctgtaatcccagcactttgggaggctgaggcaggtggatcacctgaggtcaggagtttgagagcagcgtggccaacatggtaaaacactgtctctactaaaaatacaaaaattgggctgggcatggtggctcacacctgtaatcccagcactttgggaggccgaggcgggtggatcacctgaggtcaggagttcaagaccagcctgaccaacatagtgaaaccctgtctctacyaaaaatacaaaaattagccaggcgtggtggcacatgcctgtaatcccagctactagggaggctgaggcaggagaatcgcttgaacccaagagccggaggatgcagtgagccgatattgcaccattgcaacccagactaggcaacaagagcgaaactccgtctcaaaaaaaaaaaaaaatacaaaaattagccgggcgtagtggtggcgcacctgtaatcccagctactggggaggctgaggctggagaattgcttgaacccaggaggcggaggttgcagtgagaggagatcgtgccattgcactccagcctcggtgacaagagggaaactctgtctcaaaaaacaaaaaacaaacaaaaaaagaaatacattctctctcagctctggaggccaaaagttgtaaaattagtgtcggcagggccatgtccttctgaggttctaaggaagaatctgttccacatctctctcctagattctggtggcttttgacaatctttggcattccttgtagatgcatcactttaatctctgcctctgtcttcacacagcattctcctccatgtgtctctgtctctgtccaaattttcctcttctaaggacaccagtcatattggacttaggtttcaccccaatccagtatgatctcattttaacttgattacatctgcaaagaccctgtttccaagtaaggtcacattcacagattctaggtggacatgaatttggtgaggggagggggtaggggactggatactgtgcaacactatgtaccaggcactgtgctaagtactttgcatacattgtctcatttaaccttcacaatactcccctgagattcctttattattattattcccatttcacagatgaaactgaggcttagaaatgttaactgggcacagtggctcacgcctgtaatcccagcactttgggaggccgaggagggcagaccacctgaggtcaggagttcgagactagcctggccaacatggtgaaacgctgtctctactaaaaatacaaaaattagcctggcatggtccagctacttgggagactgaggcaggagaattgcttgaacctgggaggtggaggttgcagtgagctgagattgtgccactgcactccagcttgggggagagagcaagactcttgtctcaaaaggaaatgttaagtagcttttattcagccagtaaggcagtaaggcagagctggaattcaacccaggtctgtgtgactctggagtctcttgtggtcttgaatgaagtgatactgctggctctaagattctagaagtgaatcctagaatggaaaggagccttgggagatcaggtgagaccccactgacctgcctctgcaggtaagggtctttcttgatctgtccttggaaaaaaaaattcaatgtcctcacgcctgtaatcccagcattttgggaggccgaggcgggcggatcacctgagattgggagttagagaccagcctggccgacatggtgaaaccccatctctactaataatacaaaaattagctgggcatggtggggcatgcctgtaatcccagcctgttatcccagctactcgggaggctgaggcatgagaatcgtttgaacctgggagacagaggttgcagtgagccaagatcacgccattgcactccagcctgggcaacaagagcaaaactccatctcaaaaaaaaaaaaaaaaattaatgtcatagactcctctacgtgctgagccctgtcctgagtctgggagtagggacagagggaggaataaattttcccacacttcagcttgtcctctctgaggccagagttgttactctaaaaaccttcttggtcttatcagtcctctacttaaaaaccatttttggcatctcactgcttacaagttaaaatccaaactcactagcatggcaccctcaacccctctgagctggccccactcttcttctagcaccagtcctgcctttgtgtcccaccgaactttttctttctttttttttttttttttttttggagatagggtctcactgtgttccccaggctggagtacagtggtacaatcatggctcactgcagcctcaacctcctggggctcaagggatcttttcccctcagccccctgagtagctggggctgcaggcacgagccactgtgctcagctaagttttgtattttttgtagagataggtttcttattatgttgctaaggctggtctcgaactcttggaccgaagcaatcctcctgccttggcctctgaaagtgctgggattacaggtgtgagccactgtgccctgcccaacttcctatcttctgatatgacaacccctttatgactcagggtgctcacagatgcagttccactggcccggactgctttatttctcctgtgtctttttttgcctattaaactcatgtttattctttttttttttttgagacggagtctcgctctgtcgcccaggctggagtgcagtggtgtgatctcagctcactgcaacccctgcctcccaggttcaagcgattctcctgcctcagtctcccaagtagctgggactacaggcactcaccaccacgcccaactaatttttctcctttttttttttgggtctcactgtgttccccaggctggagtacagtggtacaatcatggctcactgcagcctcaacctcctgggctcaagggatcttttcccctcagccccgagtagctggggctgcaggcacgagcctgtgagagtgagacagtgagacagtctcactgtcgcccaggctggagtgcagtggcgccatctcggctcactgcaggctccgccccccggggttcacgccattctcctgcctcagcctcccgagtagctgggactttctattttttttttttttttttttagtagaaacgaggtttcaccatgttggccaggatggtctcgatcacttgacctcgtgatccgcccgcctcggcctcccaaagggctgggattataggcatgagccactgcacccggccatttaaactcatgtttattttttaagagccaaaaaaggggccaggcgcggtggttcacacctgtaatcccagcactttgggaggccgaggrggggcggatcacgaggtcaggagattgagaccatcctggctaacatggtgaaaccccgtctctactaaaaaatacaaaaaattagccgggcgtggtggcgggcgcctgtagtcccagctactcgggaggctgaggcaggagaatggctgaaactgggaggcggagcttgcagtgagccgagatggcgccactgcactccagcctgggtgacagagcgagactccgtctcaaaaataaaaaaaaataaaaaaaaaataagggccaaaaaagaaaaaaaaacaaacaaatcaaaagccacctcttcagggatatcttccctaattcttccaagcagagtttacagctcagccttctctgttcttgcattttccttgttcagttagctgcatttgtgtctgtcctgcctagtggactgtgagctctttgatggcaagggccatgtcttagtcaccttttaatctttttttatggtatagaatttgcatataaacttttamtctttaatgcttagcatgatgtttagttaataattgaaggaaggaaagaattaagcaacactagatggagctctggatgtcactactggagagaaggcctctgatttttgggattttaaactaaaatgatcttcatttattaggccagttaattcattatgcaaaagagatataatatttaatctttgcattttttctggtaattgtatgtttcatctttctcttatattaaatactttctatagtgcttaaattatattgttatctctttgtttttttatgtatttatttttgagacagactcttcctttgttgcccaggctggagtgtcttggctcactgcaacctctgcctcccgggttcaagtgatttttgtgtctcagcctcctgagtagctgggattacaggcgcccgctaccacgcccggctaaattttgtatttttatttattttatttatttttatttatttattttttgagacggagtttcgctgttgtttcccaggctggagtgcaatggcgtgatctcagctcactgcaacctccgcctcccggactgaagtgattttcctccctcagcctcctgagtagctggtattacaggcatgcaccaccacatctggctaattttgtatttttagtagagatggggtttctccatgctggtcaggcttgtcttgaactcctgacctcaggtgatctgcccacctcagcctcccaaagtgctgggattacaggcgtgggccactgtgcctggccgtttttatttttatttttattttattttattttttgagatggagtttcgctcttgttgcccaggctggagtacaatggcgcgatctcagctcactgcaatatctacctcccgggttcaagcaattctcctgcctcaacctcccaagtagctgagattacaggcgcccgccaccatgccctgctaatttttgtactaaaagtacattttgtactaaaagctaattttgtatttttagtagagacagggtttcaccatgttggttaggctggtctccaactcctgacctcaggcgatccgcccacctcagcctcccaaactgctgggattataggggtgagccaccatgcccagccaacttctgtatttttagtagagacggggttttgccatattgtccaggctggtctcgaactgttctcaagtgatctgctgccttggcctcccaaagtgctggggttacagacgtgagccgccatgccaggcccctatctctttatttatatttgaatatttgggttttatttatatatatatatatatatatatatatatatatatatatatatttttttttttttttttttttttttttttttttttgagacggagtctcactctgtcacccgggctggagtgcagtggtgtgatgctggctcactgcaacctctgcctcccgggttcaagcaatgttcctgcctcagcctcttgagtagctgggaatacaggtgcgtgccaccacgcccagctaatttttgtatttttagtaaagatagggtttcaccatgttggtcaggctggtctcaaactcctgatctcgtgatctgcctgcctcggcctcccaaagttctgggattacaggcatgagccactgtgcccagcgtgggtttaattattaatgatggccgtgttcggaataggctggaccaggataggttcagagtaggcacgtttagttggaattttctgagtatgagtgtcgtgtggaaattcacagtgccacttgattgctggaggcctgaatctaggaaggcttcttggagtatggatcctgttgagagtttggaagtgaaagtagtagtacttcaggcagaagagatggcctctatggagtcccagaagtgagggccaggtatggtggctcacacctgtaatcccagcactttgggaggctgaggcgggtggattgcttgagctccagagtttgagaccagcctgggcaacatggtgaaaccctgtctctacaaaaactacagaaaagtaggccaggcacggtggctcacgcctgtaatcccagcactttgggaggctgaggcaggcagatcacttgaggtcaggagttcgagaccagcctggccaacatggtgaaaccccgtctctactgaaaatacaaaaattagccaggcctagtggtgcacgcctgtaatcccagctactcaggaggctcaggcaggcgaatcgtttgagcctgggaggcagaggttgcagtgagctgagattgcaccactgcacttcagcctgggtggcagagtgagaccctgtctcaaaataaataaataaatagagtcccgaagtgaaactgggcaggacaaagtagcgagtagaggacagattggccaagttgcctttggtcagtgtccacccctgctttgatggctgcagaagcttctcaggggactcacttgccttctacccccaacccaggtgaatgcacaagttagtggctggggcttttaagagaaatggttgaatgcccatgagtagttgacatatcccccacctccctctgacatgcatgtttcctagtgaagggtgaatagacagcggatacctcattggggcttggcagccaggggcttcgctggcagaaacagctgtctctcagatgcttcttgtgtctggatcttgggagccaatggtccttataaaccagggcagctcagtggggtagggggcagggcagactaagcccattcagctgctctccagccactctagccttcaataacacaatgctagtgtagaaaagaccttagatatcagctcattgggtggtttttattttgtttcatttgttttgttttgtttttttctgagatggagtcttattctgttgcccaggctggattgcagtggcacgatttcggctcactgcaacctctgtctcccaggttcaagtgattctcccacctcagcctcctgagtagctcggattacaggcccccaccatcacgcctggctaattttttgtatttttagtagagatagggttttgctatgttggccaggctggtctcctgacctcaggtgatctgcccgcctcggcctcccaaagagctgggattgcaggcataagccaccatgcctggccattggtggagcataagaccccctgttctctctaaaccttaccggaataatcgttgggaaaccactgatctagtcctgccacctctttttttttgagatggagtcttgctctgtcgcccatgctagagtgcagtggcgtgagctcggctcactgcaacctccgcctcccaggttcaagcgattctcctgcctcagcctccggaatagctgggattacaggcgcccgccaccacgcccagctaatttttgtatttttagtagagacggggtttcaccatgttggccaggctggtctcgaactcctgacctcctgatctagccaccttggcctgccaaagtgctgggattacaggcgtgagccaccacgtctggccacctttttttttttttttttttgagatagagtcttgctctgaatcccaagctgcagtgcagtagtgtgattttggctcactgcatcctctgcctcctgggttcaagcaattctcccatctcagcctcctgagtagctggggctacaggcgtgcaccaccacacccagctaattgtttttttgcatttttagtagactcagggtttcaccatgttggtcaggctggtcttgaactcctgacctcaagtgatccacccgccttggcctccaaaagtgctaggattacaggcatgagccaccgtgcctggctaccttcttgttagcagaaaacattgaggccttccttttccctttctgggaagaatgcccctctctggctgcctcctcagtgtgaggtgtgtggaagtacagggtgtctgcatcttacctggaaggatggagtcttgttgtcaggttggcactgagcccctcaccctagtatcactgatgtttctccttcagactctgctcctaatgctgtatagccccctgttctgaggattcctgagttggggcaggagaggaagagtctgtggggaggagcctgggcaggacctgagagctttggctcctggtcaaccaaccaaccaaaccttcattgaattcctattaggtgttagtgctgggggcacccagaggggtacaaacagggtcctggctttcaaaggacttgccatctagttaggggaatgacacatgaagagactaagaggtgtcactagggggtgagcagtcacagcgccaagggaagagacaagtggtatcaaaaagagggggtgacacccaagggctggaaagatctgagaagactttttggaagaaggtgggacttaaactgagtcttggaagatgcagtgatttcctaggttcctgattttcttccttttctttttcttttttgagacagagtttcactcttgttacctagggtggagtgcaatgacatgatctcagctcattgccaagatcaagcaattctcctgcctcagcctcccgagtagctgggattataggcatgcgccacctcgcccggctaactgtatttttagttgagttggggtttctccatgttggtcaggctggtcttgaactcccaacctcaggtgatccacctgcctcggcctcccaaagtgctgggattgcaggcatgagccactgtgcccggccaggatcccccatttttaaatgaggataatggactcaacggaacatttgagttgtgctagcataggaaggagattctaggctgcattcctaaaacctggatatgggaaataatagtaatagtagtggtggtagtagaaggtacctcttataaaatgcttctttagggctgggcacggtggctcacacctgtaatcccagcactttgggaggctgaggcgggcggatcatgaggtcaggagatcgagatcagcctggctaacatggtgaaattccgtctctactaaaaatacgacaaaaaattagccgggcgtggtggcacgcacctgtaatctcagctactccggaggctgaggcaggagaattgcttgaacccgggaggcagaggttgcagtgagctgagattgcgccactgcactccagccgggtgacagagccagactctgtctcaaaaaaaaaaaaatgcttctttagtgcgtgacagagccagactctgtctcaaaaaaaaaaaaaatgcttctttagtgcgaggaactgttcatctctatccttacgatagtgctataaggtaggtatggttgtcatcccattttgtagatgagaaaactgaggtgcagactttctggatattactcagctaataagtggcgagccaggattgaacccaggcaggcagtctggcccaaggtgttattgagcaccaagctccacagataagggtttggttgttctttttttttttttttgattcggagtctcgccctatcacccaggctggggtgcaatggcatgatctcagctcactgcaacctctgcctcccgagttcaagagattctcctgccccagcctcccgagtagctgagattacaggcacgtgccaccacgcccagctaattttttgtatctttagtagaggcagggtttcaccatgttggccaggctgctctcaaactcctgacctcgtgatccgcccgcctctgcctctcaaagagttgggattacaggtgtgagccaccgtgcctggcctagttgttcttaaggcagggaaatggaggcctgaggcagaggagtgtctggatacacaccaagtgctggcccccaacctgcttttctcttactaccacttcccccaccccaaggtgcaactcatctgccatatgtagaaagggagacctcagacctccagatgccttgccatgtctaatacacgggacccacaggctggacccggtgctcctctcctgttctctcatccctagataggtgacaagtccacatcattgtttttataaaaaattcagaggatgcaattaataacatttctgtcttcctyccctcccccaccccagaggatttcaagttcttctattattatggtaaggagtaagagtttgggatgggagctggagaggagcgggagatggcaggtatgaggccaagaggtcacctttccctttccctgtggtgagggtacccagctggacatggcctctgcctagtcctattctagactctgtttgggggcaagggctgtcctgtggtttagcttctttcctctcccaacagggggctgccyggacagtccaggagtacctgtgggcagacagccctgcaaatacctgtatttagacttctgaaaatggacttcatggggctgtaacacctgtgtctgggagctatgcctttaaaaagggatagcttttaggctgggcacggtggctcacacctgtaatcccaacactttgggaggccgaggcaggtggattaatttaggtcaggagttcaagaccagcctggccaacgtggagaaaccccatctctacaaaaaatacaaaaagtagctggcatggtggcgggtgcctgtaatcccagctactcgggaggctgaggcaggagaatcacttgaacctgggaggtgcaggttgcagtgagccaacattctgccactgcactccagcctggatgacagagcgagactccatctcaaaaataaataaataaaataaaaataaaaagagataattttaaaaattagctgcatttctcccattataaaagcagtatcatactacacaatggaagtaaggcagaaaaaaagcagtgtcagcttgtagaaaatttagaaatgcagaagtaatctaattctactacaggagatagtcattaacacagtggtggacttgggcttgttcttaccttttctgaacctcgtttttggttctgtgcatgtgttttaatgtgagcgagctcattttgtgtatctagttttgtactgtattttttttttatgtatgtatgtatgtatttatttattttttgagacggcgtctcgctgtctcccaggctggagtgcagtggcgtgatctcggctcactgcaagctccgcctcccgggttcacgccattctcctgcctcagcctcccgagtagctgggactacaggcacccaccaccacgcccgactaattttttgtatttttagtagagacggggtggatggtctcgatctcctgacctcgtgatctgcccgcctcggcctcccaaagtgttgggattacaggcgtgagccaccgcgcccggcctgtgtatttactttttgaagatggagtctcgctctgtcgcccaggctggagctggagtgcagtggcatgagctcagctcactgcaacgtccgcctcctgggtttgagcaattctcttgcctcagcctcccaagtagctgggactacaggcacccaccaccasgcctggctaattttttgtattttagtagagacagggtttcactgtgttgtccaggctggtctcaaactcctgaggtcaggcaatccacctgccttggcctcccaaagtgctgggattacaggcgtgagccaccgcacytggccttgtactatcattatttaacttagcataggaagcaattttctgtcattatgtagttttaggccttttgttttatttcaaaattttatcagtatgataacacatacattgttcagatattactactattggggttggaatgcaactcttagctctttcctcattagattcctttagattttcacattagattcttttcctactttagattagattcctttagattttcacattggattcttttcctactttttttttttttttttttgagatttagatattatcaattgactttctaccatggaaaataagtcctcatcattcttatgcctttctgcagacatttcccttcctccaaaaataccaccattttgggcaaattactatgaacgtgaaaatattttttacaactaaactatgtattacatagttttcttttcttttttttttttttgaggcagagtctcactctgtcatccaggctggagtgcaatggcgcaatcttggctcactgcaacctcctgggttcaagtgattctcctgcctcagcctcccgagtagctgggattacaggcacccgccaccacacccggctaattttgtatttttagtaagagatggggtttcaccttgctggccagctggtctggaactcctgacctcaagtgatacacccaccttggccaaagtgctgggattacaggcatgagccactcactgcacctggcccatagtttttataaacataatattaactcctgatattccatttattcattttctgttataaatgaggttgttaaaagtatttgtgcacaaagcttttttttttttttttctttttgcctggctacctctgtctcctccaaagctttttttttttaatttaggatttttattaagctaaatttctagtaaagtcctaagacatgggaatgaatttctttcttttacctttttaaatttgaaaatttttatctttagagacagtgttgttttgttgttcaggctggagtgcagttggtgtgatcatagctcatgggagacttgaactcctgggcgcaagggatcctccaaccttgagtagctggaactccagtaagcttcctgagtagctggaactgcaggcatgtgccaccacacctggctaattaaaaaaaattttttgtagagatggggtcttgctacgttgttcaggctggtttcaaacttctggcttcaagtaatcctcctgctttggcttcccaaagtgttgggattacaggctttggccactgtgcctggcctttcttttaccttttgttttgttttttttttttgagacaaagtctcgctcttgtcccccaggctggagtgcaatggcatgatctcggctcactgcaacctccgcctcctgggttcaagcgattctcctgcctcagcctcccaagtagctgggattacaggcgcctgccaccacgcctggctaatgtttgtatttttagtagagatggggtttcaccatgttggcctggctggtcttgaactcttgacctcaggtgatctgccctcctcggcctcccaaagtgctgggattacaagtgtgagccactgcgcccggcctcttctaccttttgattggagactgtcayacattcagtaaaggatcttaagtgtactgctcaataaattttaggtatgtatctgccatgcaccaccttgcaggtccagtcaagatacaggatgtttacattactcagaaggctcctcatgtctcttcttattcctcatgtgtcttcttattcatcatgtgtcttcttagcaatacccaccccatttcccctggcaacgtaatcacttttttgacttctgtcaccatcaatctatcaattagctttacctgttcatgaactggaatgaacgttttaaaggctcttgatgcacaagcagtgggcatctctttgggtgatgtgacttcttgactgctccctgccagggctacagcacagttatctctgtaaccctggccttagctccttcggggcaggagacagctgctcactgcccaggcctgtgcaggcataaacagacttggggatggccaggcccagggtgggaggcatatcttgggaagtggatttcaacaggtgacttgtttgaccaggcccagccgcagccccagccccagccccagccccaagcccagtctcagccaccgtcatccaacaagcgtcccagcaatagcacgccgccccccacgcagctcagcaaaatcaagtactcaggggggccccagattgtcaagaaggagcgacggcaaagctcctcccgcttcaacctcagcaagaatcgggagctgcagaagcttcctgccctgaaaggtacttggcaattggtcacaggggctgttttaccagttctagtgggcatcgggagttggtggaatggaagttttggggtattttgcggggaagggagttccagagaatgcgggaagggggwgccagggagcaggatggtggcagggtggggtaagggaaagcccttgaaggcaagcagggcatcgcagtgaaggactacagaggagaacctgactgctggggcccccacagattcgccaacccaggagcgggaggagctgtttatccagaagctacgccagtgctgtgtcctctttgacttcgtgtcagacccactcagtgacctcaaattcaaggaggtgaagcgggcaggactcaacgagatggtggagtacatcacccatagccgtgatgttgtcactgaggccatttaccctgaggctgtcaccatggtgggcacagggaaaggacacaggggggactggtgaggggctctggagaagcccaggtggagctctaactggccctacccctcagttttcagtgaacctcttccggacgctgccaccttcatcgaatcccacaggggctgagtttgacccagaggaagatgagcccaccctggaagctgcttggccacatctccaggtaccagggcaagggggcagattggccgtggctgcagggagtggggcacttggaggcctgcaagtccttgggaacatcccctcagtggcgtgccttttcccctatagctcgtgtatgagttcttcttacgtttccttgagtctcctgatttccagccaaacatagccaagaagtacatcgaccagaagtttgtacttgctgtgagtccccgagttcctgtccttgccctctctttccattccatgcccccttcatctgtgtcccagtggctctttccccttaagctgaatatattgggtttcatccatgtctggtacgaggaggctataaagggtaaaaaacaaaacaaaacaaaaccctactctggccttaagaaactaacaacataatggtaggaaacaaaaaagcaacagagtacctctctcaggtcaatagtgaggcatcactttggaagtctcagtacaaatacaatagaatcagcaatataatagaatcactgctttctaagacttgctggcccccactccaggggacctctgcatttcccctggcgggacctatgtcaccctggccactgccttccctggctgctgcctcacyggctgctttccctcccttgtacccccagctcctagacctatttgacagtgaggatcctcgagagcgggacttcctcaagaccattttgcatcgcatctatggcaagtttttggggctccgggcttatatccgtaggcagatcaaccacatcttctacaggtgaggccaggagcccaggcttaggagcaaaaccttctgctactgaggtggggtgggagcagggaggtggggggactgtacagaatgctggagggacatcaggggttgtcaagagagccatttttcttccctcaggttcatctacgagacggagcatcacaacgggattgctgagctcctggagatcctgggcaggtgagaggccgggtgggggcacagatgcctgaaaaaggttggcaggattggtgtactgaacttggatctgaccctctggtcctaacaaatgtcccttaattcctagcatcatcaatggctttgccctgccccttaaagaagagcacaagatgttcctcatccgtgtcctacttccccttcacaaggtcaagtccctgagtgtctaccaccctcaggtgagctgccttcctcctkataatgtccaactcaggcagcagagaaaagagccggcaggaaagtgttccagctgggataggggaagcatagggagcaggtgggataattccttccctccatctccccttcccttctgggatcttgtttctatcactgacttctctgagagcttctaggacctacacctcacctcccttctacctcacacctttgcagctggcatactgtgtggtacaattcctggagaaggagagcagtctgactgagccggtaattccccttccgggccccaaggcccacctcttactgtcagcatcacttgccagtctgtacctacygggggtgccataagggggaactcaggagggctgtgacctgaccggtaacatggtttcctctctgaaggggaagcaaaacctatatacacctaggaaacagatccaaggcaaagaaacgggtagctggctgagatcacccaaactgtgcccaccagggtgggggagagagcaggtaggaaaacttcctggtgacctaggcaggtgcaaagaattttcatccccatgccctccttgtctcccaggtaattgtgggacttctcaagttttggcccaagacccacagccccaaggaggtgatgttcttgaatgagctggaggagattctggacgtcattgaaccttctgagttcagcaaagtgatggaacccctcttccgccagctggccaagtgtgtctctagcccccatttccaggtgagactccaacctagcatatcctagcccctgccagaaactgaggtcttgagtgaaatgagcagcacccaccgagtctgcctctccccaccaggtggcagagcgtgctctctattactggaacaatgagtacatcatgagcctgataagtgacaatgctgcccgagtcctccccatcatgttccctgcactctacaggaactccaagagccactggaacaagtaaggcgctggggtggggctgggtggtggggatccagtttgggaaactttgagggtatggaagaactaaagagccaggggtctcmcctagtcacccagcaagtggggckgatgtcccctgcatgttgataggaccttgaggggctgactggagcgaaaagatgcctgtgtgcaagatctctgtgataccaaacagcagggcagcggcctgttacaccgctccttgggttcagctattctacaggtcctatcacagctttggagatgtaattctatgcagtgagaagctgatgtgaccttctttgagagtatgtgtaaagaatcccagggttttaggccgggcacggtgtctcacgcctgtaatcctagcactttgggaggctggcaaggcgggtggatcacgaggtcaggagtttgagaccagcctgcccaacatagtgaaacccccatctctactaaaaatacaaaaattagctgggtgtagtggtggatgcctgtagtcccagctacttgggaggctgaggcaggagaatcacttgarcctgggaggtgacggttgcagtgagccgagatcgtgccactgcactccagcctgggcaacagagtgagactccgtcttaaaaaaaaaactcagggttttgaaaagacttttctgctaaaagcaagcacactgtggtgtagatgcagtctgtcatgctgcatctacatgcccatcatgctgctgggaggccattagtgtgggttagagtgggaaaggatgggaggtaggcaggccttggagcatggggtgagggaaggatggacaggtggaccgatatttgtgaaaaccatgaaatgccagtctcaaaccaggtgatttggccagagctctcttctgatactrcacagaggtttgtgaactggaagtagtaaatgacaaagctcttagcagagatacccctgtgagagaacaaattgggttcctcacgctaagggcaggctctggcctcctacacctcatctttcttcttggtggcaggacaatccatggactgatctataatgcccygaagttgtttatggaaatgaatcagaagctgtttgatgactgcacacaacaatacaaggcagagaagcagaagtgagtatctctctccccrggagactttcatcttctaccaccagctcactgtgtttctctcaagcccaaccccaatcctacttttgctcctcaggggccggttccgaatgaaggaaagggaagagatgtggcaaaaaatcgaggagctggcccggcttaatccccaggtgaggttttcctgccactgttgtgaactgaggggccagcccatcttgagctgggggagagtttgttgggggaggaatatggggcacacaggcccccaagcctctgaagtggctcttaacgcttgtccatgtctcctcactcagtatcccatgttccgagcccctccaccactgccccctgtgtactcgatggagacagagacccccacagctgaggacatccagcttctgaagaggactgtggagactgaggctgttcaggtgggagggcaatgtagggggatggagcagaaataatagctctggaagggagaggagacagaaacagcagagccaaagaataaggggayggaacaatagaattcactgggaattggtcaccattcctcaccttgtccctattcacacacagatgctaaaagacatcaagaaggagaaagtgctgctgcggaggaagtcggagctgccccaggacgtgtacaccatcaaggcactggaggcgcacaagcgggcggaagagttcctaactgccagccaggaggctctctgacccctcacgttcctaccacagggccacagcccacacagccctgggacactgccctggccctccatactctgctccctactggctgtcttgggggaaggcagcgcctctctagctactcaagggagggggatgtgggcacttgaagcagggacacccacagaatggtccctcttctccccaaaaggtgttcatgcctccctgtggctagtacaggctgagcactaagatgcttagtgctcagacaacctggggatgcctgtcccctacctgctcctcacccacagctacctgaggctgctctgagaagtacacacaggaatacatacgctcctctattcttcccttcatcctcatttgaacgccaggtatctcccctcctctctctcccctgcagaggcatgtagggaacagcaggagattattctcaccaaagttatgtcaagccccattggtcccagagtagctgaagggaagccaacccccctgcagcacaaataggccccccagtcccagccgtgtgctggcagatagggttgtattatttcttcttaccccatgcctgaccaagggaggtcaaaaggagaaaagtataggctgtggacaataactgatgaatatagggcccagatggaccaagtggggccggggagggatgaataaacaccctaccccgtgccctgtctttggtgagcagcagccctggggtcacagacatggaagggaccaccctggggctgactgcttttctgtgctgttggttcccaamactagaaagaaggaagcagggagcggtgccccaagcatggctcctgccaamacctatttatttccttgtttgtgctatgctgggcaggccttctcttgtcccttataggtaccttggaggggccaggggctgaggaaggccggacycaggttccaggggcgcaggcagtgckgcttttggctgtgtacatagggtgctttattctccmcagagtgatacatgctaaggtgggttgggcttggaccgatgtccccatatgtacagaactgaataaagtgggtctctgagaagtctgatgtgccttgatgtggaaagggagacggggaagatggaaatggacattacaaccagggatgtgttcagtcctgtgctggttctggcctggaatgtaggaatataaggcagctctcactgtggtcacttccaggcaggggatgcctgccgggcttggagggctttctgtaccacatcttcccactgggcatccgatatctcccgagcccaggcaggaacccctggcgcaggcaggcttactccagccattgtccttttcaccagctctacatgttctgaaatcagagccagaggccattcaggcatagaaataatgggaccagctcccctccccaatccccgaatcaacccagagcccttgggctgctagggtcaccaaatccaccttgttactttaaggcaagcctgcccatccccaaagctagcaaaagagcatttcacttggactctgaagtctacaaaatcttagtttacaaactatctttttaggatagggtcttcctctgaaacttccttctactgactcatgccagttcatttccttagtaattattccagaatgaaagaatgatcttttacctgggtccatgggaatagagctgtggttgttcaacgctgtagctccctcctcatcttcatcttcactctctaatggtgggtctggcaaatgaagccccagggcctgcagagccacagaagaccgtttgggtctaggctttcagggagcccagcttcacctgttcaggaaccatccctcctccaccctacctggattcgatcctggatgtcagcaactacatctccatcccccactggtgccagttccacctcctcttgttcaggatcttggttcaggggctggtaggagtagccagctgggcccgaccccgtttcctcctgctcttcctcaggctcctcactgctccaatccccagtgccttctgaagggccctgatgtcccagttcctcagtctgattggggaagatacgctcagggcccatggtgtctcctcctagaactactgttgccatccgggcaggggctgcaagaacagggaggcggtaggacagggatcggatgaaaccaggcccatcttcatcctctcatcatctccttgtagtctcctgcgtgcaaaaaaccagctcctccccgaggctcctgcatcctccacccctccgccccaattccagcctctcgttcctccccctcctaagtcggggttcttatcttgaaccaggccccaccaacttgctccgccacttcctagttaaacgcccaaccggaggccctgccacctcctaaaagacaccccttccagaaccccggctccccgcgccacgcctcccccgcgacttgggaactctgggtcatcagactcccctaaacaggtcggcgtacccgcccccttctcccctctcctagaggaccccctctgtaccgcctgacagatgcctttcaggccccatgggctcccctcaaatggccccagctgcagcgtcccccacccgcccccatccgaatcccggcgccggtgttcccgcgcgcctcacccgctcagagcccgcggcctccacttccggcggggcaggacgtgcagaggtgcctagtcctccagccccgccccatatccatgattgacgctggcgaggacgaggagtccgccccttgccccgcctccgtcattcccagcccaaaaaacaaaggactgcattacccagtggcctcctcggtctcgacacatatttgcacatgcgcagaatctctcctacgcccctgcccactcctcagccctctcgtccctcaggaaacgtatggactacaagtcccgaaatgcctccggcacttagctacgactgcacgtgcgcgcacagctgcccgccggaagaaccgagcttggctgtgtttatctcgttggggactaaggcgtcggttggcgcgcaacgggttctaggctgcaggcagctcgaggacccgcggccccgccccggctcggcctggcaggtagcctgggatgggtagaagggcaagggagaattagggggcttaggacgtgctgtctggagctggagtggcgggggaggggcctgagagtgatgaggtgggggtggggagggagctagggggatgatgggaaaggagagtgttaatggggaaagcagggctaggggaggatggcgaggagatgggtaggagagacctggtgtctggaggaagcaatgaaggaaatgggaaggaagactgggccatgaaaacagggaagctgagcataatggaaggggaggggtgtctggcgtggtgggctaggggaggccggaatgtctggaagaagacagggatagagtcatatgcagagaggggtatcgtggtcagtgcatgctaatttttctttccttagtggaggtgggaaaatggagggctgttgggtggagcttggaatggtaggagaaggaaaaatgagaaaactgcaaagctctcacgagatcaagaagggcgagaaatggggaataaaaaatgcaagagaccaggcgggtagatacattaagggaatagaagaagtttgaaaatgcttggtggtgatggaggactggggagacccagggataagaggagcccctgagcgcctgggggcttgttctccttgaatttgagttgtttatatggcagagaaactaaaattttttttctccacctttggctggaattgcttatctcctctcctgtgcatattttactttaccttgacatatctgaagggaagaatagagaatataagggaggatggaagacttccattcttaagcccatcgacctcctaacagtctccacaagcccagacccaagatattttggagagcgggagtaatgaagtgagagtagcttcctgctggggctatttcaggatgggtcccatggctatttaaagcttagggtgtggagttgggggaggttgggtgggtgggactagcaagccagctgaaagccatgtctctttcctgcaaggggcctcccttatttgagctgttttagtgcctgaggttttgcctggccctttcctctgccagggcttcttaaacagggagcagatgatgatacacccaaactcaggagatgcttgccagcaaaagcattgtcagttgcaaggatttgcctgaaaaaacctcagatgtacccaggtgtacgtgccactaggttgacaggttgtgtttaagagaccatgaccagctgggcatggtggctcacgcctgtaatcccagcacttcaggagaccgaggacggtggatcacctgaggtcaggagtttgagaccagcctggccaacatagtgagaccccatctctactaaaaatacaaaaattagctgggcatggtggcaggcgcctgtaatcccagctacttgggaggctgaggcaggagaatcgcttgaacccgggagggaggcagagtttgcagtgagctgagattgcaccattgcgctccagcctgggggcaagagcgagacttcatctaaaaaaaaaaaaaaaaaaaaagaccatgacttctcatgctggatctttctcttgtcctgcccaagggcattttttgcctcccttcccctttttttttgttttgagacagagtctcgctctgtcgccagactggagtgcagtggtgtgatctcggctcactccaacctccgccacccgagtgcaagcaattctcctgcctcagcctcctgagtagctgggactacaggtgcgcgccaccgtgcccagctaatttttgtatttttagtagagacgggtttcaccatgttggccaggatggtctccgtctcttgatctcgtgatccacctgcctcggcctctcagggtgctgggattacaggtgtgagccactgtgcccagccccttcccctttgcattgcacactcccacctctatccgcctttcaggaacccaagttgtggaagagcttgttctctcttttctactggaaatggcttgttctctaccacagtagcagggatggggaagtggcaggaggagaaaacccctccctctatcaccatcccccaagcctaagcatacacatacctttctggcttaagtcctggcagcataccaggcacagctgtcaaaggaactccttgtgcctgtggggggccctgggtgaccccaatgacaacaactcagcttgacaggagctccctgtgaggggctaaccaaccgcggtaacatggaggtccctgtcctggatcagtcccgccctatcttgggtagggggattgttccactctaaaagcctgaaagcttttctgctttgaggcactcatgccagctttcaatggactgtttgaggctggctgggctattaatagctgtgagtattttgagatccctttccccacctcaaagaacacagattcttagagaggtggcagtaagcagagcagagacaagagaatataccgtttgggaagggggcttcaagtttgtgccaagccagggacagagtggagcctccacgagtaggttgtgaccatgatatgcagattctgagctggcaatcaggtgggggtggccccacccttcactgttggagaacactgggcccaggctgctccctgacctcggcagctcccttggggcagggccagccacctgagctgagactagtgcccctgtggaggggtagtgtgggagggcccccagggtgacacttggaggcaaaggctggttctgggcagagtcacagtgagctgggcagaagcctcgcctgaggatcccgtggccccaatttgtgtgcagatagcagaggcagcaggccgtgccgggggggcatgttgctgtaaccagtggcccaggggatgttacggtggacagtgcacctggagggcgggccccgcagggtgaaccatgctgcagtggctgtcgggcatcgggtatactccttcgggggttactgctctggtgaagactatgagacactgcgtcagatagatgtgcacattttcaatgcaggtaagccaatgctggggctgtccctgggtccccacatcagggtgggaacgggctgctgatgaggtttggctgtggtctctgggaccaaggggattggggacaaacatctggtttgggaaaagtggacagcctggagggaggttcccagggctgagcagagctgtgcccacagtgtccttgcgttggacaaagctgcccccggtgaagtctgccatccgtgggcaagctcctgtggtaccctacatgcgctatggacactcaaccgtcctcatcgacgacacagtcctcctttggggcgggcggaatgacaccgaaggggcctgcaatgtgctctatgcctttgacgtcagtgagtatggatctcagagaggctatgtccttccagatgttgcctcagttgcccaagaaaggtttgggttgggggtcttggggagtagagtaccccagagctgaggagggactgtcatagagggtgcttagttgagccattttctcatctccttcagatacgcacaagtggttcacaccccgagtgtcagggacagttcctggggcccgggatggacattcagcctgtgtcctaggcaagatcatgtacatttttgggggctacgagcagcaggtaggtctgggaataaaataagaggtttagggtgggactgagaaagaggggaagggcaatttaggatggtgaaatgggaggctttggcttgtttgcaggttttgaggggagggatggagggtcagagagtgaccattggctccctcttttcttcctccttttctcttcctactcaggcggactgtttttccaatgacattcacaagctagataccagcaccatgacatggactcttatctgtacaaaggtctgctctttcttttttttcccaaatccccaccctctgttgaagcaatgataggaagctcagtcagaggagatcctcttccagtctttgtgctgacccctccaccatctctctgcctctgcccagggcagccctgcacgctggagggacttccactcagccacaatgctgggaagtcacatgtatgtctttgggggccgtgccgaccgcttt

SEQ ID NO: 93786 - DNA, 14541 bp, Homo sapiens
caagagttaaactgaactgatacaaagagacgaagtatctcagaatgacccagacaggaaaaattatatacaaagtaacatctggtggttaatttgaacctgaaaaattatacataaagtaacatctggtggttaattggaacctaagaacgaaattcaaagggaagcagccagatcttctggaaccaatgtgatccagaggctcctaaacttgtctttactttgcagctaggttctaagatttaatcagttgttctcagcatggtcacaaaaataactgtataagcttaggtctcagaaagtgatgctgccgagctgtatttttttttcatataatttattctgctgacagttttatatgatggctgtcaattcacctccttccatctcatttcccacaagtacactacatctccagcagaacaaaaatgtctgtctcctccatactgaaaccaagctaatcaggtcacacctgtgctgctcactcaccctcactcaatccctcccttccaaccactcgctgtacctgatatcatgaggcaaacaggactggtctagrttatactgaatcacggccagtttgcacagagtcttcagactagggcctttaagggagaagttgtggaaaggagatggtcaaaggtgaggaaaggatccagtcctggatatcaccacccaaagacagggaccttgatggcaggagcaattcaggaataactatacttactaaagtccaaaatgtgtaagtcagaatgatctataaggtcaaattcatctcccaggccttcctcaggagatggactgtcgggatcaaaagagagatgaaagtaggacaaaaactacccacgaaacccccttttcaaatacctcccactctcccattagtgacttccctgagccccttccctctctccttctaacctggtacccccaaagaggacaatcttgtcaccaacaatacagcagcactggcgccggcggggacatggccccttccccttmggttcaatctttttccaggtaaaggacactgaagagaaatttatatggaagttcaatacctgcctagtccaggtatcttccccacccccatccctcaccgcctcaggattattttcttttcctcccacctcaattgctccttgttcctgccctaaatgcagtgctctttaccaggattaaacttccagaggtcatggaagtgccggttcagccttgcattataaccaccaaagatgtacagctccccattgtagccaactggaagragagaggaagtgtcaggagtgtgaagagggcaggaagggaactccacagggaagtaacaaacactcacaggccgagtggctccggcgcccctcaggcagcactggagtcgggggacagtccagccaagcctcagttctggtgtcaaagactcgaatgcggttgcagtaaatctcattgttggaatggaatggcccaaagcggtcggcacggcccccaaagacatacatgtgacttcccagcattgtggctgagtggaagtccctccagcgtgcagggctgccctgggcagaggcagagagatggtggaggggtcagcacaaagactggaagaggatctcctctgactgagcttcctatcattgcttcaacagagggtggggatttgggaaaaaaaagaaagagcagacctttgtacagataagagtccatgtcatggtgctggtatctagcttgtgaatgtcattggaaaaacagtccgcctgagtaggaagagaaaaggaggaagaaaagagggagccaatggtcactctctgaccctccatccctcccctcaaaacctgcaaacaagccaaagcctcccatttcaccatcctaaattgcccttcccctctttctcagtcccaccctaaacctcttattttattcccagacctacctgctgctcgtagcccccaaaaatgtacatgatcttgcctaggacacaggctgaatgtccatcccgggccccaggaactgtccctgacactcggggtgtgaaccacttgtgcgtatctgaaggagatgagaaaatggctcaactaagcaccctctatgacagtccctcctcagctctggggtactctactccccaagacccccaacccaaacctttcttgggcaactgaggcaacatctggaaggacatagcctctctgagatccatactcactgacgtcaaaggcatagagcacattgcaggccccttcggtgtcattccgcccgccccaaaggaggactgtgtcgtcgatgaggacggttgagtgtccatagcgcatgtagggtaccacaggagcttgcccacggatggcagacttcaccgggggcagctttgtccaacgcaaggacactgtgggcacagctctgctcagccctgggaacctccctccaggctgtccacttttcccaaaccagatgtttgtccccaatccccttggtcccagagaccacagccaaacctcatcagcagcccgttcccaccctgatgtggggacccagggacagccccagcattggcttacctgcattgaaaatgtgcacatctatctgacgcagtgtctcatagtcttcaccagagcagtaacccccgaaggagtatacccgatgcccgacagccactgcagcatggttcaccctgcggggcccgccctccaggtgcactgtccaccgtaacatcccctgggccactggttacagcaacatgcccccccggcacggcctgctgcctctgctatctgcacacaaattggggccacgggatcctcaggcgaggcttctgcccagctcactgtgactctgcccagaaccagcctttgcctccaagtgtcaccctgggggccctcccacactacccctccacaggggcactagtctcagctcaggtggctggccctgcccyaagggagctgccgaggtcagggagcagcctgggcccagtgttctccaacagtgaagggtggggccacccccacctgattgccagctcagaatctgcatatcatggtcacaacctactcgtggaggctccactctgtccctggcttggcacaaacttgaagcccccttcccaaacggtatattctcttgtctctgctctgcttactgccacctctctaagaatctgtgttctttgaggtggggaaagggatctcaaaatactcacagctattaatagcccagccagcctcaaacagtccattgaaagctggcatgagtgcctcaaagcagaaaagctttcaggcttttagagtggaacaatccccctacccaagatagggcgggactgatccaggacagggacctccatgttaccgcggttggttagcccctcacagggagctcctgtcaagctgagttgttgtcattggggtcacccagggccccccacaggcacaaggagttcctttgacagctgtgcctggtatgctgccaggacttaagccagaaaggtatgtgtatgcttaggcttgggggatggtgatagagggaggggttttctcctcctgccacttccccatccctgctactgtggtagagaacaagccatttccagtagaaaagagagaacaagctcttccacaacttgggttcctgaaaggcggatagaggtgggagtgtgcaatgcaaaggggaaggggctgggcacagtggctcacacctgtaatcccagcaccctgagaggccgaggcaggtggatcacgagatcaagagacggagaccatcctggccaacatggtgaaacccgtctctactaaaaatacaaaaattagctgggcacggtggcgcgcacctgtagtcccagctactcaggaggctgaggcaggagaattgcttgcactcgggtggcggaggttggagtgagccgagatcacaccactgcactccagtctggcgacagagcgagactctgtctcaaaacaaaaaaaaaggggaagggaggcaaaaaatgcccttgggcaggacaagagaaagatccagcatgagaagtcatggtctttttttttttttttttttttagatgaagtctcgctcttgcccccaggctggagcgcaatggtgcaatctcagctcactgcaaactctgcctccctcccgggttcaagcgattctcctgcctcagcctcccaagtagctgggattacaggcgcctgccaccatgcccagctaatttttgtatttttagtagagatggggtctcactatgttggccaggctggtctcaaactcctgacctcaggtgatccaccgtcctcggtctcctgaagtgctgggattacaggcgtgagccaccatgcccagctggtcatggtctcttaaacacaacctgtcaacctagtggcacgtacacctgggtacatctgaggttttttcaggcaaatccttgcaactgacaatgcttttgctggcaagcatctcctgagtttgggtgtatcatcatctgctccctgtttaagaagccctggcagaggaaagggccaggcaaaacctcaggcactaaaacagctcaaataagggaggccccttgcaggaaagagacatggctttcagctggcttgctagtcccacccacccaacctcccccaactccacaccctaagctttaaatagccatgggacccatcctgaaatagccccagcaggaagctactctcacttcattactcccgctctccaaaatatcttgggtctgggcttgtggagactgttaggaggtcgatgggcttaagaatggaagtcttccatcctcccttatattctctattcttcccttcagatatgtcaaggtaaagtaaaatatgcacaggagaggagataagcaattccagccaaaggtggagaaaaaaaattttagtttctctgccatataaacaactcaaattcaaggagaacaagcccccaggcgctcaggggctcctcttatccctgggtctccccagtcctccatcaccaccaagcattttcaaacttcttctattcccttaatgtatctacccgcctggtctcttgcattttttattccccatttctcgcccttcttgatctcgtgagagctttgcagttttctcatttttccttctcctaccattccaagctccacccaacagccctccattttcccacctccactaaggaaagaaaaattagcatgcactgaccacgatacccctctctgcatatgactctatccctgtcttcttccagacattccggcctcccctagcccaccacgccagacacccctccccttccattatgctcagcttccctgttttcatggcccagtcttccttcccatttccttcattgcttcctccagacaccaggtctctcctacccatctcctcgccatcctcccctagccctgctttccccattaacactctcctttcccatcatccccctagctccctccccacccccacctcatcactctcaggcccctcccccgccactccagctccagacagcacgtcctaagccccctaattctcccttgcccttctacccatcccaggctacctgccaggccgagccggggcggggccgcgggtcctcgagctgcctgcagcctagaacccgttgcgcgccaaccgacgccttagtccccaacgagataaacacagccaagctcggttcttccggcgggcagctgtgcgcgcacgtgcagtcgtagctaagtgccggaggcatttcgggacttgtagtccatacgtttcctgagggacgagagggctgaggagtgggcaggggcgtaggagagattctgcgcatgtgcaaatatgtgtcgagaccgaggaggccactgggtaatgcagtcctttgttttttgggctgggaatgacggaggcggggcaaggggcggactcctcgtcctcgccagcgtcaatcatggatatggggcggggctggaggactaggcacctctgcacgtcctgccccgccggaagtggaggccgcgggctctgagcgggtgaggcgcgcgggaacaccggcgccgggattcggatgggggcgggtgggggacgctgcagctggggccatttgaggggagcccatggggcctgaaaggcatctgtcaggcggtacagagggggtcctctaggagaggggagaagggggcgggtacgccgacctgtttaggggagtctgatgacccagagttcccaagtcgcgggggaggcgtggcgcggggagccggggttctggaaggggtgtcttttaggaggtggcagggcctccggttgggcgtttaactaggaagtggcggagcaagttggtggggcctggttcaagataagaaccccgacttaggagggggaggaacgagaggctggaattggggcggaggggtggaggatgcaggagcctcggggaggagctggttttttgcacgcaggagactacaaggagatgatgagaggatgaagatgggcctggtttcatccgatccctgtcctaccgcctccctgttcttgcagcccctgcccggatggcaacagtagttctaggaggagacaccatgggccctgagcgtatcttccccaatcagactgasgaactgggacatcagggcycttcagaaggcactggggattggagcagtgaggagcctgaggaagagcaggaggaaacggggtcgggcccagctggctactcctaccagcccctgaaccaagatcctgaacaagaggaggtggaactggcaccagtgggggatggagatgtagttgctgacatccaggatcgaatccaggtagggtggaggagggatggttcctgaacaggtgaagctgggctccctgaaagcctagacccaaacggtcttctgtggctctgcaggccctggggcttcatttgccagacccaccattagagagtgaagatgaagatgaggagggagctacagcgttgaacaaccacagctctattcccatggacccaggtaaaagatcattctttcattctggaataattactaaggaaatgaactggcatgagtcagtagaaggaagtttcagaggaagaccctatcctaaaaagatagtttgtaaactaagattttgtagacttcagagtccaagtgaaatgctcttttgctagctttggggatgggcaggcttgccttaaagtaacaaggtggatttggtraccctagcagcccaagggctctgggttgattcggggattggggaggggagctggtcccattatttctatgcctgaatggcctctggctctgatttcagaacatgtagagctggtgaaaaggacaatggctggagtaagcctgcctgcgccaggggttcctgcctgggctcgggagatatcggatgcccagtgggaagatgtggtacagaaagccctccaagcccggcaggcatcccctgmctggaagtgaccacagtgagagctgccttatattcctacattccaggccagaaccagcacaggactgaacacatccctggttgtaatgtccatttccatcttccccgtctccctttccacatcaaggcacatcagacttctcagagacccactttattcagttctgtacatatggggacatcggtccaagcccaacccaccttagcatgtatcactctgkggagaataaagcaccctatgtacacagccaaaagcmgcactgcctgcgcccctggaacctgrgtccggccttcctcagcccctggcccctccaaggtacctataagggacaagagaaggcctgcccagcatagcacaaacaaggaaataaataggtkttggcaggagccatgcttggggcaccgctccctgcttccttctttctagtkttgggaaccaacagcacagaaaagcagtcagccccagggtggtcccttccatgtctgtgaccccagggctgctgctcaccaaagacagggcacggggtagggtgtttattcatccctccccggccccacttggtccatctgggccctatattcatcagttattgtccacagcctatacttttctccttttgacctcccttggtcaggcatggggtaagaagaaataatacaaccctatctgccagcacacggctgggactggggggcctatttgtgctgcaggggggttggcttcccttcagctactctgggaccaatggggcttgacataactttggtgagaataatctcctgctgttccctacatgcctctgcaggggagagagaggaggggagatacctggcgttcaaatgaggatgaagggaagaatagaggagcgtatgtattcctgtgtgtacttctcagagcagcctcaggtagctgtgggtgaggagcaggtaggggacaggcatccccaggttgtctgagcactaagcatcttagtgctcagcctgtactagccacagggaggcatgaacaccttttggggagaagagggaccattctgtgggtgtccctgcttcaagtgcccacatccccctcccttgagtagctagagaggcgctgccttcccccaagacagccagtagggagcagagtatggagggccagggcagtgtcccagggctgtgtgggctgtggccctgtggtaggaacgtgaggggtcagagagcctcctggctggcagttaggaactcttccgcccgcttgtgcgcctccagtgccttgatggtgtacacgtcctggggcagctccgacttcctccgcagcagcactttctccttcttgatgtcttttagcatctgtgtgtgaatagggacaaggtgaggaatggtgaccaattcccagtgaattctattgttccgtccccttattctttggctctgctgtttctgtctcctctcccttccagagctattatttctgctccatccccctacattgccctcccacctgaacagcctcagtctccacagtcctcttcagaagctggatgtcctcagctgtgggggtctctgtctccatcgagtacacagggggcagtggtggaggggctcggaacatgggatactgagtgaggagacatggacaagcgttaagagccacttcagaggcttgggggcctgtgtgccccatattcctcccccaacaaactctcccccagctcaagatgggctggcccctcagttcacaacagtggcaggaaaacctcacctggggattaagccgggccagctcctcgattttttgccacatctcttccctttccttcattcggaaccggcccctgaggagcaaaagtaggattggggttgggcttgagagaaacacagtgagctggtggtagaagatgaaagtctcccggggagagagatactcacttctgcttctctgccttgtattgttgtgtgcagtcatcaaacagcttctgattcatttccataaacaacttcrgggcattatagatcagtccatggattgtcctgccaccaagaagaaagatgaggtgtaggaggccagagcctgcccttagcgtgaggaacccaatttgttctctcacaggggtatctctgctaagagctttgtcatttactacttccagttcacaaacctctgtgcagtatcagaagagagctctggccaaatcacctggtttgagactggcatttcatggttttcacaaatatcggtccacctgtccatccttccctcaccccatgctccaaggcctgcctacctcccatcctttcccactctaacccacactaatggcctcccagcagcatgatgggcatgtagatgcagcatgacagactgcatctacaccacagtgtgcttgcttttagcagaaaagtcttttcaaaaccctgagttttttttttaagacggagtctcactctgttgcccaggctggagtgcagtggcacgatctcggctcactgcaaccgtcacctcccaggttcaagtgattctcctgcctcagcctcccaagtagctgggactacaggcatccaccactacacccagctaatttttgtatttttagtagagatgggggtttcactatgttgggcaggctggtctcaaactcctgacctcgtgatccacccgccttgccagcctcccaaagtgctaggattacaggcgtgagacaccgtgcccggcctaaaaccctgggattctttacacatactctcaaagaaggtcacatcagcttctcactgcatagaattacatctccaaagctgtgataggacctgtagaatagctgaacccaaggagcggtgtaacaggccgctgccctgctgtttggtatcacagagatcttgcacacaggcatcttttcgctccagtcagcccctcaaggtcctatcaacatgcaggggacatcagccccacttgctgggtgactaggtgagacccctggctctttagttcttccataccctcaaagtttcccaaactggatccccaccacccagccccaccccagcgccttacttgttccagtggctcttggagttcctgtagagtgcagggaacatgatggggaggactcgggcagcattgtcacttatcaggctcatgatgtactcattgttccagtaatagagagcacgctctgccacctggtggggagaggcagactcggtgggtgctgctcatttcactcaagacctcagtttctggcaggggctaggatatgctaggttggagtctcacctggaaatgggggctagagacacacttggccagctggcggaagaggggttccatcactttgctgaactcagaaggttcaatgacgtccagaatctcctccagctcattcaagaacatcacctccttggggctgtgggtcttgggccaaaacttgagaagtcccacaattacctgggagacaaggagggcatggggatgaaaattctttgcacctgcctaggtcaccaggaagttttcctacctgctctctcccccaccctggtgggcacagtttgggtgatctcagccagctacccgtttctttgccttggatctgtttcctaggtgtatataggttttgcttccccttcagagaggaaaccatgttaccggtcaggtcacagccctcctgagttcccccttatggcacccccagtaggtacagactggcaagtgatgctgacagtaagaggtgggccttggggcccggaaggggaattaccggctcagtcagactgctctccttctccaggaattgtaccacacagtatgccagctgcaaaggtgtgaggtagaagggaggtgaggtgtaggtcctagaagctctcagagaagtcagtgatagaaacaagatcccagaagggaaggggagatggagggaaggaattatcccacctgctccctatgcttcccctatcccagctggaacactttcctgccggctcttttctctgctgcctgagttggacattataaggaggaaggcagctcacctgagggtggtagacactcagggacttgaccttgtgaaggggaagtaggacacggatgaggaacatcttgtgctcttctttaaggggcagggcaaagccattgatgatgctaggaattaagggacatttgttaggaccagagggtcagatccaagttcagtacaccaatcctgccaacctttttcaggcatctgtgcccccacccggcctctcacctgcccaggatctccaggagctcagcaatcccgttgtgatgctccgtctcgtagatgaacctgagggaagaaaaatggctctcttgacaacccctgatgtccctccagcattctgtacagtccccccacctccctgctcccaccccacctcagtagcagaaggttttgctcctaagcctgggctcctggcctcacctgtagaagatgtggttgatctgcctacggatataagcccggagccccaaaaacttgccatagatgcgatgcaaaatggtcttgaggaagtcccgctctcgaggatcctcactgtcaaataggtctaggagctgggggtacaagggagggaaagcagccrgtgaggcagcagccagggaaggcagtggccagggtgacataggtcccgccaggggaaatgcagaggtcccctggagtgggggccagcaagtcttagaaagcagtgattctattatattgctgattctattgtatttgtactgagacttccaaagtgatgcctcactattgacctgagagaggtactctgttgcttttttgtttcctaccattatgttgttagtttcttaaggccagagtagggttttgttttgttttgttttttaccctttatagcctcctcgtaccagacatggatgaaacccaatatattcagcttaaggggaaagagccactgggacacagatgaagggggcatggaatggaaagagagggcaaggacaggaactcggggactcacagcaagtacaaacttctggtcgatgtacttcttggctatgtttggctggaaatcaggagactcaaggaaacgtaagaagaactcatacacgagctataggggaaaaggcacgccactgaggggatgttcccaaggacttgcaggcctccaagtgccccactccctgcagccacggccaatctgcccccttgccctggtacctggagatgtggccaagcagcttccagggtgggctcatcttcctctgggtcaaactcagcccctgtgggattcgatgaaggtggcagcgtccggaagaggttcactgaaaactgaggggtagggccagttagagctccacctgggcttctccagagcccctcaccagtcccccctgtgtcctttccctgtgcccaccatggtgacagcctcagggtaaatggcctcagtgacaacatcacggctatgggtgatgtactccaccatctcgttgagtcctgcccgcttcacctccttgaatttgaggtcactgagtgggtctgacacgaagtcaaagaggacacagcactggcgtagcttctggataaacagctcctcccgctcctgggttggcgaatctgtgggggccccagcagtcaggttctcctctgtagtccttcactgcgatgccctgcttgccttcaagggctttcccttaccccaccctgccaccatcctgctccctggcacccccttcccgcattctctggaactcccttccccgcaaaataccccaaaacttccattccaccaactcccgatgcccactagaactggtaaaacagcccctgtgaccaattgccaagtacctttcagggcaggaagcttctgcagctcccgattcttgctgaggttgaagcgggaggagctttgccgtcgctccttcttgacaatctggggcccccctgagtacttgattttgctgagctgcgtggggggcggcgtgctattgctgggacgcttgttggatgacggtggctgagactgggcttggggctggggctggggctggggctgcggctgggcctggtcaaacaagtcacctgttgaaatccacttcccaagatatgcctcccaccctgggcctggccatccccaagtctgtttatgcctgcacaggcctgggcagtgagcagctgtctcctgccccgaaggagctaaggccagggttacagagataactgtgctgtagccctggcagggagcagtcaagaagtcacatcacccaaagagatgcccactgcttgtgcatcaagagcctttaaaacgttcattccagttcatgaacaggtaaagctaattgatagattgatggtgacagaagtcaaaaaagtgattacgttgccaggggaaatggggtgggtattgctaagaagacacatgatgaataagaagacacatgaggaataagaagagacatgaggagccttctgagtaatgtaaacatcctgtatcttgactggacctgcaaggtggtgcatggcagatacatacctaaaatttattgagcagtacacttaagatcctttactgaatgtatgacagtctccaatcaaaaggtagaagaggccgggcgcagtggctcacacttgtaatcccagcactttgggaggccgaggagggcagatcacctgaggtcaagagttcaagaccagccaggccaacatggtgaaaccccatctctactaaaaatacaaacattagccaggcgtggtggcaggcgcctgtaatcccagctacttgggaggctgaggcaggagaatcgcttgaacccaggaggcggaggttgcagtgagccgagatcatgccattgcactccagcctgggggacaagagcgagactttgtctcaaaaaaaaaaaacaaaacaaaaggtaaaagaaaggccaggcacagtggccaaagcctgtaatcccaacactttgggaagccaaagcaggaggattacttgaagccagaagtttgaaaccagcctgaacaacgtagcaagaccccatctctacaaaaaattttttttaattagccaggtgtggtggcacatgcctgcagttccagctactcaggaagcttactggagttccagctactcaaggttggaggatcccttgcgcccaggagttcaagtctcccatgagctr

SEQ ID NO: 93787 - DNA, 15835 bp, Homo sapiens
ctccttcctttgttctcctctgcctttgcctcttttaaaagttctaagttgctagccaatcgggacaaatacaaaatgtgaagtcccattccagccaatggaaaccggacacagcagtagggtggacgcgtcaggttataaatgaccctgtctcctttgttcagtgtactctcatggcaaaactgctggcgagggtaccctttctgcagaaagtaaaaatggccttcctgaggaaattgaatttatgttcaagtgctatttctttacggcactggggaacaagcatttcttttttaattttttttatatttaatattaaacatttaatatattaagtgaatacattcaaatctgcaaacaatacatctaggttgtagaagagttaaaaaaatccctccactcagtttttgccaaaacaccacctgtaagcactgagaagcctactgatgcacgcattatcctttgggccaatagaaacaaacgttttaataaaatgctttcccagtggtcaaattgtcttcctgagtaaagctaaacttgttgtagtgagaacaggtagtgtttatttctagcttcttctgggttccaggttacctaagacccaagggtaatgacaatgggcagctccactttattaaaagccaacatttagcccagacattttattctccaaaaattagcaagcatagctttacattcaagttgggtataatgactttattttcccagtaattccctaaataaaacattattacaaaaaatgactcttcccagtgcaaaatcttaacattttgcttttatgagcaaaagcctgtattttacatattttttttttgagacggagtctcgctgtcgcccaggttggggtgcagcggcgcgatctcggctcaccgcaggctccgtcccccagggttcacaccattctcctgcctcagcctcccaagcagctgggaccacaggcgcccgccaccacgcccggctaattttttgtattctcagtaaagacggggtttcaccgtgttagccaggatggtctcgatctcccgacctcgtgatccgcccacctcggcctcccaaagtgctgggattacaggcgtgagccaccgcgcccggcctacgtatttcttatattgatttttacattttcaggttctcaaaaggacttactcattttacctgtaacacttggacgtctgaatgtaacatgcacttgaaaaaaaaaattctatcaccttggataggatagtgatggaggagaatgttgacattgactatataccctcacctagtattctgtgtaaaatcatgtttccctaaagaggactctgatttgtccagttgcatccttgcaacttggcacaggttggcaggtaaaaatgacctttctgtagaagtagaagcctattcttcacatgtaagttttgattactactattttatcacatcttaaatatataaatctcaggctgggcgtggtggtgcacgcctgcaatcccagcactttgggaggccgaggcaggcagatcacctgaggtcgggagttcgagaccagcctgcccatgaagaaaccacacctctactaaaaatacaaaaccagccaggcatggtggcacatgcctgtaatcccagccacttgggaggctgaggcaggagaaccgcttgaacccaggaggcagaggttgcggtgagccgagatcgtgccattgcactccagccttagcagcagccattgcagtctttttagatgcttgcttagccttttttgcttccttagcagccctgatagcttgttctcgtcgagtctttctaacttcaggtttctgattcctcttggtcgttatatcagcaagagatgcaccagtaatggccctctggaatttgactgctcagcgggttcttttcttttgaatttcttccgactgcccctttttgtgcttccttctgtagaggacagtccagtttatctgccgaggattcctcttggaaaggaacgccaactcgcatttcgcattaagaaactggaaaaccttcccgtcggtcctggcgtagcgcctcccgtgtccggtgtagatcttgtacccgctaaaactgcacagctcgaccttcatggcgacagctccacagaaagacaaagatggcgaaaagtcttttttaattttttaaaaaatttatttatttatttttttgagatggagtctcgctctgtcacccaggctggagtgcagtggcgcgatctcggctcagtgcaagctctgcctcccgggttcacaccattctcctgcctcagcctcctgagtagctgggatatcaggcgcgtgccaccacacccagataaattttttttttgtattcttattagagacggggtttcaccgcgttagccagaatggtctcaatctcctgacctcgtgatctgcccgcttcggcctcccaaagtgttgggattacaggcgtgagccactgtgcccggccaattttttttttgaaacggagtttcattcttgttgcccaggctggagtgcaatggtgtgatctcggttcggttcaccgcaacctccccctcgcaggttcaagcggttctcctgcctcagcctcctgagttgctaggattacgggcaggcgccaccacgcccagctaattttttgcatttttagtagagacggggtttctccatgttggtcaggctggtcttgaactccctacctcaggtgttctgcctacctcgacctcccaaagtgctgggattacaggcatgagccaccgcacccagcctccagggaacaagcatttctggcaacttgaacccaggaggcggaggttgcagtgagccgagatggcaccactcattccagcctgggcgacagagggagactccatctgaaaaaacaaaaactaaaccatatgtaaaacaaacattgttttggtccagaaagatgggacaactggaggtgaggaggcttgggggctttcagatcacaggtgggagacaaagggttgcgttcttttgagtttctgattagtctctccaaaggaagcaatcagatatgcatttatctcaatggaggcaggctctccccaagctctcagcttgaattaacactgacattttaaaatatctagcaaagacaaacataaaatttagacaaaacctatgctgacaaatctgaaggcctttttatttttattcccccaataattttaaagctggctagtttagtaaagttatacttaagtggacttgaaaattgcttagacgtatttacttaattacttaagccctcttttttttttttttttttttttgagacaggagtctcgctctgttgtccaggctggagtgcaatggcacgacctcagctcactgcaacctccacctcctgagttcaagcaattctcctgcctcagtctcccaagtagttgggattacaggtgcccaccaccacgcccggctaatttttgtatttttagtagagacagggtttcgccatgttggtcaggctggtctcgaattcctgagctcatgatccacctcagcctccccaagtattgggattacaggcgtgagccactgcgcctggccgagccctcttttacttataagtcaatttggtagacacaacatatagcagtaagtgtacatataagtaaatacatctagacatgtatacgcacacataaacgatgacctggaacgttagccatgagatggcagtacaagcttgaaggttttactttgccctaatggataatgcagggaaggctgtgaaccaaaattttgggtaaagcagtctccatggcagttttatttttatttatatttatttattttttgagacagagtttctctcttgttgcccaggctggagtgcaatagcgcaatcttggctcatcgcaacctccgcctcccagattcaagcgattctcctgcctcagcctcccaagtagctgggattacaggcatgcaccaccatgcccggctaattttgtatttttagtagagacggggcttctccatgttggtcaggctagtcttgaactctcaacctcagttgatctgcctgcctcagcctcccaaagtgttgggattataggtgtgagccaccgtgcccggccaaagtagtttgattgattgatttttgttttgagacggagtcttgctctgtcgcccaggctggagtgcagtggcgcaatcttggctcactgcaacctctgccacccgggttcaagcgattctcctggcttagcctcccaagtagctgggattacaggcacgtgccaccatgcctggctaatttttgtatttttagtagagacagggttttagcatcttggccaggctgatcttgaactcctgaccacgtgatccacctgtcttggcttcctaaagtgctggacagtttgatttttaaaggctaaacctccccaggctccaaggagcactggggccaaacagtaccaaaggagagcatcacccgttaaccaggccccctgcttagaagagtagcacagaccgggcgctgtggctcacacctataatcccagcactttgggaggccgacgccagtggatcacgaggtcaggagtttgagaccagcctgaccaacatggtgaaaccctgcctcttctaaaaatacaaaaattagccgggcgtggtggtgagcgcctgtaataccagctactcaggaggctgaggcaggagaattgcttgaatctgggaggcggagattgcagtgagctgagattgcaccacggcactccagcctggcgacagagcgagactgtgtctcaaaacaaaaacaaaaacaaaaaaaaaccctgcagttgcttccatgtttaggcgctgcccaccaagggtcccaagttggaaaggaaggaggagagaggcagagagagagagagagagagagaagcgcgagagcggccctgtaattgagcagaaaggaaagggagaaaaatgaatcccaaactttgggcttacctctttctgctggctggctcgccaaaatatgttaacggtagaggatgtccaggttcttggcatcttgaacaaacaattggacaaaatgcacaaacaaagcaagaaaggaatgaaggattttattgaaaatgaaagtacactccacagtgtgggagcgagcatgagcataggggctcaaaggccctgttacagagtttttgtgagtttaaataccctctacttggggtacaccctatgtaaatgaagaggatgaagtaaagttacagttacaaagttattaatggcgggcatacgccctatggagaggatatttcccgttataactgaagtgtgaattggccttatgttccctgtctctagaccctattctcctgcttcctgtgaaagcagagggttttgtttgttttttgctttttgttttttgagacggagtcttgctctgttgcccaggctggagtgcagtggtgcactcggctcactgcaacttccgccttcccgggttcaagcgattctcctggctcagcctccggagtagctaggactacaggcgcgtgtcaccatgtcccagctaatctttctttatttttagtagagacgtgttagccaggtttcaccgtgttaccgtgttaccgtattccagccgggctccgcccctggattcggtggacagaccagctttacctccagagactccccctgtcttccctgcaccggctgactatacctacacacttcggtggcacaatctttgtttagatatgctgatgccttccttcgctgggaacggtccagtcctgcccgcctggcgctcagctctgcggatctcaggggatggagtggcaatctcattgctcccgcctctcctgacccctctcgccttctcctcgagacccgggttaagtgggcagagggctccgagggtcctctcccgccgtgggattgcacagagggctgggtccgcaggctggctaaaaggacctagcccaggattgcgaggcagcgccctccctgcagctggacagactcgggcgcccggcccaaagcccggcaggggcgtgtccgcgcgctcacctgctattggccaggtggggctgtcggctgccagcagtgcttatgytttaagtgcggagcgggtggctgcggagccaggcgcggcgcaggatggtggacagcgtgtaccggacccgctccctgggggtggcggccgaagggctcccggaccagtacgcggacggggaggcggcgcgcgtgtggcagctgtatatcggagacacccgcagccgcaccgccgagtacaaggcatggctgcytgggctgctgcgccagcacggctgccagcgggtgctcgacgtagcctgtggcactgggtgagcccaggccggggccgggggcgttgcatgagatcggrgtctgkctcagcctgtactgcgcggccgcagaaccacagggccgggcacgtcagggcggcctttgccaatcctggaacgggtgggacaccagggccaggagcaggtacctgcccggcagaacaggcactgcgagtgccccgtgaggctaggggtccaggtagcggttcgcagggagaggccccggagaagggagactgagtgtgagtgagggtgtgggcagaaaaagtgagcgtccctgaggctttggagccagagccacggacagattgcaaatattcctcctgtgatggccttgggcagtgttaacagttaacattgctcaacatttgcacctgccaagcccagtgccaggagcttttgatacatcactttttcaaaccctcacaaagccccatgaagttaagcagtgatattctctcatttactactggggaagtaaggcctcagcaaagtaaaattccctcatacatcatccagtgaaaaggagctaacaggcccgggttggttaagatctgtcctgtgctctatttttctcttttttttttttttgagatgaagtcgtgctctgtcgcccaggctggagtgcagtggctccatctcggctcactgcaagctccgcctcctgagttcatgccattctcctgcctcagcctcccgagtagctgggactacaggcgcctgccaccacgcccagctaatattttgtatttttagtagagacggggtttcgccgtgttagccaggatggtctcgatctcctgaccttgtgatccgcccacctcggcctcccaaagtgctgggattacaggcatgagccaccgcgcccggctttgtcctgtgctctaaaccaccatgttctactgccttttgtgcacacgtattttaacttcaaggagcctcagcttgtctgtctctcaaatgggaatgacactatttacctctcaggattgccatgagaattaatgcatatttgtagagtgcctggctctgaagaggtgcttttaaaaaaaagttgccttgtggtgacaggaaacagatttgtgaggtcagtggagagggcctggggagaggaggcagaagaacggactctgagaagtagagacaaaagtgtccagtgcagggtctcctcctggccctcccaggctcccctaactgcctctctctgcctctcctcgctggccgtactcagggtggactccattatgctggtggaagagggcttcagtgtgacgagtgtggatgccagtgacaagatgctgaagtatgcacttaaggagcgctggaaccggcggcacgagcccgccttcgacaagtggggtatgcaggtctagccaggctcccccagcccagtcaccaggaacactgttcattctgcctggggctcctttaagtgggggcgggggtggagtgttgtgttttcctcggggagacagaaaaattactgtcatttctctgaaaagcaagtcttaagctccagaatgagacaccgggtgtgaagagctggttttaactgtgtttgtggcatcttgtccctcccctcaaagaaaarcccataagcacagagccctccttcccaaccagggttccttctcccttgatccctcttttctcctccccctaactgaacggggagcttgtgtgtcttaagaagaaacccaggcaggactgcacttggtggaggtggctgctactggtaccrtcgtgcctccctgattcctctttctcttcctgacccctagtcatcgaagaagccaactggatgactctggacaaagatgtgccccagtcagcagagggtggctttgatgctgtcatctgccttggaaacagtttcgctcacttgccagactgcaaaggtaagagagggtgtggccttgggcatggcccccgccttgaggcccccttccacagacatctggcacctgctctcctgccaaagcagactctctgccttggctctggcacccctggggaggggagagatgggagggagactggtgctgggggccctgagcagatggagtctttctgcccgtgcctggagctcaggggaccagagtgagcaccggctggcgctgaaaaacattgcgagcatggtgcgggcagggggcctactggtcattgatmatcgcaactacgaccacatcctcagtacaggctgtgcacccccagggaagaacatctactataaggtggggccctctggggtgggggtgggggtgggggtgggggtggggtagagggaaggtccagtggccccaaggtgggttacagaggctaatgccggctgccccaccacctacagagtgacttgaccaaggacgtcacaacatcagtgctgatagtgaacaacaaggcccacatggtgaccctggactatacggtgcaggtgccgggggctggccaggatggctctcctggcttgaggtaccacttggcttagtgggggtgaggyggtagttgrgggagctgaggtcaccagtcctcatggttgctggggsctctgttacagtaagttccggctctcctactacccacactgtctggcatccttcacggagctgctccaagcagccttcggaggtaagtgccagcacagcgtcctgggcgacttcaagccttacaagccaggccaaacctacattccctgctacttcatccacgtgctcaagaggacagactgagtgtggcctcagctcccacaagcctctgcccaggcactgctaggctctgtctggaagatggggaccagcagccccacaccagggccagcctctagagcagactacagctggggtgcagggatgtgggttccacagacggaagggtaaacaatatagtctttttcagttcctgcatgcattgtgwttatgtcagaaggatcaggctcccatgctgcccacccccccaccctctcccagggcttactcctcccacaaccctgctctttctcactccaacctttcatgccacaacaccagtagggggcrggacatgctttattttcagccacagaactagccctctcagggcccaatccccaraacccaaggccctggccctcttcctgagtagatgggcctttctcttaragccrgcctggaaggaggggcaagtaggcaggagatatctcttgagctgttgctgctgtctcaatgccactttgcaccctgggatctcctggagggaggtggcctccaggtgggttggcagcagcctgaggaggagcccttccttcccagatctctctgtgggctatcaaggtacctgcagccatgctgagcggggtcccaraccctggggggctcctagcaggcagcaaacttgcgctggatgcgcttgtaccggagcagctcctgctcactgactgagggttgcagccgggcggcagcctgcagcaagtcctccatggtgagcatcagtgctgagctacctkgytccagccctggagatgacaaggtggggaggctgtggtctatgcccaggcaggggagagccctgcgaaggtggcttcctgctcagggtctcctagatgtcaatgatcttccctctggaatccaggactaggtttgtctcccactagttttttttttcccttaaacattttttttagagttggggtctctctgtgttgcccaggctggcctcaaactcctgggctcaagcgatcctcccacctcagcctctcaagtagctgggactcaggtgcacccagctccccactagctttttggttgacctctcagaccggcaagtggctcaccttcctccaggtcatgaaccctgcgtttgagggcagctgtcatagcatcagagcagagagagtagaggtccgcgcccgtcagctggggagggcagcaatctagcacgtttaccaggctcacagatggctctagcttgaatctgttgtgggatacaggaagaaacagagttggcatcacctcctcccttgaaagccagtgctgaccagctcatcctgcatgttgcatgcatcccctaagcatcccaaggcccaagcccttcgcagtcttcctctaacagagcatacttgcgtgtgatggcacttagaacgcgtagctgggaggcccggtcctcatttgcccccacaaacaccagcttgtcaaatctttagggagataggcaggtataagtttcagggagcccagccatgaggggtgaaggaggcacaaaatgagggtggagatgagcagtacaaggggcccacctgccaggccgcagaagggcagggtccaggagatctggtctgttggtggctccaatcacaaacacatcctgagtgctgtgcagcccatctagctcggcaaggagctgagacaccaccctggagagaagggagcaagggcaagagtccttggtgtcccccttagactctgcccctgcctgtggtacctctctttacaggcagtctcaacagggccctccactcagctgtgcccaatgtgccccaccaggtaggcccccattctcctcagtggaccctgcccaatttcatggcccctttcagcttccattatattatctcagaactgaaacagcaggaacttctatctctggactctgaagactgctgtgagctttctcatatccttcccaccctggacccctcagctttcattcccactcagacccctacctgtccatcactcctccagaatctccacttcgcccccggcttggggccaaagagtccagttcatcaaagaagataatgcatggagctgcagccctggccctggcaaacactgaagagagagaggggcccacaggagggcaaagctcggcttgtggggggttgaagttaggtgagagcagggagggaaactggggcctgacaatacagcactggcatcccaggtactagacccagctgggcaggaacctgacttgtagaaaggaggattaggaatgatcatgagtagcctgggagtagggggtggcttgggggccatcggggtttgggaagcatgggacgccctgcccctccctgctcactcaccttcccgcacattctcctcactttggcccacatacatgttaatgagctctggccccttcacgctgagtgagaggatgtgagaaggtgagagccgtcagatgcacatacacacaattgacctcttgggcagcccctcctgctccccagcctgctgcagcccctgatccacccaccatcccttccaggccccctggccacctgaggaaggtaaggctgcactcagtggctactgccttggccagaagggtcttgccggtgccagggggcccatggagcagaaggcctgagcgtctcaggcccaggctcagtagctcagggtgctccagggggagctgaatggtctccaggatctccttcttcacctcctgcagcccacccacatcatgccaggacactgaggggatctaggagatggaaagtgcgtggttgggatatgctcttggaggggctcctgtcccacctccaaggacttggtctccaccttgggggctccaacggcctgggagtgagctgtctgcagttgctccagtgcctgcccaaagtcctcagccaggagaggaaagccggcagcacacagctccccctcatcctcctcagtcaagccacctgccaaactgcaaagaggaacacagggaagcctcctcaccatcagcgtcccattcccttctcccttcctcaccacccacccatctacatccatttcctctttccgcctttctggtgcccacgtcctcttaccctgagttcttgatcctggtgcaggctgcccggctgctgtgggtcagaagggcatagagatcccctaccacaaagccctagggaaccacaggaaaggacatatgagcagggcacagtaggcaggaaccttcagggaccgtcccccagctagagcagaggccctctgttgatgccttaggtttgttgttttttttttttttttttttgagacggagttttgctcttgttgctcaggctggagtgcaatggcgcgatctcggctcaccgcaacttccacccgggttcaagcgattatcccacctcagcctcccaagtagctgggattacaggcatgtgccaccacacctggctaactttgtatttttagtagagacggggtttctccatgttggccaggctggtctcaaactcccaacctcaggtgatccgcccacctcggcctcccaaagtgctaggattacaggcgtgagccacggcgcccgcgctgggttttctactctcactcacaaggcaacaggactgagttcttgtaacaaaagccagggacctcctagggagggccagtactctcccttgatactcactgcacaccgccgtgctagctgtgccaagttcacctcctggcccaggggaaggtgggcagtgagggcccgcaggatgctgagccgctgcccctctgacagagcaggcacctcgagctcatgaggaaatgctgtctgcacatcagcaggcaggtcctgggcccggcttgtggtggccacaaccatgaggggagggcagctgcagacagaggagtgggcactgagggtgagaacatggctggcagctcctgtggactgccttgtcccaaagtcggcacagaagggcagggaagtgaggtgggtgctaggatggggtagggagatgagcatctaccccagttcctagatgggggaactgtgtttcccccatcacattgagggcagaggctttttctttaaccgagtgttccccaagaaatgctagaccacagactcctccctctggatccctctaaagacacggagctcagggctgtctagagggcagccaaatggatgggagatgactgagaagccactgaggggtgagagaagggaggactgaaaggctgaaaagtaggagggctggcccccccgctcccccttttttttttttttttaagactgagtcttgctcttgtcgcccaggctggagtgcaatggtatgattttggctcactgcaacctccgcctcctgggctcaagtgattctcctgcctcagcctcccaagtagcctggattacaggcacccgccaccacacccagctaatttttgtatttttagtagagacagggtttcaccatgttggccaggctggtcttgaactcctgatcaaggcaggtgatccacctgcctcggcctcccaatgtgctgggattataagtgtgagccaccgcgcccagccggcccccccagctttgagaggcccagctctgtataagtacctgttgagggggtcctcattgaggaggaggtgacgcagcacagccatcacacgggcatcctcacccagcccatcacggtcccggcccagaaggtccacagctgtgagcaacaggactgcaggccggcaacggcgggcccgggagaagatggcctgcagttttgtctccacagccccactactttctgcacagaggctggagcagggcacctggggaggggatcccaatgggtctgtgagcaaggggaaagcatgacaagggcaggagaatcaggggaggaggaggtggaagatgtgggccatctttttctctggagggcagggacagggaaggtaccctggccaagtcctacctcttttttaccctatcccattccctggactgtccaccaatatcttgcaactccctcctccttgaaagtacctctccatagctcagcatcatgggaatatgcctgacccactgggctgaagtgctagggcctgtgagtagacagaggagggaggggagaggaagcagcagagagggagaacatgagctggggaggggaagtagctggggttctactctccagagaccctcaccttcagtaagtggagcccaaggtgactacaggcagcagcaactactgtggtcttcccacagcctggggggccccgtagaaggacactgctagttcctgtcagcagggcacccctgcaaccagagaacagacattcgtctccttcattttgcccaaacattagagtccccagtaacacaagatcccttagatctagaaagcagataccctgtttttctctccttgagcctccctgaccccaggacagggctgtccccatgtagtgaggctgtgtctcccacaccacctgtggtgctctggccggggcatccagcatatccaacagccaaagactaattaattccctttggcattgctgtgctgccaataaaacctcaacgttatgactggtctgaatggtattgagagacattgtggtggcactgaggtggggatctgcgtccacacctgggccactggtatgaggagttgtgtccttcagggccagggcagtaaagtgcaggatggccagtgagttccccaaggggaagggcagtctcagaaacagatgcccctgctggagattcttcctccagagccagccctggaggacagaggttatcccaggaaaggagcctgggaattggcttacagaaaggagtggcctggtggccttgtgtaggacatactggtttgaggaaggtcctcccaatcccactctggccagttcattaggaactacccatctggctgctgctcctccagggatgttctaagcaggcttttctcacaccctggggtgatgacctcactcaccctggctggaggcgaggcttcaggacagcacagagttcagacaccaaggcctccaggcctggaggagacaaactgctccagagagtggattcctctgaagggagccatggaacagggctcagggtagaacccacctgtgaaaggtaataaaaagctttcgtttctaaaaatcgtttctaccccctgcgctggtctacacccatccttggggcctcaccatgtacaaggaggtatgggtggtgtcggccaagtaggcactggctggtccatctggagcttccccaactgttttcttcactttaaaaaacatttcccgccacctgcaggaaaaaggcccaatgaaccccagatccagagtccaaaaacccccctcctcaaggacaaggtttctcaatcacagaggacaaacaaaagcaccacaagagcgtgtcccgagtcatggtggggaaaaggaatgcagatggactttctcatcttcctgacagaccatacacaccttgagggcaagagctatgcctgtccctctgcatcccccatgacagccatgagagctctgagggggtgtgtttctccaggcatgtggcctacccacccacaccaatgggagaagctgctgctgcactaagcagtggatcatctgattacttctactggcttcggtctccccctcaaatacacagccatccaggccccaaaaaccctagggggaagggtcccttggctcttactcaataatccacaaaatctcattgcaggcggagtccttaataatgccatctgatgaataatggttctgtattctggctgc

SEQ ID NO: 93788 - DNA, 29107 bp, Homo sapiens
gggtggaggagagagaaagcagcgctgttctaggtcaggggcttggcatggaaagagaaggggccgtaggggactgcggggcggctgtcccaggcgggtaggaagaggagacaaggggctgctcagggcggggcgagggggcaattctggaggaaggtgcagtttcagatgaggggctgcccaaaccgaagggggatcggggccaggggtgatgggggggacagaaaaagcaggacagtgacctgggaatggggcagatctggaagaaggaggttaccctgggccgggggtaagagaagggaagaagggagggaggtgtatgtggggggagtctctccggggcaaggtgggggagctgtcctagctgcggcacaagctgggggtgctgccagccgcgggggcggagggctggccccaggagtcctgcgggggctggacgggagggtcagtctggggctgtcccgggcctggctccggcccctcccagagctccgcgcaggctccaaggcggcggtgggggaaaaaggccacgctcaccttctcctttttcagtttatagggcatctcggcccgtccggacccggcccgtctcctgcggccccgctccggctccggctttgctcggccgcactcggcccgctcggcgtctcttcgccaccgcctgcgcgctgcgcccgggtcgagcggtgcctgcgcctccaattggcccgaactcctacaaaactgcctgacaaccaggcgccgcctcctcggattggtcattggagccaagctgcttcctttttttcttattggaaagaaatagtacaaaccgccagggttcggcttccagaattggctgaagtgggtggtcccgccctaaagtgggtcgagcttagagaaggaggcggggataaggggaaacccaagcttggctaggagggctgcactccagcgtctgctgtgcgtcggcctcggccattcttcgcggcgcttggagccctgctctttccttctaaaggctctcacactttgcccgctctgctaccctgtccagtcggaattggaggaaggaagccctaatacggagggcacctttcttcactggggtaaagtagccctaattgcagatgcaaaattgatggagggagctcccaaggaccttccaagacacccgcctccctagacaggggttgcagaggagcaaaggggaagcctggcagggctaggacctgggcgaaatgagtggagaatccctggcttggtgcaactttaggaagagggtccccgttgctactgcaagtgtactgggattggggaaccagctagatttgagcagttgggaacgcagtggaaaagcaacttcattgttgactgtctcaggaaatccatcccttacttgccaccctgctcaagtccgtgttctaatgggtaagactcagtttatgcccacaaagagttcgcagtctggtgaatcacagatgtgtataaacaaaggattaagagagaatgtaaaccaggcaggcacggtgtctcacgcctgtaatcccaacactttgggaggctgaggcaggaggatcacctgaggtcagaggttcgagaccagcctggccaacatggcgaaaccccgtctctattaaaaatacaaaaattagctgggtgtggtggtgcacgcctgtaatcccagctactcgggaggctgaggcaggagaatcacttgaacccgggagacggaggttgcagtgagccgagatcacaccactgcactccagcctgggcgacagagcaagactctgtctcaaaacagcaacaatgacgacaaaaagaataaacctgtggccaggctcggtggctcacgcctgtagtcccaacactttgggagaccaaagtgggcagatcacgaggtcaggagtttgagaccagcctgaccatagtggtgaaaccccatttctactaaaaatacaaaaattagacagggtgcggtggctcacgcctgtaatcccagcactttgggaggccgaggtgggcggatcacgagtcaagagatcgaggccatcccggccaacatggtgaaaccatgcctctatgaaaaatacaaaaattagcggggcgtggtggcgcgcgcctgtagtcccagctactcgggagactgaagcaggagaatcacttgaacccggtaggaggctgaggcaggagaattacttgaccccggtaggtggaggttgcagtgagccgagatcatgccactgcgctccagcctgggcgacagagcaagactccgtctacaaaaaaaaaagaagaaacctgtgatgcaaaggcatgagaatgatacaatggaggccgggcgcggtggctcacgcccgtaatcccagcactttaggaggccgaggcgggcggatcacgaggtcaggagatcgagaccatcctggataacacgatgaaaccccgtctctactaaaataatacaaaaaaatagccgggcgtggtggcaggcgcctgtagtcccagctacccgggaggctgaggcaggagaatggcgtgaacccgggaggcagaggttgcagtgagcctagatcatgccactgcactccagcctgggcgacagagcaagactccgtctcaaaaaaaaaaaaaatactacacattgggtacagtatacactgcttgggtgatggctgcatcaaaatctcataaatcaccactaaagaacttattcatgtacaaaaaataaatttttaaaattctatataaaataaaatatttagtcttaaaaaaaaaaaaggtcaggcgcagtggctcacgcctgtaatcccagcactttgggagactgaggagggcggatcacctgaggtcaggagttcaggaccagcctggccaacatggcaaaaccccgtctctacaaaaatacaaaaattagccaggcatgacggtgggtgcctgtaatcccagctactcaggaggctgaggcaggataatccattgaacccgggaggtggagtttgcagtgagccgagatcgcaccattgcattccagcctgggcgacagggcaagactccatctgaaaaaaaaaaaaaaaaacacaaaacctgtgtcccttacccaggtacccaggagagcaatgttacaagacagtggccgtggggatggagaagagaggatggagcatgaaaatgtgtagaatcaacaggatatggtgattcattgtattgtgggggggacggtaacggaaagggaagagttgaggatgatttctggaagtgatcagagttgtaggaggacaactggtgtcataatggcaaaggaaataaaagacaattggtcagtagtgtcagagaaagaacagcatcatcttgattctgcaattagaagattatgggtgattttttcagagagtggaagaccgtttttagtgagtggaagagtgagcatcaagaggtgaggaagtgaagatggcaaatgtagggtcctggcgatcttacagaagtagtatttggctttcggtgactaatgacgatttcagggtaacacaaagtggactacatgcccgctgttacctgctgggagaaaagcttgggagaaaaggacatttatttgtgggtgggtatttgtgtctgtatgagtgctgatccaggcaagataactgatgtttttacccatctccaaggcctcaaggagcactatagtcctgaggcctagagcttgcctgctactgaggaaagcaggcatatcctctttaggcccatgtaccatctatctagcccttggttcctctgggacataggggaccaagaaacatatagtagcactaccaaatgggaactttcatccatgtgaatctaggtacctagaacattctttatttagtttttttttcttttaattttatatattttaagagacaaggtcttgctctgtcacccacttggagtgcagtggcacaatcatagcctcaaattcctgggttcaagtgatccttctgcctcagcctccccatagctgggattatagacacaagccatggttcctggttagtacattcttgcatgctattttatttatttttttctattatttatttttttgagacggaatctcactctgtcacccaggctggagtgcagtggcgcagtctcggctcactgcaagctctgtctcccggcttcacgccattctcctgcctcagcctcccgagtagctgggactacaggcacacaccaccatacccagctaatttttgtatttttagtagagacggggtttcaccatgttggccaggctggtctcaaactcctggcctcaagcagtccacccacttggcctcccaaagtgctgggattacagccatgagccactgcgcccagccccttataatatgcaaatctaatagttttcatatatttgtctttcaaattttcaggaatgtataatgtacaaaatagaagactgcctcaagaagaaaggagagatggagaaagctgagcagtagctgaaagagaatgtaaggtctagaaaatggagattggcaccatccaattcatttattgtaagtgaaaataattgttaataattggaaatgcagtgggacatgatggcttatgcctgtagtcccagcactttgggaggctgaggcctgaggatctcttcagaccaggagtttgagaccagcctaggcaacacagagaaactctgtctctacaaaaaataaaaaattagtccaggcgcagtggctcatgcctgtaatcccagcactttgggaggcgtaagcaggtggctcacttgaagccaggagttcgagaccagcctgaccaacagggtgaaaccccgtctctactgaaaatacaacattagctgggtgtggtggcacacacctgtaatctcagctacttgggaggctggggcaggagattctttgaacctgggaagcggagattgcagtgagctgagatcgtgccattgcactctggcctgggcaacaagaccgaaactccgtctcaaaaaaaaaattggctgggtatggtggcgtgtgcctgtggtcccggctacagttactcgggaggctgaggtgggagatcacttgagcctgggacggtagaagctgcaatgaatggggatcgtgccactgtactccaacctgggtgacagagtaggaccctgttgccataaaaaaggaaatgtggcctaccactagctgagtgtcttgtacagaacagtggaggtgaagagaaggatggaatctaaataacagcacacgcaggaagtcgactgttggtgttatgctgacagaagccttgaactcctttccttctgcctgctctgctgcctgccccgctctaggatagaaagtgaatgggtttccgatctgcaaggatttggggggggggggtgaaagaaaagctgttttgtcttcaacttaagtttggtgggagtaaaacaaacagaacaatgaacagggcaagaagtcctggaacatgggttttgtgccagatgtgctggaacatgtgtggtggcaccaagcactccagggctgtatgaatcacatctagtaattcactcagcagccactatatacctataagcaagtgtgagacagttttctaatcctgctactccctcctgcaacctttcctgcaaccctcaaacctcagtgctcacagttccacaggggaagctgcaggagctccgcagaggagcggactccttccgaaacatttcacctagagctcccagtactgggcccagtcatcccgagcatgctgactgttcatttatcagtcaataaactgttacgttcatgccacggggaaaaatagttaagagaacattacttccgtagaaggcaaagataaatcccttaagcacaagttcaaatggcgcatgggtaaacgctacgcaaccgcagcgatgaaggttactgcctatcgaggcacgacgcagatcaatccgaggcgcagctaaccccctcagagcaagttcgcggcacccgacgcccctccccttttcctctggcctcccctgacggaagcggaagcggccctcgcgcacactagtcgtctggctctctggctccggaagctgcgctccttcaccctcctcgttggtgtcctgtcaccatggcgctggctgtcttgcgggtcctggagccctttccgaccgagacacccccgttggcagtgctgctgccacccgggggcccgtggccggcggcggagctgggcctggtgctggccctgaggcctgcaggggagagcccggcagggccggcgctgctggtggcagccctggaggggccggacgcgggcaccgaagagcagggtcccgggccgccgcagctactggttagccgcgcgctgctgcggctcctggcactgggctccggggcctgggtgcgggcgcgggcggtgcggcggcccccggcgctaggttgggcactgcttggcacctcgctggggcctgggctcggaccgcgagtcgggccgctgctggtgaggcgcggagagaccctcccagttcccggaccgcgggtgctggagacgcggccggcgttgcaagggctgctgggcccagggactcggctggctgtgactgagctccgcgggcgggccagactgtgtccagagtctggggacagcagtcggcccccacccccgcccgtggtgtcctcctttgcggtttctggcacagtgcggcgactccagggagttctgggagggactggagattcactaggggtgagccggagctgtctccgtggccttggcctcttccagggcgaatgggtgtgggtggcccaggccagagagtcatcgaacacttcacagccgcacttggctagggtgyaggtcctagaacctcgctgggacctctctgatagactgggacccggctctggaccgctgggagagcccctcgctgacggactggckcttgtccctgccactttggcttttaatcttggctgtgaccccctggaaatgggagagctcagaattcaggtaggataaaggactggggtcaggagtgcttcctctttcttataccctcttctctgtcttaggtaaattggaagatttaggactcgtgccccatatcatcccggactttgaacataatgtttctagccgggcgcggtgactcacgcctgtaatcccagcactttgggaggccgaggcgagcggatcacttggggtcgggagttcgagaccagcctgaccaacatggagaaaccccgtctctactaaaaaaatgtaaaattagccgggcgtggtggtgcatgcctctaatcccagctacttgggaggctgaagcaggagaatcgcttgaacctgggaggcggaggttgcggtgagccaagatcgcgccattggactccagcctgggcgataagagtgaaactctgtctcaaaaaaaaaaaaaaaaaagcataatgtttcttagcctcatttatctattttctttttctttctttcctttttttttttttttttttttttttgagatggggtcttgctctgtcacccaggctggaatgtggtgatgcgatctcggcttactgcaacctccgcctcccaggttcaagcgattctcctgtctcagcctcctactactggctcgcgccacgacgcccggctaatttttgtaatttttagtagagacggggtttcaccgtattggtcaggctggtctcgaactcctgacctcaggtgatccacccaaagtgttgggattacaggcgtgagccacctcacccggcctattgatccatattctgtaatcaaaatatcataagcctccataatgtagtggggcatacaaaaggctttcatccattcaggtgaaaggtgaagtttgggtgtggtggtgcatgcctgtaatcccagctacttgggaggctgaggcaggagaattgtttgaacctgggaggtggaggttgcagtgagcccagatcacaccactgcactccagcctggacgacagagcgaaattctgtgtaaaaaaaaaaaaaaaaaaaagtgaggtttcagatgtgtatgttaatctactcaatctaattagtttattgaattgctacaatgtattcagtattgtgctttataatatggaggatgatgtctctgtgcttttgctcattcttatccttgacttcaaattatttcctattattctagcctcatctgttaaaatcctaccctcctttccctcaagagccatctaaagatgacacctttgtcacaaagcctttcatgatctcacagccacgaatttagaacttcctcctatagcattttctatcttttttatggcatttattttattctatcttgttatgattacataatctgtttaatccccaattatatattgtaaataccttgaaggaaaggagtctttattatctttggtgcctggtgtttagttttaatattttattaaatacatccaaggaaagtttttggtttctgcctttacttcaagaagaaagttgtagaacagataatagttgttccatttccatgggttactgagtaaagactcaccagttcgccataacagacataagagtgacaaaaaaataaaccttcattgtgtaaaaaaaaaaaaggccaggcgcagtggctcatgcctgtaatcccagcactttgggaggctgagccaggcagatcacttgaggtcaggagttcgagaccagcctggcctacatggtgaaacctcatctctactaaaaatacaaaaatcagcccagtatggtggtgcacaccagtaaacccaacaactggggaggctgaagcaggagaatcgcttgaacctgggaggtggcagttgcagtgaacccagatcacaccactgcactccaacctgggygacagagcaagaytctgtctcaaaaaaagaaaaaaatgaaagttgtgtttagggggacaaatacagtatagtgtttaattaaggacctagatatatggtttagatggtgctgtccaatatggaagccaccagccactttgtggctttttaaatttttaaatttagttaaaactaaataaagtaagcctggctaacatggcgaaaccccatctctattttaaaaaatacaaaaattaaatcccagcactttgggaggccaaggcaggcagatcacaaggtcaggagattgagaccatcctggctaacacggtgaaaccccgtctctactaaaaatacaaaaaaaaaaaaaattaggtgtggtggcacatgcctgtcgtcccagctactctggaggctgaggcaggagaatcccttgaacccaggaggcggagcttgcagtgagccgagatggtgccactgcactccagcctgggtgacaagcgagastccatctcaagaaaaaaataaaacccacaaaaattagccaggcatggtggtgcacatgcctatagtcccagctactcaggaggctgaggcacaaagagaatcatttgaacccaggaggaagaggttgcaatgagccgagactgtgccactgcacttcatcatgggcgacaaagtgagactaagtctcaaaaaaaaaaaaaaaactaaatcatgttttttagttgctttagctacatttctttgtttttgttttgtttttagccacatttcaagtgctcaatagcacatgcagatatagactattccattgtagagagttctactgggcagtactagagtaaccagttaatactttgggatgtcaggtagagatacatgtgaaatacatgtgaaagggagtggatgtaggtttcctcctgaatggaggaaaaactactggggtactcaagagtagagctcattgaaccaaccaatgactgaaccaacccgttcagcttttcccacagcctgaattcagtttccccactaatgaccacttaatgttaatccctgtgggtgcctggtgtcactaataggtcttgtgggaataaatgtctttaccatttcactggctctgggccaagttgaaagtgtcacagaaaggttatytttactgagaaaattttttggagccagagtcgggataggaggtgatattctcttcctggtacccattagagggagaggttttcaggtctgctacctcaggccccaccttccacaagccttgtggttatgggaaagacaggatggaaatagacatgttggctgctgagagacaggttagagcctgcccccttaggagaaggttataacgtggtggttatttctctaayagaggtacttggaaggctccatcgcccctgaagacaaaggaagctgctcattgctgcctgggcctccatttgccagagagttacacatcgaaattgtgtcttctccccactacagcactaatggaaattatgacggtgttctttaccggcactttcagatacccaggttagctacctaaccttttaaggaggatagcttctcaccctcattacattcctcctatcccatgccttagaaccaagtaccccagaggccctggttaaaagaagccacatttgcggctaggtgctgtggctcacgtctgtaatcccagcactttgggaggcygaggtgggcggatcatgaggtcaggagattgagagcatcctggctaacatggtgaaaccccgtctctactaaaaatacaaaaaaaaaattagccgagtgtggtggtgggcgcctgtagtcccagctacttgggaggctgaggcaggagaatggcgtgaacccgggaggtggagcttgcagtgagccgagatcgcaccactgcactctagcctgggcgacagagcgagactccgtctcaaaaaaaaaaamaaaaaaaaaaaacammaaaaacatttcagacagattgtggtaggcgcctcttggtatatcagggagaccacagaagagaaatctgaaccatgaggttaatttggacattccaaacagagacacstgtgattaaagagggctccaaaagagccaggatcctgctctgccactcatctgtctctgatccccctttctagtctctccaccatttcccctagctcatcctaagactgacttgttccttggagaactgcgtgggatctctgggcgggcagtagactcaagaagtagtctgcatgtcgggggtggacatgtggtaatgaacacatgctcattactcccattgtgacctgaccagggccactgctgtgttgcagggtagtccaggaaggggatgttctatgtgtgccaacaattgggcaagtagagatcctggaaggaagtccagagaaactgcccaggtatgcagctgccttctgtcctacagctgggatttgtaacctgggtgcatgagttctacaatcccctccctgcaaatcatgtgtaatttgtgcccaagaggatttcgttgtcatgtattttgtgtgtgcgtgtgtgtgtgtaacaggttcttgctctgttacccaggctggagtttagtggtgcaaacacagctcactgcagcctctacctccatggctcaagtgatcctcccacctcagcactgcctctgccccagtagctgggactacaggttcgcatcaccacgcccagctattggtttttgtatttttagtagagatagggtttcgccatgttgaccaggctgggctcgaactcttgagctcaagtgatctgcctgccttggcctcccaaagtgctgagattacaggtgtgcrccactcacccccagcctgtgtacatttttttggagagaaaattcacctgtccttcagttcccaaacaagtgtatgactgaagaaaggttaagaaccagtcaggcatggtagtgcatacttataatcccagctactcaggaggctgggcaatatagctagacactgtctcaaaaaacaagcaaactaaaagaaccactccctgctggctttgggaggtgtttatcctcaaactgactggtggccctatgtaaagcaaagcactaagaagagtttaggccaggtgtggtggctcacgactgtaatcccagcactttgggaggctgaggcaggcagatcacttgaggtcaggaattcaagaccagcctggccaatatggtgaaaccctgtctctactaaaaatacaaaaattagccgggtgtgatggtgggcatctgtaatcccagctactcaggaggctgaggcgggagaatcacttggacctgggaggcagaggttgcagtgagcccagatcgcgtcactgctctccagcctgggtgacacagcaagactccatctcaaaaaataaataaataggtaaaatttaaattcttttctttttaaagaagagtttaatggcctagaccaagacgggattccttcctttccgttctyagccttcgtgttatttggaccaagacttgggccataccatccatatctcaacgtaaggatatacaggctctgatttctgccttaactacggagtgtgcacaaactacttctcaatcctatctctgaaaacaggagagggatttctctttttttttttttttttttgagacagagtcttgctttgttgcccaggctggagtgcagtggcgcaatcttggctcactgcaagctccgcctcccgggttcatgccattctcctgcctcagcctcccaagtagctgggactacaggtgcccaccaccacgccyggctaattttttgtatttttagtagagattgggtttcaccgtgttaaccaggatggtctcgatctcctgaccttgtgatccgcccgcctcggcctcccaaagtgctgggattacaggcgtgagccaccgyacccagccagggatttctattgtttttgagagggctaccctgtcctatcaacagagaatgagaaatagagcataaccgagccaagaacccaaaataaggaatccagcttttctcctcttgttgactctgaccacagaggttccatgtaaaatggtgaggcaaagaattgagacactgctttagccttatgtgtagggaggaaaatgtatagctctgtatcccagcattccctgtattctggactcatttcctgcagcagtttactagaaggagagcacagctgatagatgcactaactcatacataagagccttcatgtccaaggtctgtggcatagccagcctgggtcctctgccaggagagacagtccttgtttggagtgcctgattcatccctggtcaatatccagtgcttggttctggccagtgctcagtacccccagtctcagggtggtggtgctctgtggaaccccatttaggctccatgtcacctcttcgaggttttccagattaagtccacgagtctggtggaaaatgccaggctggcacttagcagtcacttcccacctctctctcctatcataaatttagcaaacgtctttgagctagctttcagtaggaaaactacagaatgcccactctttgtactttcaaaggaaaataggcactagaacctcatgagacaggctggcaagccagttctgttcctgaacttctattgtctcaactctgtagaaccctgctttcctcctgagtgccgagcacatagttcttttccccgcaaggaaagcagggttggagtaagtggcccaatgggtccaaggacagatacagatgagcgttttaagctgcactgggcttgagaagggaagccctgcagaagttcctgtgagccctggaaaggaattccactgttggtgtagcctcttcatcctgtccctggtgctccacttccccaaaccaggctgcatgggagccagctccactatcacctatctggctggctggagcacagctcagtgttccttagcagtgtccacataggttccagagctctggcctttctattcactgaggtggtccaaccaccctccactgaagaaggtggtctctccctatgccacagtgctgtcccccatctcattcctatgcagggcttccatggtgagtcatacacaccatgactcagctgttgagcttgatcgagatcctaggttagaggcccactgtcacctatttataattaattataggcagattcaggcttcctgatgttccaggtttactgtagtacttagaagagtttcataatactaacctggtatgcttcccctccaccttgctgcactctcacacccctttgctgctagagagagcagctttgagactgtggggcagtgtgagcagaggaatttgcagcctgattggaccttaaagaggactaggttatagcctgactctgtcattgccttgctgcctgaggattaaagagggaagtagttcatgatttctttatctggaaaattgggttagtagctgttcctgctacccatcctattccccgttagtaggttgaataaccctaactcactatgacactcgccaactactgcrcagccctggttatgcatcagaattgctggggaagctttcaaaaaatacaggtgcctaagccccaccccagatctattggggcagaatcagggtgagactggagcctgtgctttttttccttcacaaaggaaggagaaaggttaattttaaaaacataaaattcacacaccataaaaccatacttttaaagtatacaattcaatttttttattcataaggttgtacagccaacatcactgtttmattccagaacattttcaacatctcaaaaagaaactctgcacccattagcagtcattccctgtagcttccctcataggcaatggcaactgctgatctgctgaatagaatcatataatatgtgagaaatgtttagtttttaaagytacacagataattccaatgtgcagccagaatacagaaccattattcatcagatggcattattaaggactccgcctgcaatgagattttgtggattattgagtaagagccaagggacccttccccctagggtttttggggcctggatggctgtgtatttgagggggagaccgaagccagtagaagtaatcagatgatccactgcttagtgcagcagcagcttctcccattggtgtgggtgggtaggccacatgcctggagaaacacaccccctcagagctctcatggctgtcatgggggatgcagagggacaggcatagctcttgccctcaaggtgtgtatggtctgtcaggaagatgagaaagtccatctgcattccttttccccaccatgactcgggacacgctcttgtggtgcttttgtttgtcctctgtgattgagaaaccttgtccttgaggaggggggtttttggactctggatctgggrttcattgggcctttttcctgcaggtggcgggaaatgttttttaaagtgaagaaaacagttggggaagctccagatggaccagccagtgcctacttggccgacaccacccatacctccttgtacatggtgaggccccaaggatgggtgtagaccagcgcagrgggtagaaacgatttttagaaacgaaagctttttattacctttcacaggtgggttctaccctgagccctgttccatggctcccttcagaggaatccactctctggagcagtttgtctcctccaggcctggaggccttggtgtctgaactctgtgctgtcctgaagcctcgcctccagccagggtgagtgaggtcatcaccccagggtgtgagaaaagcctgcttagaacatccctggaggagcagcagccagatgggtagttcctaatgaactggccagagtgggattgggaggaccttcctcaaaccagtatgtcctacacaaggccaccaggccactcctttctgtaagccaattcccaggctcctttcctgggataacctctgtcctccagggctggctctggaggaakaatctccagcaggggcatctgtttctgagactgcccttccccttggggarctcactggccatcctgcactttactgccctggccctgaaggacacaactcctcataccagtggcccaggtgtggacgcagatccccacctcagtgccaccacaatgtctctcaataccattcagaccagtcataacgttgaggttttattggcagcacagcaatgccaaagggaattaattagtctttggctgttggatatgctggatgccccggccagagcaccrcaggtggtgtgggagacacagcctcactacatggggacagccctgtcctggggtcagggaggctcaaggagagaaaaacagggtatctgctttctagatctaagggatcttgtgttactggggactctaatgtttgggcaaaatgaaggagacgaatgtctgttctctggttgcaggggtgccctgctgacaggaactagcagtgtccttctacggggccccccaggctgtgggaagaccacagtagttgctgctgcctgtagtcaccttgggctccacttactgaaggtgagggtctctggagagtagaaccccagctacttcccctccccagctcatgttctccctctctgctgcttcctctcccctccctcctctgtctactcacaggccctagcacttcagcccagtgggtcaggcatattcccatgatgctgagctatggagaggtactttcaaggaggagggagttgcaagatattggtggacagtccagggaatgggatagggtaaaaaagaggtaggacttggccagggtaccttccctgtccctgccctccagagaaaaagatggcccacatcttccacctcctcctcccctgattctcctgcccttgtcatgctttccccttgctcacagacccattgggatcccctccccaggtgccctgctccagcctctgtgcagaaagtagtggggctgtggagacaaaactgcaggccatcttctcccgggcccgccgttgccggcctgcagtcctgttgctcacagctgtggaccttctgggccgggaccgtgatgggctgggtgaggatgcccgtgtgatggctgtgctgcgtcacctcctcctcaatgaggamcccctcaacaggtacttatacagagctgggcctctcaaagytgggggggccggctgggcgcggtggctcacacttataatcccagcacattgggaggcygaggcaggtggatcacctgccttgatcaggagttcaagaccagcctggccaacatggtgaaaccctgtctctactaaaaatacaaaaattagctgggtgtggtggcgggtgcctgtaatccaggctacttgggaggctgaggcaggagaatcacttgagcccaggaggcggaggttgcagtgagccaaaatcataccattgcactccagcctgggcgacaagagcaagactcagtcttaaaaaaaaaaaaaaaagggggagcgggggggccagccctcctacttttcagcctttcagtcctcccttctctcacccctcagtggcttctcagtcatctcccatccatttggctgccctctagacagccctgagctccgtgtctttagagggatccagagggaggagtctgtggtctagcatttcttggggaacactcggttaaagaaaaagcctctgccctcaatgtgatgggggaaacacagttcccccatctaggaactggggtagatgctcatctccctaccccatcctagcacccacctcacttccctgcccttctgtgccgactttgggacaaggcagtccacaggagctgccagccatgttctcaccctcagtgcccactcctctgtctgcagctgccctcccctcatggttgtggccaccacaagccgggcccaggacctgcctgctgatgtgcagacagcatttcctcatgagctcgaggtgcctgctctgtcagaggggcagcrgctcagcatcctgcgggccctcactgcccaccttcccctgggccaggaggtgaacttggcacagctagcacggcggtgtgcagtgagtatcaagggagagtactggccctccctaggaggtccctggcttttgttacaagaactcagtcctgttgccttgtgagtgagagtagaaaacccagcgcgggcgccgtggctcacgcctgtaatcctagcactttgggaggccgaggtgggcggatcacctgaggttgggagtttgagaccagcctggccaacatggagaaaccccgtctctactaaaaatacaaagttagccaggtgtggtggcacatgcctgtaatcccagctacttgggaggctgaggtgggataatcgcttgaacccgggtggaagttgcggtgagccgagatcgcgccattgcactccagcctgagcaacaagagcaaaactccgtctcaaaaaaaaaaaaaaaaaaaacaacaaacctaaggcatcaacagagggcctctgctctagctgggggacggtccctgaaggttcctgcctactgtgccctgctcatrtgtcctttcctgtggttccctagggctttgtggtaggggatctctatgcccttctgacccacagcagccgggcagcctgcaccaggatcaagaactcagggtaagaggacgtgggcaccrgaaaggcggaaagaggaaatggatgtagatgggtgggtggtgaggaagggagaagggaatgggacgctgatggtgaggaggcttccctgtgttcctctttgcagtttggcaggtggcttgactgaggaggatgagggggagctgtgtgctgccggctttcctctcctggctgaggactttgggcaggcactggagcaactgcagacagctcactcccaggccgttggagcccccaaggtggagaccaagtccttggaggtgggacaggagcccctccaagagcatatcccaaccacgcactttccatctcctagatcccctcagtgtcctggcatgatgtgggtgggctgcaggaggtgaagaaggagatcctggagaccattcagctccccctggagcaccctgagctactgagcctgggcctgagacgctcaggccttctgctccatgggccccctggcaccggcaagacccttctggccaaggcagtagccactgagtgcagccttaccttcctcaggtggccagggggcctggaagggatggtgggtggatcaggggctgcagcaggctggggagcaggaggggctgcccaagaggtcaattgtgtgtatgtgcatctgacggytctcaccttctcacatcctctcactcagcgtgaaggggccagagctcattaacatgtatgtgggccaaagtgaggagaatgtgcgggaaggtgagtgagcagggaggggcagggcgtcccatgcttcccaaaccccgatggcccccaagccaccccctactcccaggctactcatgatcattcctaatcctcctttctacaagtcaggttcctgcccagctgggtctagtacctgggatgccagtgctgtattgtcaggccccagtttccctccctgctctcacctaacttcaaccccccacaagccgagctttgccctcctgtgggcccctctctctcttcagtrtttgccagggccagggctgcagctccatgcattatcttctttgatgaactggactctttggycccaagcygrgggcgaagtggagattctggaggagtgatggacaggtaggggtctgagtgggaatgaaagctgaggggtccagggtgggaaggatatgagaaagctcacagcagtcttcagagtccagagatagaagttcctgctgtttcagttctgagataatataatggaagctgaaaggggccatgaaattgggcagggtccactgaggagaatgggggcctacctggtggggcacattgggcacagctgagtggagggccctgttgagactgcctgtaaagagaggtaccacaggcaggggcagagtctaagggggacaccaaggactcttgcccttgctcccttctctccagggtggtgtctcagctccttgccgagctagatgggctgcacagcactcaggatgtgtttgtgattggagccaccaacagaccagatctcctggaccctgcccttctgcggcctggcaggtgggccccttgtactgctcatctccaccctcattttgtgcctccttcacccctcatggctgggctccctgaaacttatacctgcctatctccctaaagatttgacaagctggtgtttgtgggggcaaatgaggaccgggcctcccagctacgcrttctaagtgccatcacacgcaagtatgctctgttagaggaagactgcgaagggcttgggccttgggatgcttaggggatgcatgcaacatgcagratgagctggtcagcactggctttcragggaggaggtgatgccaactctgtttcttcctgtatcccacaacagattcaagctagagccatctgtgagcctggtaaacgtgctagattgctgccctccccagctgacgggcgcggacctctactctctctgctctgatgctatgacakctgccctcaaacgcagggttcatgacctggaggaaggtgagccacttgccggtctgagaggtcaaccaaaaagctagtggggagctgggtgcacctgagtcccagctacttgwgaggctgaggtgggaggatcgcttgagcccaggagtttgaggccagcctgggcaacacagagagaccccaactctaaaaaaaatgtttaagggaaaaaaaaaactagtgggagacaaacctagtcctggattccagagggaagatcattgacatctaggagaccctgagcaggaagccaccttcgcagggctctcccctgcctgggcayagaccacagcctccccaccttgtcatctccagggctggarcmaggtagctcagcactgatgctcaccatggaggacttgctgcaggctgccgcccggctgcaaccctcagtcagtgagcaggagctgctccggtacaagcgcatccagcgcaagtttgctgcctgctaggagccccccagggtytgggaccccgctcagcatggctgcaggtaccttgatagcccacagagagatctgggaaggaagggctcctcctcaggctgctgccaacccacctggaggccacctccctccaggagatcccagggtgcaaagtggcattgagacagcagcaacagctcaagagatatctcctgcctacttgcccctccttccaggcyggctytaagagaaaggcccatctactcaggaagagggccagggccttgggttytggggattgggccctgagagggctagttctgtggctgaaaataaagcatgtccygccccctactggtgttgtggcatgaaaggttggagtgagaaagagcagggttgtgggaggagtaagccctgggagagggtgggggggtgggcagcatgggagcctgatccttctgacataawcacaatgcatgcaggaactgaaaaagactatattgtttacccttccgtctgtggaacccacatccctgcaccccagctgtagtctgctctagaggctggccctggtgtggggctgctggtccccatcttccagacagagcctagcagtgcctgggcagaggcttgtgggagctgaggccacactcagtctgtcctcttgagcacgtggatgaagtagcagggaatgtaggtttggcctggcttgtaaggcttgaagtcgcccaggacgctgtgctggcacttacctccgaaggctgcttggagcagctccgtgaaggatgccagacagtgtgggtagtaggagagccggaacttactgtaacagagsccccagcaaccatgaggactggtgacctcagctcccycaactaccrcctcacccccactaagccaagtggtacctcaagccaggagagccatcctggccagcccccggcacctgcaccgtatagtccagggtcaccatgtgggccttgttgttcactatcagcactgatgttgtgacgtccttggtcaagtcactctgtaggtggtggggcagccggcattagcctctgtaacccaccttggggccactggaccttccctctaccccacccccacccccacccccacccccaccccagagggccccaccttatagtagatgttcttccctgggggtgcacagcctgtactgaggatgtggtcgtagttgcgatkatcaatgaccagtaggccccctgcccgcaccatgctcgcaatgtttttcagcgccagccggtgctcactctggtcccctgagctccaggcacgggcagaaagactccatctgctcagggcccccagcaccagtctccctcccatctctcccctccccaggggtgccagagccaaggcagagagtctgctttggcaggagagcaggtgccagatgtctgtggaagggggcctcaaggcgggggccatgcccaaggccacaccctctcttacctttgcagtctggcaagtgagcgaaactgtttccaaggcagatgacagcatcaaagccaccctctgctgactggggcacatctttgtccagagtcatccagttggcttcttcgatgactaggggtcaggaagagaaagaggaatcagggaggcacgayggtaccagtagcagccacctccaccaagtgcagtcctgcctgggtttcttcttaagacacacaagctccccgttcagttagggggaggagaaaagagggatcaagggagaaggaaccctggttgggaaggagggctctgtgcttatgggyttttctttgaggggagggacaagatgccacaaacacagttaaaaccagctcttcacacccggtgtctcattctggagcttaagacttgcttttcagagaaatgacagtaatttttctgtctccccgaggaaaacacaacactccacccccgcccccacttaaaggagccccaggcagaatgaacagtgttcctggtgactgggctgggggagcctggctagacctgcataccccacttgtcgaaggcgggctcgtgccgccggttccagcgctccttaagtgcatacttcagcatcttgtcactggcatccacactcgtcacactgaagccctcttccaccagcataatggagtccaccctgagtacggccagcgaggagaggcagagagaggcagttaggggagcctgggagggccaggaggagaccctgcactggacacttttgtctctacttctcagagtccgttcttctgcctcctctccccaggccctctccactgacctcacaaatctgtttcctgtcaccacaaggcaacttttttttaaaagcacctcttcagagccaggcactctacaaatatgcattaattctcatggcaatcctgagaggtaaatagtgtcattcccatttgagagacagacaagctgaggctccttgaagttaaaatacgtgtgcacaaaaggcagtagaacatggtggtttagagcacaggacaaagccgggcgcggtggctcatgcctgtaatcccagcactttgggaggccgaggtgggcggatcacaaggtcaggagatcgagaccatcctggctaacacggcgaaaccccgtctctactaaaaatacaaaatattagctgggcgtggtggcaggcgcctgtagtcccagctactcgggaggctgaggcaggagaatggcatgaactcaggaggcggagcttgcagtgagccgagatggagccactgcactccagcctgggcgacagagcacgacttcatctcaaaaaaaaaaaaaagagaaaaatagagcacaggacagatcttaaccaacccgggcctgttagctccttttcactggatgatgtatgagggaattttactttgctgaggccttacttccccagtagtaaatgagagaatatcactgcttaacttcatggggctttgtgagggtttgaaaaagtgatgtatcaaaagctcctggcactgggcttggcaggtgcaaatgttgagcaatgttaactgttaacactgcccaaggccatcacaggaggaatatttgcaatctgtccgtggctctggctccaaagcctcagggacgctcactttttctgcccacaccctcactcacactcagtctcccttctccggggcctctccctgcgaaccgctacctggacccctagcctcacggggcactcgcagtgcctgttctgccgggcaggtacctgctcctggccctggtgtcccacccgttccaggattggcaaaggccgccctgacgtgcccggccctgtggttctgcggccgcgcagtacaggctgagacagaccccgatctcatgcaacgcccccggccccggcctgggctcacccagtgccacaggctacgtcgagcacccgctggcagccgtgctggcgcagcagcccargcagccatgccttgtactcggcggtgcggctgcgggtgtctccgatatacagctgccacacgcgcgccgcctccccgtccgcgtactggtccgggagcccttcggccgccacccccagggagcgggtccggtacacgctgtccaccatcctgcgccgcgcctggctccgcagccacccgctccgcacttaaaacataagcactgctggcagccgacagccccacctggccaatagcaggtgagcgcgcggacacgcccctgccgggctttgggccgggcgcccgagtctgtccagctgcagggagggcgctgcctcgcaatcctgggctaggtccttttagccagcctgcggacccagccctctgtgcaatcccacggcgggagaggaccctcggagccctctgcccacttaacccgggtctcgaggagaaggcgagaggggtcaggagaggcgggagcaatgagattgccactccatcccctgagatccgcagagctgagcgccaggcgggcaggactggaccgttcccagcgaaggaaggcatcagcatatctaaacaaagattgtgccaccgaagtgtgtaggtatagtcagccggtgcagggaagacagggggagtctctggaggtaaagctggtctgtccaccgaatccaggggcggagcccggctggaatacggtaacacggtaacacggtgaaacctggctaacacgtctctactaaaaataaagaaagattagctgggacatggtgacacgcgcctgtagtcctagctactccggaggctgagccaggagaatcgcttgaacccgggaaggcggaagttgcagtgagccgagtgcaccactgcactccagcctgggcaacagagcaagactccgtctcaaaaaacaaaaagcaaaaaacaaacaaaaccctctgctttcacaggaagcaggagaatagggtctagagacagggaacataaggccaattcacacttcagttataacgggaaatatcctctccatagggcgtatgcccgccattaataactttgtaactgtaactttacttcatcctcttcatttacatagggtgtaccccaagtagagggtatttaaactcacaaaaactctgtaacagggcctttgagcccctatgctcatgctcgctcccacactgtggagtgtactttcattttcaataaaatccttcattcctttcttgctttgtttgtgcattttgtccaattgtttgttcaagatgccaagaacctggacatcctctaccgttaacatattttggcgagccagccagcagaaagaggtaagcccaaagtttgggattcatttttctccctttcctttctgctcaattacagggccgctctcgcgcttctctctctctctctctctctctgcctctctcctccttcctttccaacttgggacccttggtgggcagcgcctaaacatggaagcaactgcagggtttttttttgtttttgtttttgttttgagacacagtctcgctctgtcgccaggctggagtgccgtggtgcaatctcagctcactgcaatctccgcctcccagattcaagcaattctcctgcctcagcctcctgagtagctggtattacaggcgctcaccaccacgcccggctaatttttgtatttttagaagaggcagggtttcaccatgttggtcaggctggtctcaaactcctgacctcgtgatccactggcgtcggcctcccaaagtgctgggattataggtgtgagccacagcgcccggtctgtgctactcttctaagcagggggcctggttaacgggtgatgctctcctttggtactgtttggccccagtgctccttggagcctggggaggtttagcctttaaaaatcaaactgtccagcactttaggaagccaagacaggtggatcacgtggtcaggagttcaagatcagcctggccaagatgctaaaaccctgtctctactaaaaatacaaaaattagccaggcatggtggcacgtgcctgtaatcccagctacttgggaggctaagccaggagaatcgcttgaacccgggtggcagaggttgcagtgagccaagattgcgccactgcactccagcctgggcgacagagcaagactccgtctcaaaacaaaaatcaatcaatcaaactactttggccgggcacggtggctcacacctataatcccaacactttgggaggctgaggcaggcagatcaactgaggttgagagttcaagactagcctgaccaacatggagaagccccgtctctactaaaaatacaaaattagccgggcatggtggtgcatgcctgtaatcccagctacttgggaggctgaggcaggagaatcgcttgaatctgggaggcggaggttgcgatgagccaagattgcgctattgcactccagcctgggcaacaagagagaaactctgtctcaaaaaataaataaatataaataaaaataaaactgccatggagactgctttacccaaaattttggttcacagccttccctgcattatccattagggcaaagtaaaaccttcaagcttgtactgccatctcatggctaacgttccaggtcatcgtttatgtgtgcgtatacatgtctagatgtatttacttatatgtacacttactgctatatgttgtgtctaccaaattgacttataagtaaaagagggctcggccaggcgcagtggctcacgcctgtaatcccaatacttggggaggctgaggtggatcatgagctcaggaattcgagaccagcctgaccaacatggcgaaaccctgtctctactaaaaatacaaaaattagccgggcgtggtggtgggcacctgtaatcccaactacttgggagactgaggcaggagaattgcttgaactcaggaggtggaggttgcagtgagctgaggtcgtgccattgcactccagcctggacaacagagcgagactcctgtctcaaaaaaaaaaaaaaaaaaaaaagagggcttaagtaattaagtaaatacgtctaagcaattttcaagtccacttaagtataactttactaaactagccagctttaaaattattgggggaataaaaataaaaaggccttcagatttgtcagcataggttttgtctaaattttatgtttgtctttgctagatattttaaaatgtcagtgttaattcaagctgagagcttggggagagcctgcctccattgagataaatgcatatctgattgcttcctttggagagactaatcagaaactcaaaagaacgcaaccctttgtctcccacctgtgatctgaaagcccccaagcctcctcacctccagttgtcccatctttctggaccaaaacaatgtttgttttacatatggtttagtttttgttttttcagatggagtctccctctgtcgcccaggctggaatgagtggtgccatctcggctcactgcaacctccgcctcctgggttcaagttgccagaaatgcttgttccctggaggctgggtgcggtggctcatgcctgtaatcccagcactttgggaggtcgaggtaggcagaacacctgaggtagggagttcaagaccagcctgaccaacatggagaaaccccgtctctactaaaaatgcaaaaaattagctgggcgtggtggcgcctgcccgtaatcctagcaactcaggaggctgaggcaggagaaccgcttgaacctgcgagggggaggttgcggtgaaccgaaccgagatcacaccattgcactccagcctgggcaacaagaatgaaactccgtttcaaaaaaaaaattggccgggcacagtggctcacgcctgtaatcccaacactttgggaggccgaagcgggcagatcacgaggtcaggagattgagaccattctggctaacgcggtgaaaccccgtctctaataagaatacaaaaaaaaaatttatctgggtgtggtggcacgcgcctgatatcccagctactcaggaggctgaggcaggagaatggtgtgaacccgggaggcagagcttgcactgagccgagatcgcgccactgcactccagcctgggtgacagagcgagactccatctcaaaaaaataaataaataaattttttaaaaaattaaaaaagacttttcgccatctttgtctttctgtggagctgtcgccatgaaggtcgagctgtgcagttttagcgggtacaagatctacaccggacacgggaggcgctacgccaggaccgacgggaaggttttccagtttcttaatgcgaaatgcgagttggcgttcctttccaagaggaatcctcggcagataaactggactgtcctctacagaaggaagcacaaaaaggggcagtcggaagaaattcaaaagaaaagaacccgctgagcagtcaaattccagagggccattactggtgcatctcttgctgatataacgaccaagaggaatcagaaacctgaagttagaaagactcgacgagaacaagctatcagggctgctaaggaagcaaaaaaggctaagcaagcatctaaaaagactgcaatggctgctgctaaggctggagtgcaatggcacgatctcggctcaccgcaacctctgcctcctgggttcaagcggttctcctgcctcagcctcccaagtggctgggattacaggcatgtgccaccatgcctggctggttttgtatttttagtagaggtgtggtttcttcatgggcaggctggtctcgaactcccgacctcaggtgatctgcctgcctcggcctcccaaagtgctgggat

SEQ ID NO: 93789 - DNA, 127369 bp, Homo sapiens
tattatatgctgctttgtgctatatggctgctttgtgctataatgacagagttgagtagttgtgacaaagactatattgcttgcaagtctaaactatatactatctggtccttaaaaaagttggctggacatcgttttaagccactaaattttggaatagtttgctatgaagcaatacataactaaaaaaaccccaatcttagactgggaccccaaagaactgcacaattgagtaaaggggaaccgtaaaaaacacacactaaaaagaaaacaaaacaaaaatgcttccatagactgtagtccagctctgagtcatcagatgactcagaaaatctggagccctgaaattgagttaagatgatcccagactgctggtgcccctagatgcctggtagcagcaaatggaaatatttcccagaggaagatattactattgttacttaaaatgattttttaaaatacaatgtccaaaacataaccaggtatatggtgacatgagaatgaatcactaaaaactgataatggggcagsgagtggtggctcacacttataatcccagcactttggaaggccgaggcaagaggatcacttgaagccaggagttcgagaccagcctggtctctgcaaatagtgagacctgtctctacaaataaaaaaaattaaccagacatgttggcacacacctgtagtcccagttacttggggggctgaagtgggaaaatcgcttgagcctaggtggtcaaggctgcagtgagccatgatcacgccaccgcactccggcctaggtgacagagtgagaccctgtcttgaaaatgaaaacaaaaatagaaactggttgggtgcagtggctcacacctgtaatcccagtattctgggaggccaaggcagtaggatcctttgggccctggagttcaagaccagcctgggcaacatagagagactctgtcactattttttttttaaagtaaaaagcaaaaacaatatttgacaatggaagcagattcacaggaactccagattagaattatcagttatagaccataaaacaacaatactatgtttaaggatggataagacaagcctgaaaattatagcagggtactgggaaatacatgaagtggcatagcagatttgaaaaagaaccaaatagaggccaggcacagtggctcacacctgtaatcccagcactttgggaggccgaggcgggcggatcacctgaggtcaggagttcaagaccagcctggccaacatggcgaaaccctgtccctactaaaaataaaaaaattagctgggcgtggtggcatgtgccttgtaatcccagctacttgggaggttgaggcagggtaattgcttgaacctgggaagcggaggttgcagtgagctgagactgtgccactgcactccagcctgggcgacagagcaagactctgtctcaaaaaaagaaaggaaagaaagaaagaagggagggagggccaaatagaaattctagacttaaagagtagaataactggccgggcgcagtggctcacacctgtaatcccagcactttgggaggccgaggcgggcggatcaggaggtcaggcgattgagaccatcctggctaacatggtgaaaccccgtctctactaaaaatacaaaaaaattagctgggcgtggtggcgggcacctgtagtctcagctacttgggaggctgaagcaggagaatggtgtgaacctggaaggcggagcttgcagtgagctgagatcgcgccactgcactccagcctgggcaacagagccaggctccatctcaaaaaaaaaaaaaaaaagagagagagaaaagaaaaagaatagaataaccaaatggagctcaatggttgggtttaagatgagattttttttttttttttttttttagctgaaaagagactgagtgagctgaaaatagaagaaacttattaggacaaagcatagaaggataaaagacagaaaatacagaataaagggatgaagtaagaaggttgaatgtgtttcaactggagccccagaaagaaagaagaaaaaggacagaaatcgtatttgaacatataatgtctgagaattgttcaaaactgaggaaaaactattcaaaggtgataggcagccgtgaaatgacagatatccactctaccgtgtattctcttcttttttttttttttttttgagacagagtctcactctgtcacccaggctggagtgcagtggtgcaatcttggctcactgcaacttccaccgtctgggttcaggcaattctcatgcctcagcctcccaagtagcagggactacaggcgcacgcccagctaatttttgtatttttagtagagacagggtttcaccatgttggccaggctggtctcgaactcctgacctcaggtgatccgcccacctcagcctcccaaagtgctgggattataggcatgaaccaccacgcctggcatactctgactctcaaaaaccttaatgtacaaagctgcctttaaaaggattctgaaaccaagatgaaggtagctcggtagtagttggaacagggcttgcctgggctgagttcaagtacaagctctgctacttcctagctgtgccacctggagaaagttgccaaacttcaattttttcaagtaataaatgaaaataaagagtaacactggcctaccccattgtgagaatcaaatgataagttcgggcaaggtggctcacacctgcaatcttgacagtttaggaggccaaggtgggagggtctcttgagcccagcggttccaggccagcctgggtaatagagtgagcccttgtctctaaaagaaaaaggaagacagaaaaagagaatcaaatgataaaatgcatgtgaatgagtctagtgaatgcgaagtgcttttaaaatgagatgtggtttgagcagttccacaagcatgcccagggtcactaccagtgacaggcaggactggccatataatttgcagggcccagtgaaaaatgagagtgcagggccctttgttgagaaagtactaagaatttcaagacggcggcagcagagcattagacccagcacagggctcttctaagtacacggccctgtgtactacacaggtcacatacccatggaactggtcttaggtacagaccctgcaaagaaccgtactgtgccttaggaaagggctgctcatcccacatccaggtatctgcagccatagcgcatgtcatctttgaattctgaagggcagtaatgtttagggaaaatgcaagcacatgtgtttccaaatgccaaggaaggcaagtgcagtgatcagagtggttttctgggagagtgggtggggctagcaaggctgccatcggaactgtggaactgactgttctccacagactctggcctagaaaaaaaaagaaccgtgtagctgtatctacagggcctgttgttgttgctgcggtgtattacaacacagcctggcagcctcccctgcctttctgtcttcctcctggaagagcctggtcccagacatgtgacacgtccacacagccctctgcagatttgcccacactgctcctcactgttccctcaattattaggcttttccaggtctgcatgctttttgctcacgctgtcccctcctgcctgggagtccctttcccccttgtccacacccctctgtctggcaaacacctacttcatcttctaagattcagctctactgtcaggtgacctcttcaatgacgccttccctgcctctcgtaggaagagctgattcctctttccttggcgccttccattgtgccctatgcagacatctgtcacaacccctgtaacatgaagaggagaactgacatgttacgtgtatgtcactgtctcctaatgaagcccttgagggttgggacatatataccctgatagcatagagcttaatatgtgctgttatttttattttattttattttatttatttattattattttttttgagatggagttttgctcttgttgcccaggctggagtgcaatggtgccatctcggctcactgcaacctccgcctcccgggttcaagcgattcttctgcctcagcctcccgagtagctgggattacaggcatgcgtcaccaygcctggctaatttcgtatttttagtaaagatggggtttctccatgttggtcaggctggtctcgaactcccgacctcaggtgatccgcccacctctgtcttccaaagtgctaggattacaggtgtgaaccactgtgccctgcctaatatgtgctattattaagcatagtagatgcttaatcaattggtattagtatgcagaggaattttgatcaactttgtttttctgcgttaatgaacaaatacattgtttcagtgactcccctcggcaactggtaaacagggaagcttctaggcactgaggacagacaaatgactgagacagaacccctgccctcgaggcggtttcagtcttggctttatttgtcttttctgcagacatcatcaccctttttttttttttagaatggagtctcgctcttgttgcccaggctggagtgcaatggtgcgatctcggctcactgcaacctctgttcaagcaattctcctgcctcagcctcctgaatagctgggattacaggcatgcgccaccatgcccggctaattttttaaaattatttttagtagagacggggtttctccatgttggtcaggctcgtctcgaactcccgacctcaggtgatccgcccatctcggcctcccaaagtgctgggattacaggcgtaagccaccgcgcccggcgcccaggcatcatctcttgaaggcagcatggcgatttctggacgaggctcttcataaatgtttgaatgcagtatagtgcaaagagagcaggtttggagccaggagacatgagttctaatctggctatgggatattaggtttccataggtaactattaggtcccacgtgtaactagctatgggacatcaggtttctgtttccttaaaaatgagagagttgattagagattccctaaggcccaggtgcagctcctgcatctctatgggagtaactcagaggtagccatctggttggcagtctacctttcggagttggcggaagaactcagccgttttgtttttgtttttgttttgagatggagtcttgctctgtcaccaggctggagtgcagtggcgtgatctcgactcactacaacctctgcctcccaggttcaagcgattctcctacctcagcctcccgagtagctgggacggcgcgcgccaccaagcccagctaatttttgtatttttagtagagacggggtttcaccatgttggctaggatggtctcgatctcttgacctcgtggtccgcccacctcggccttccaaagtgctgggattacaggcgtgagccaccccacctggccgaactcagccgtaaggcctcttcctgttttaatctcctgggatctcctgcttgaaaggtagcaagccaagagaaagtatggtctttacagtcactgggtgtccagagggaggtgatatctgctaaattggttctcgaggtgggatttccccagtcccgactgggcatcttagacttaatggggttgcttcctagggctaacctggccagctgacctaacaaacagcctggcctgcccctctccggcctctaggtaggccctgtggacagataggaggggcagtgccttcagagagacgatacagatgggaagtcaactagcttgcttaggcattaatttctcgggaggtaagagatgtgagggggtgtcagtttccaccatcccttctctatggcccccacaaagggcaagggccagacacgtgggctggcgtggggaggtggaggagcaaatgatgggggcggggcctcatttgcatggacggcgcgcggccaccaatccggacaggcggatcgacagcccgcgcgccttttgggggcggactgacagccccggggccctatggaaggcgggtcctgcggccggctggggcgggacggcgccgggcgctgccccggggattcgggccggctcgcgggcgctgccagtctcgggcggcggtgtccggcgcgcgggcggcctgctgggcgggctgaagggttagcggagcacgggcaaggcggagagtgacggagtcggcgagcccccgcggcgacaggtaccggcgccatggccacggagatggggcggccggccgcggcgccccgggagccgaacgccctccttccaggtcccgccgcggtcgcactcgctgcctcagctcccacccccacgcggcttcgcagcccaggagccgcgtgtcgcgggggagcggggtccggaagcctcgaggggagcgcgcgggaggcctcggccccactgcggcgcccctcgccgcgccccaggggccgcggggccggtgctccccgcgggaggcgcggagactagtgaccgcgggcgccgctctccgcccccgccggcctctcccggcagaggcgaggcgggtcgcgcccgcccgtcctcactgggcttttgtttcccgcccgggatgacaggtcccgctccgcctccggtctctggcccccggctctccccggacaggcggccggaccctcagccggcaccgctgcgggcgggagccaaacttcgctttcgggtccgggcgccgggacaaccggaccccagggcgagccgagcgccgggacgccgcgggcgcggggcggattcgcccacctggcggggctgtgaaggggatggtggcggggtggccgcgctccgggtgtggrcgggcggtccccgccttcacctgccgcctcgggacaagcgttggggaaccgcatcgccgctgtcggccgcttgtggaggagtccgcgcagcgccgtctaacaggtgatccgcgtcactcccaggccataccgaagcggctgaacgctgtgccagggctccttatgctcttctgttctgggacgtgaaaacgtcttccgccttattggtcgtccaaaaaggtgcaccggtcacagtataagagtcaaaaaccagtattaccaaaaagacactacgagcgtcagggtgcagagtggctttcttcgattaacgaaccggcaggaccatcgtagtctctaaaatcgggttctgcagtggtggcgaaagcgtagtaagtttcaagttgtaagcggagatgcagaattgtagatacccttcagtgtggttcaggacagtgtgttcagcgtttggccgccgttcagtaaattctgcatgaagcagtttgagctcgtggttttggatttacttttcaggagtatgttttccagtggaataaggcttactactgaatgggagctttctttgcctctctgagtgtagacaggagtgtttattttcattgtcttcccattttgttagattgtggacaagggaaaagttaaagcatattttggttaagtatttttaatagtctrggattctatccacctcctccataagggtttttactttagagaattataaagtaattytctaaagggagctgcttctcttggtgtttgaatcaaaagccaagaatcgacttgaaaaaaattcttattctggtgggaaatttttattgtcatactttcacttcaccattttctgtttgtctctcccccagctgacctctgcctgacagtctgcaattatggccctgaccaatttagagattctatacaaatgacatttttaaaacgagggttattaatactcattatttgtgagaaacactttatttagttacccagtttttttcttctaatgtgtcttggttgatatctgtattaggtaagatttatacttcggagattaagtttaagttaagaacaaagttgctaatcttgatttaattatgctagtttattattcattgaatggtcattttacttatttgcctaggtaattacagttagctaatagctgataagagttcgccattgaaccatcaactcttcaaccaataattgtgactattttagattaaaaagaatatagtggtctttattgttttatttctccataacaagctatgaggtctttgtatgtttctgagtctttaattcttttagttatgggaattttgggtgaatttcttttttaaaacatatttttaatcagttcaaatgaaaaacttaaaatattgcattaggcaacttattaaatctttagttatctgtttattcttggaaaataatgcatattttgggttcagtttagtttcctaaaggcttctctgcttaggatgaattagtctggagaggaaagaacatcctgtttgtatacctgtagaagaagttactgctgttaaaagctaagttggctttttgatgtttagtgtggataggttgaacaataattcatcctcacgttcggagggcttattctatgtaaatagttgaaaggaactggataagactgtagcttccattattttttatcatttatataattgctctttagtgtacttaaatatataaaatactattaataattagttgtttattgtccttattctgtgatgatgtatgtatataaaccacatacaataaagttgcatttcataaatttatttacatatgtgtattttagtattttaactataaaagttaaagttttattaactttaggtttaattaaaagcccattttaaaatttagtttttagatattttaattactgatttttctctactttaacttgtaatagatgatatcataaaattatcaactacaatttcagtttcaaaaattaagcataagttgaattctcaaatccacacaataaacattgggagtgtttttaaagccatttaccctcaggtataactccttttgagtttggaggtgatagtaagtatttttaaataaatgaagctacagaaaacaagggcttacattaaaacaactaattttgaggctagatcaaatgccactattatagacattagttttgcttttttttttttttttttttttgagatggcgttttgctcttgttgcccaggctggagtgcaagggcgcagtctcggctcattgcaacctctgcctcccgggttcaagcgattctcctgcctcagcctcctgagtagctgacactacaggcctgcgccaccatgtccggctaatttttgtatttttagtagagacggggttttgccatgttggccaggctggtctcgaactcctgacctcaggtgatccacccgcctcagcctcccaaagtgctggtattacaggcgtgagccatcgcgcctagcctagtattgctttatttaacagtaatatgcttgctgtacccggcatgaagaattcctctaaagaccattaattaaaataagttttcataattcctaaagaataatctatattatacatattggcacactaaattttgtaattcatgtttaacaaatatctgcattttataattctgaaactatttgaactttacaacttagctgattagtagattttgttttttaagtattttatatttctaaatttttctgcagtacattttagtgcattttaaaattctgacatcatatccccaaaagtataaagaaaattaaatctacattcagtagcgactgggtggtggtggtatgtatgtcacataactattgatttaaaacaataaccacttaagtgtaatttaatttgcaaatgagatgtttatttactatgtaaaagacagtactgccaaatgagactggctaaaataatttacagtggggccatatgtactagcaggttactaacagattaataaggatattttaacaatatttagaacactaaaattccactactcaaaataatttgtacttcttatagtagtttgagaacctacattttatgcttaatttagtatttacttctagtctttttktttttgagtcggggtcttgctttattgcccaggctggagtgctgtggtgtcatcatggctcactgcagacttcccaggctcaagagatcctcctgcccaaccacctggtctcaagtgatcctcccacctcagcctcccaagtagctggggttacaggcacacaccaccacacctggctaatttttaaaacttttaatttttagtagagataaggtctcactatgttgcccaggctggtgtccaactcctgagctcaagtgatcctcctgctttggcctcccaaagtgctgggattataagtgcgagccacagtgccaggccgacttatagcctcttggaaaacatttggttaatgaaagtgaaggtccaccagagggagtgtggggtctatatatttgttgtatttgttttttacccttggtctggaatcaaaacatttaaaaaataagaataagattttattttagttctctaaaacaatcagtcaaaagatattgaaaattgtgattgtagttgtttggagttgctgtcatttttgttatcaaaatcaaggcttaatcaaggctgtttttcttcttagaaaaaggtggcgaggtgcagtgactcacgcctgtaatgccagcactttgggaggccaaggcacgtggattgcttgagcccaggaatttgagaccagcctgggaaacatggtgaaacctcctctctacaaaagtacaaaagttagccaggtgtggtggagtacacctgtagtcccagctacttgggaggctgaggtgggaggatcacttgagcctgggaggttgaggctgcagtgagcggtgattaagccattgtactccagcctggacaacagagygagaccctgccttaaaaaaaaaaaaaaagatacaattactggaaaaatgaaaatgatgtattttcaaagtgaaataatgggtttttaagtaaacagtcacacatctgtgaaagctaaggaatgtccaaattctttattttattattattattttttgagacagggtcttgctctgttgctcaggctggagtgcagcggtacagtctccgctcactgcaacctccattggttcaagcgattcttcctgcctcagcctcctgagtagctgggattacaggtacacaccaccacgcccagctaatttttgtatttttggtagagacgaggttttgccatgttggccagggccaggctggtcttaaactcctgatcttaggtgatccgcctgcctcgacctcccaaagtgctgggattacaggtgtgagccaccatgcccagcctaggaatgtccaaattctgataatgttttataagattaaaaatataggccaggccaggaggtcaggcgttggagaccagcctggccaacatggcaaaaccccatctctactaaaaaaaaaaaaaaaaaaaaaaaaaattagccagtcatggcagtgcatgcccttagtcccaactactcaagaggctgaggcaagcaaattacttgaacctgggaggtggaggttggaatgagctgagattgcaccactacactccagcctgggcaacacagtgaaactccatctcaataaaaaaaaaagtatatatatataccaggcatgatgtctcacacctgtaatgtcaacacctcaacactttgggaagccaaggcaggagggttgcttgagcccaggagttagagaccagcctgggcaacatagtaagaccccatttctacaaaaaatataaagttctccaggtgtggtagcttgtatctgtgatcccagcactttggaagggtgaagcaagagaatcacttgagcccaggagttcagtgctgcagtgagccaccatactccagcctgggggacagagcaagacccagtctcaaatacacacacacacacacacacacacacacacacacacacacacacacacacacacacatatacgtatatatatacacacacacttttttttttaaagaaagagcttgggatatatatttctatactttttttaagaaaaagattggaagagacatatatatacacacagacacatacatacattttaaagagattgacgtatgtttttaacctttttttaaaaaagaaatgggatatatatatatatacttttttttctttttttttttttttaaaagagattgtttcttgctctgtcaccgaggctgaagtgtggtggctaactgcagcctcgacacaaactcctgggctcaagcaatcctcttgtctcagcctcccaaagtgctgggatcccaggcccaagccaccatgcctggcttaaaaatgtagtacatttgaattgtatccttttgaaattgttcgttttttggaaagaagaataagagatgaagaaaaatcagactggaagagggttgttttttcccttttgtagttgcaaatcctaagtgggcagtggtaaatttctagaatcatttgtagcattctgttttaaacttggcaatttaaagatgttataaatgaggagtccccagaaaatggtcatttcattatcaaaagcagggttgcaaatttcagattgatcttttcaaaagttagatttgtacttgttctcagtgttcctatctctggaaactaaagaacctcctccattgttagctgaaaattgcacagtgaatttgaaagtcaagatgtcccagtcatggacataatgctgcgataggttactttttggaatggagaaaacatcttagagattgagtctgcatcagaatatattctgaatgagcatggaatgttctttacccatgttagatattaattaattaagtttttccatgtttaacttttttaaaaaagcaagacaataaaaacagtcttgtaatctgaacacatattttgggttttgttgctagcataaaaattattacctagtggatggtaacactgttttgaaattctagcttggaggagatgtttgttacaagagaaaaggtgtttcattgaaacctaacagggtaatttacatggagagatacttgtttctcttttgagttattgttaggttaagacataaacttagaaaaattgagatgctcatctttcccatcttagatttactttcactatgaactttataaattcttttttttgagacagtctcactctatcgcccagactggagtgcagtggcgtgatcagaattattcaagcttatgtatgtgtgtgtattacacatatattacacatatgtataaatatcaaatatcttttttacattatatataatggtatatatggttgctatatgttttatgtgtgtatagcagtatctatctatactgccttatttcccaggcatatttatatgcgaaactttttttctgtgaaatcttattgtaccaagaggaataagtatatatgcccacaaaaagactgggtcatagcagcttttttcacagtaggaataaactactgattcacatagcaacatagatgaatctcagaaatactgttcatagcaagagaagccaggcacagatgagtatgtataagtgtttatgatgccatttatgaaaaatacaagaacaggcaaaactaaggtatggtgatagaaatcaggacagtggttgcctctgggtaggggttgtggttgactggaaaggagcacaaggaaactttctggcatgatggaaatattctgtagcttgacttgggtgatggtaattcagttatatactttttgggtaacttcgttttcatgtaatttttaacttacagaaaagttgcaagactagtacaaagagcttccgtatacctttatccagttttgccaattgttatatacatttactcaaacatattgattcaaacttaagattttatagtatgtaaattttactttaataaaggaaagaaagctaaaaaaagtgttgaaaatgaggatgatcttgttatctaaaaaacatgaaatacctcagttaggaattaaccagtggtttaataatgatgagaaaaagaatcgttgrctgtcttttgtcttcatgtatatgtatttatactgcttttcactaaagactcatgacatgtttctgttagaagaaacaggatcctcaaaacgattcaaggtagaactgcctacaaggcaaacctgctttattttgttatcctacacatgtcacctagggaatgtgactgaaacctagcaatagctttctgggaattggaagttgtgactgtttctgttaaaagagttgtatacctacaatgtgctagctgttgcaaagacatgaacagtttttactatcctagaacttagccaaagaagaggaggcatacaaatctggttgttgtttttgggtggtgctatttttcataggcaggaaagacattggtgtttgtaaactaaactattcttgatcattggtaagtggtaaatctgtcactgtctactagatttaatgtttccacagcctcaatagtgtgatttgatttagattaaatcaatttaaatcatagcttaaacaataatggctaaaaaaattcaactttccaattctactacttattttatgtaatttttagtatgtgttcattacaatttagtattaggcataattaatggatattggttctttttgttttttcttttgaaacagggtctaattctgttgcccagtctggagtgcagtagtgcgatcatagctcactgcagcctggaactcctgggctcaaatgattctcctgcctcagtttcctgagtggctgggactataggcgtgcaccaccatgtctggctaattaaagaaaaattgtagagacagagtcttgctgtgttgctcaggctggtcttgaactcctggcctcaagtgatcctcccaccttggcctcccaaagtgttaggactgcaggtataagccactgtgcctggcctggttcatttttttaaatcttttttttttttccatctacatcagaaagttgttttatttggtcatatagtcgagtagaagatgtttgaagtaactggagggctaaccagatgcttcaacaaattaatcattgatattcaacataaacatttattttgcctttactcatgaaaataataaagttatatgacctatatatttttatttataagtttttaaatttaatatatttttatttcaatagctttggagtacaagtggtttttggttacatggatgaattatatcatggtgaattctgagattttagtgcatctgttacctgagtaatacacattttacccaatatgtagttttttattcctttcccctgccctcttctgagtctctagaatccattatatcactctgtatgcctttgtgtactcatagtttatctcccacttataggtgagaacatgcagtatttggttttccattcctgagttagttcacttagaataatgtatccagctttatcaaagttgttgtaaaagacattatttcattccttttttatggctgagtagtattccgttgtgtgtgtatgccatgttttctttactcatttaacttayatatttttcaacaaaaacataattctttgaagaatgacagatgtctgatatcaatcaacatggataaaaggactaacttcttccatgtaataaacatgttcatatttctctgaaatgacagaataggccttttccccttttatggtccatttcactatggtgtttaattgatcagtcgagaatgaagaaaacattctttgaaaagtatctgccagaattttgtttagaatggtcagccttaactgaagataggatttaaaaagtatacctgtaagtagacctttttagactttttattatgaaagttgcatacatacacagaatcgtagagaattgtctaatgaagttccatatacctcctctccagattctttaatgaacctccatgtacccattccccagattcattaattactgacattttggttatttgtatttcatatatttttttgagacagggtcctacttgttgctcaggttgaaatgcagtggtgaaatcacagcatgctgcagccttgacctcctaagtacaaacagtcctcccacctcagcctccacagtagctgggattacaggtatgcatcaccatgaccagctaatttttaagtttttttgtagagccacagtctcactatgttgctcaagctggtcttaaaatcctgggctcaagctgtcttcttgccttggcctcccagagtgttaggattacaggcatgagccactgtgtccagccatgtgcttttttaaactgttaaattctcacagagatcataaaacagtggtagtattggtgtaccaattttttttctgagttttttcccgaaattttgttataagtagagaaacataaaaaacattgtgttttagctcagagrttgactttggacaaatggtaattatgaaactgtttttgtctttagctgctttttgtcaattcatagcctggaaaagaaaaagaaggattaatttttatgcttttcattagaataaattagtttaagtactccgtatctgtagaataaggtactgttcatctggaaagtttggttagtgtaatatcttaggaatgcaattcctaagatactggaattgtctaaatgttcttcttttgccttttctttctctaaaaccttcatcattgcagtgctttaactgccacctcttttttaggccccaaacctacatcactgtttaaacttgaggtctaaatattcgtctatgtcttgaaatgaaacgtatttaaataccatctctgtagcagctgtataccaacatgacccctccccactccctccagccaaaacacttctcttcctgacttccctcttcagctgttaatgactccactattcttattggtcattttgacttttccttcttaaactcagtgagtcactaaattcttttgtttctaactttatgtctctttatctttttgtccttttgattttcactacacttgtcctaatttggttaatgtggtaaagcaggatgttatcccgagtctataatgaacttcatacatatcaaaattaagatatgccctcgatgtaaaataggacattttcttcccttccagagaaggcctcagtgtgggggcgcgtgcctgtagtcccagctactcaagaggctgaggtgggagggtcacttgaacccaggaggttgaggctgcaatgagccatgatcatgccactgcactccagtctggatgacagagagagcctctgtttttaaaaattaaattaaaaaaaaaaaaggcttcagtcagcctttaggcagacacatcatttttaagacctaggtaataattatatttaaaccaaggtgatatggaagattgccaaatcactcagctcagataacctggtgaatagtggtggctggcagtgcccatgatttttcaaggagtttgagcagcagactttcttagaccacagactgtggcccaggatgaattctccccagcccggaatacctgcaagtgctttgtagtaggggaaatgctgaaccgagtatatataacacattttcaggactttctagtgttttcatgggagaaagtacaggtcttttctttgggtttatttgaagactctcttcttatcccatgtctcatatttcctgaccaagatagttccctttaaaaatccacctttgctgggctgggtgtggtggctcatgcctgtaatcccagcactttgggaggccgaggcgggcggatcacaaggtcaggagatcgagaccactctggctaacacrgtgaaaccccgtctctactaaaaatacaaaaaattagctgggtgtggtggcaggcgcctgtagtcccagctacttgggaggctgaggcaggakaatggagtgaacccgggaggcggagcttgcagtgagccgagattgcgccactgcactccagcctgggcgacagagggagaccacgtcttaaaacaaaacaacacaacaaaacaaaacaaaaatccaccttcgctgaaaatgacgtgacactctatttcattactctgccttctctttgcaggcttctggaattggtttgtcagaaagctaggagcttgagcttagttgggaggagataaaatagaaatgagattataagtgatctcctttgttcttcccactagcagttgtctagcttccaggggtcttgggcctgattcctttccaaatgggtggtagtttttacttgtttttggtcagtttatggagatttctttcttatttctgcccttttgggaaatgttaaaatttcctcctggtacaaaccaagacccagtttaagtaattactgactttggggataagggaatgaaatactatattgccctagataattgagaacatctgattattttctctgatggaactacagataatatagggatttggaaatgcttatgcagaaaataatttaatgattattaagggtggaaaaaagagaaaaataaaccattcctaggaagcctggtatggtaggactagacactggaatgagattcaggagtgttgccactaagttgctgtatgatcttgggcgtgttaaaattacttaaccattccgagcctttatttataaaatgagtgggttggattttaggtagtatcttaaggtccctctgcagttctgaaattctaagatgagtggtttctcaggaaaaaaaactgatttatatgctgttcctagttaatgatttttcaggggctgtttctcatacatacttttctgtttccgatagcggttaggagaagaaataattaaaggtgtcagcgtttctaaagtggatttagatttatttatgtttctccactgaatttatcctggacccttactttcaccttctattaatatttgtatccactctcctgcttttcttgccttttctttttctatttgctttacactatgacgtcaaatccctctttttctcttcttgctgctgcttttgtccagctgtccttcattacccatatttcattatgactgtggaatttatcaaataggcccttgagtctaagctattactgatttaaattcagatgtcccaatagttgttaggattaataggacccttctactctgttatacagcaactggagagaggagtcctagggttagagggggtgggcaagcctgagggtagaaggaatggtgtagaagagaattccaaggattgttttgattttgcccctaaaatataagttaaaatcctaagtttcgatgatgatgacttttgcactgataaaagtttgatcctgaagtcataatggactgtgagagtttcttgaaggcagagctgaacttctaattctgaatccacagcattcagtaatgctgaagtattgctgctgctaagtgcaagttgaattaaattgttaggattgatgctttcttccctcaaggtgttttgtggtaggctggggattaagagtatggtatagacttgtttttttgagacggagtgtttctctgtcacccaggctggagtgcagtggcgtgatctcggctcactgcaacctctgtctcccaggttcaagcgattctcttgcctcagcctcctgagtagctgggattacaggcatgtgccaccacgcccagctaatgtttgcatttttagtagagacggggtttcaccatgttggtcaggctggtctcaaactcctgactttgtgatccacccgcctcggcctcccaaaatgctatatctgtagaatccgtagaatcygggattacaggcgtgagccaccacacccagcctagagtatggtatagactcgtgtaagacttcagtgaatcttatcactaccactttgtggtatgggataagatacttattttctgtaagtctcagtttcctcaactataacatgcgagagggacaaaatgagcacttacctcaaggttgttgtgaggattaaatgagacaatacatgtaaagcacttagctcagcgcctagtatgtcttcactaaatattaaatactagtgtagtttcattaataagtactgctgtgttccagatatttattaagttctgctaggttctaagtagggttaacaaaatgaacaggacatgatcctgctctcagaaaggacagaacatatgcacaaaagataattaacaacctagatccaatggtaagtggcaaaggagtggtttacttaagggctcaagaggctaagcaaatgagaacttcaggaaggtgacagaacttgatctcagctttgaaggactaattagcaagttgacagtctccttggagccagactgcttgtgtttgaatcctagttctgctactgtgtcatcttaagcaagtgacgtgatctctcgcctaggattgttgagagaattaaatgagttaatacatgtaaaacacttagaatggttccgcaaacattgttagagcttgataaattattattaataagttgagagaagggagaatgcatttcagatagaacattgagtgataatgaaggggagatactctaggtttgtttgaagtgatgaagccaaattggttagagggatagcttgttggaaattagtggatgaatatgtcggggcacagttatgaataggtaagccaagaagtgtgacatcttttccatatgtactgagggaacttggaaagactcttgggttacttgtcaactcttatgtgttacagataatttctaagtctgtatctccagcatttctaccttccttgatttcaaaataactgaaacttctattcaagctaattttgatagtaaagctcataatcttctaaactgggccattatgcttctttatttgctcatttatttttgtaaatgtttttggctttctctttttctctgtattctagttgtttacataatcctcactccttttctccaaagtttagtgggtttctgctagtgtttcctctctgtcctcaaaaccccagtctagatcctaaatcatcaagccataaggtggaaaggaccagagagagggagaaagggaagaaggaagggaaccatcctctagtccagccatcttgttttacagatgaggaaattgaggttcagaggaagtagaggcatatgctcaagatccacagctaccgaatgagcagggctgcccctttcaggactagatgaaggctgttttatactctcatctcagtgtgattctcagctatctgggtgggaattatagtagtacaataaataaattttctgttattactattaagcaccaagacaaaaaatagttttattaccaggaactatatgataataattcaaccttattaataagcccatgattgtatttctcagatgagcctcactattcttaatacttaaaaccaagtctccaaaatctgctttgagaagagggtttcttgctttcatttttagagttgtaaattataaatataatagtattataaacataaatagtattctcaaaagaatggactttttgtttctgttttcttctttttttttcttttgagacagggtcttgctctgttgcccaggctggagtgcagtggcactctcaaagctccttcccaggctcaagcgttcttcccacctcagcctcccaagtagttgggactaaaggtgcacaccaccgcacctggctaatttttaaattttctgtagagatggggtctcactctgttgcctaggctggtcttgaactcctggcctcaagtgatctgcctgccctggcctcccaaagtgctgggattacaggcaggagccacggcacccagccaatctcttagattttaatatatgccacacacaacacataatggtatgttatgtattcaagcattttcttctacattgtttttctacctagatgtaatgtgatagaaggtataaagccctaagcttagcgtctggccataccagttgctcaataaatattctcttccctttttacagggctggtaattttttctcttatataatgttaattcccaatcaccaattcactatcacatcacttccttttcttccctggaaacgtatgtttaaatacatttgccctctctgcattttgaacatttgcataatgtacaagtactttttttcttttttttttttgagacggagtctctctctgttgcccaggctggagtgcagtggcgcgatctcggctcactgcaagctccgcctctcaggttcacgccattctcctgcctcagccccccgactagcttgggctacaggcgcctgccactacgccagctaattttttgtattttttttttttagtagagacaagttttcaccgtgttagccagaatggtctcaatctcctgaccttgtgatccgcccgcctcagcctcccaaaatgctgggattacaggcgtgagccaccgcctccagccacaaatactttttagtcgccataagcataatcaagaaatcattttgcaaatggtaagcttttcatgttgtgtattctttcccatgattagagaggtaaaaagtggcctgggatgcataaagatgtcgtagacctctgcaatctgccacattatttctttaaaaaaaaaaaaaagcaagcttctggactagattgatttttactgaaatattaatttttctttattatttttaaacactgaagttgaattgtataattcacaaatgcctatacaaaacttttttccatgtcctcaatactttgtatcagattatttatatttctcatggtttggtttctttttcttgtcttcatttttctgaaggtaaaaggggattttttccccccttttctgatctgtaacttgttttgtatttggatgattaccctttataacaaattttatcttctaattatgctattaagcgagaagatagtggccggtcacggtcgctcacgcctgtaatcccagcactttgggaggccgaggtgggcggatcatgaggtcaggagatcgagaccatcctggctaacacaatgaaacccagtctctactaaaaatacaaaaaattagctgggcgtggtggcggaagcctgtagtcccagatgctggggaggctgaggcaggaaaatggtgtgaacccgggaggcggagcttgcagtgagccgagatcgcgccactgcactccagcctagacgacagagtgagactccgtctcaaaaaaaaaaaaaattcttctaaattagattttagggttcttttgagggctgagtttgtgtgtgtaggtttctcttagccccttcatatattgtgttggaacttctgtttctattttttaaatgttttcttatgttgaattattttattgctgtttgaaaaaaatatgttaaaactgtatttatgggtggttgctagccttttaaatttacatagtaataaattttgctgttaacttcattcttagaatatgaagttttttgtaatttaacttctttaggtatttaccctgcaattctgataccttgagagagaaagggataattgactttttcactttcattttatagatactatttggctaccttgttccttccctttattttcattttatttgtgtctcctaaaagtggggaccttttaatataatgttaggcgctttataggctgtcttttcttttataaaatgtgttcatttcacttttccatttttaatatgactatattctagattttctgtaattcatgatatattttttaagattttggctagatttgtcagtttggattgtagtttcttttaacttgtttttgtttatttatttattattattttttttttttgagacaggattgcactctcttacccaggctggagtgcagtggtgcgatctcagctaactgcaacctctacctccctggctcaagcaatccttccacctcagccacccaagtaggtgggactacaggtgtgcaccaccatgcccaactaacttttctattttttgtggagacagggtttggttttaccgttttgcccaggctggtctcaaactcctgggttcaagggatcgtctcactttggcctcagaaagtgctgggattacaggcatgagccactgcacctggcttattaatttcattaatactttgcttttacctccatttaacaaactttggtattaccatatatgagatattttcatgtgtatgtgtgcatttatattttttaaatatgtgactgagttttttccctttttcttagattcctaggctatttcaatatttttatacctgttgtctactctgcagctaatgacacagatagcagtatatgagtttttcttttcttttcttttctttcttttttttttttgagatggagtcttgctttgttgcccaggctggagtgcagtggcacgatcttttctcactgcaacctccgcctcccaggttcaagcgattcttgtgcctcagcctcccgagtagctgggattacaggtgcccaccaccacacccggctaatttttttttgtatttttagtagagtcggggtttcaccatattggccagggcgaacttctaacctcaagtgatccacccgcctcagcctcccaaagtgttaggatcacaggcatgagccaccgtgcccactgagaatttaatacactttatgtaagttaattttttatgatagttatctagctttgccagaccaattttgttagtaaatttaaaacattaaaaaattttgaatcctcctaattctgtgtctctaatttagtaattttaagttttgatccttgtttcattctatcattcttttatttaaaaaaattgtcattggcttttctaaaagtgaatcgtgaatcatgattcatgtgaaataattaactctaaaacagcaaagataccttttagaaccttcattttttataaattgcattaacaagttatgcagtgatgtgaagatacaaactaaggtcattaagttttctttaatttataatttatattaacctattcattgaaaaggatttgatagtttgtgattaaagcaaaacaggcaaagaccattaaaaacaaagacagaaaatgagcataaatcacttgagaaataatgagcagaatgggggaatgggaagaaatctttataccagtaatctgaggcaagatagtttctgtgtttgaacattaaatttagctctgagcttcctggcaagcaagagaaaaaaggaaacagggtgacttttatagttattgtccagtaaagaaagctttttcaatttttcagaagagagaaactttttctgagtcataagttataagaggtttgttatgtgaattcttacatatggaacataatttatatttctaattttgaaaattattgaatttcttctgttgctgtcttagccatcaggtaccattctatgcattgtaattatattggtcatattaagttcatgtccactgttgtcaaaagtggaaataccatggctggggtgtgtttatgtattgcctctagagctgtagccactgacgaacaggaaactgaaagctaaaagttcargaaatgtattgtatttagactgtggaaaacatatatatgatactttactgaaaaccatgctcttttgaaaactgaaatatgtatgtatttaattagagatgaatattaaggattcatatcagatgcttaaatatgataatagatacagtatgtgcattgtaggccaggaatattgtgcaatgctagaaaaaaaggcaacagattattgtatgtattcagctatattctttcaagaaacaaaacagctggcacatcaattgaattcctcaaggatgtcttatttccagagaattccagagttttagttttagcttagttccaaggaagaggaggtccctgttttacaggatagcctatttcagtcttagggagttctaatggttaacttctgttttcatacactgaatttaactttgttttcctgtgatttattaatacagtctatagctttcttagagttgagaagaaaatgattaattgatcaaactttttttgaaaagttaattgcatctcaagtgttttcttagatattgtttcattttaggttccttataaaatacttcctacaggagtctttagttttgaagttataaaaaaaaattatcagaggaaatatgactaatgtatatgcttggttgagctgcattttcttactgtttctatacttagtattttaacaggatgtgattgataggaatttaacattctaattctttaagacaatcatgaagttctgatagtttcttagaaatggaaattgtgtcattatattttgttgttttattgttgtgcattttaacaaaagaggtgacttcacatgtaccctaaaacttaaagtataataataacaaacaaaacaaaacacatgtaccctaaaacttaaagtataataatmcaaaaaaaagaagaaaaaaaacaacaaaagaggtgacttataactattccattccagttttatgatatgaaattgtagtcacacagaacatttaggggccacattaagtgaaaattccatttattacaaagtttttaaaaggatttttagctgtattacatgtcacttaattataatcaatttaatagtttcattaaaattagactcttttcaggattgattttggttttggtctgttagggttgtgtgtttacccctgaactgttgtggtagccaaagggatagaaagcactgactggcaaaaaatggacactgggcctagcctaagagggagaagcagggcttcccagaggaaagtcccgggatgctgtttccagcataaaggggagtgggctctgggctcacacaaggagtctcagcaaggccagaccgtaaagggctgggtatagtgggaagaagagttggattttatgcagtggctgatctgctgttgccatagaggattctttttgaataataacttttactttcttattgtgttacacactcgttgtagaaaaattaaattagtgaagaaaataaaataaaaatttcctataatttttttccctttttgaatgttcttagctaatttcccttaaacttcatttaacatttaggttactttttttcttttcgaaagagtctcactctgtcacccaggctggagtgcagtggcgggatcgcagctcactgcaacatctgcttcctgagttcaagtgattcttctgcctcagcctcctgagcagctgggattacaggcgcccgccaccatgcctagttgatttttgtatctttaatagagaattcttctgcctcagcctcctgagtagctgggattacaggcacccgccaccacgcctggctgatttttgtatttttaatagagatggggtttcaccatgttggccaggctgatctcaaactcttgacctcaggtgatccacctgcctcggcctcccaaagtgttgggattataggcatgagccactgcacccagccaactaggttacttcttatttgtttatttgaaagagtgcttgttgaattgttctttccacagattatgcttctaataactttaaatattaattatggaggaaacgggttaatcattttaaggattctttttggttgatataatgattctattaattaatatttgtcttatgggagccataagcgtaataggcataatgagagcacacacttgtaagtcagagtggttcttacaggggagacaggaaaaatggagtccaaaaggcctttctgtaagttccttgggagcagggactaggtctttcttgttcaccattatgtcagtatcaggcacaatgcttgacgcctagtaagtgttccataaatagttgaatgaatggatgagtttctcattaagcacttttagtagctcatatttcttgtactgtggataatcaagatcaattatattcatctaaggttaagagcctttgctatactcagttttctttattaatgtaaatttaataaactgatttttttaaaaggcatgcatctatgtatacacacacacacacacacacacacacacagacacacacacaaaacaagtgaaaatttattgtttcttcccctgagccccattctccagaattagctactattaatggcttactatattttttctaggtattttctcttcatatacattttctttcttttcttttttttgagagagtctcgctctgtcgcccaggctggagtgcagtggtgcaatctcggcttactgcaacctcccgagttcaagggattctcctgcctcagtctcccgagtagctgggattataggcgcctgccaccatgcccggctaatttttgtatttttagtagagacggggtttcactgtgttggccaggatggtcttgatctcttgaactcgtgatccgcctgcctcagcttcccaaagttctgggattacaggcgtgagccaccgtgcccagccttcatatacattttctttacacaaatagaataattatattctgttctataaatagctttttttccccttcatggcattcttaaactttccatatcaattcgtttgtaactgtgtctttatttttaattatataattttccattgtagagatgtataatagaagtctatgaaggaaatccactcccctcctttttttttttttttttttttttttaactataatagtagtgtttctgcatgtatttttgcttgcttctgtgagaatatctacaggttatttcctggaagtgatattgctgggctaaaggatatttgcacataaactttcagtagatattgggaaattcgcccttaaaaatattcaacaaatttgtactcttactaaagatatgaagtgttatttttctgataactgtacacactttaattttgtggattagaaggattaaacttctgaaaatgaatccttgtcatagtagcttgagatgttcagaagatgatacattaggtaatatatatgttccttggcttatggtggttttacctcctgataaactcattgtaaatagaaaatatcacaagttgaaaatgcatttaatatacctaacttactgaacatcatagcctaccttacacatgctcagaacacttaaattagcctacagttgggcaaaaccatctaatagaatgcctattttataatgtgttgaatgtctcacataatttattgaaaactgaaagtgaaaaagcagaatagttgtatgggtgcttggagtactgtttctactgaatgtgtatcgccttctcaccatcataaagttgaaactcgtaacccaaaccataagttggggactgtccatagttccattgcctgatgtgatctgttgaagttaggtggaagatagtgtactatgacctctacagacccayagtgtgtattgtacagatttagatgaagaagatcagaatgttgggtttctaggtttttatctttttagaatgtttaagataaacatttatggccaggcacggtggctcatgcctataatcccagcactttgggaggccgaggcgggcggatcatgaagtcaagagattgagaccattctggcaaacatagtgaaaccctatctctactaaaaatacaaaaaaaattagctgggtgtggtggcacgcgcctgtagtcccagctactcgggaggctgaggcaggagaattgcttgaacctgggaggcggaggttgcagtgagccgagatcgcgccactgcactccagcttggtgacagagtgagactcctctaaaaaaaaaaaaaaagaggagcatttactagtgacattctaaaggaggagaagaccctgagtgctggtttgagaagtttagatttgttgtgttggaacactatttaaggtccatgaattagagagtaatgtggtgggtgtgctgtgtcagaaaggcttcactagcagtgtatacagaatgagtgggagtgagtgagccgtctggaggtaggcaggtcctctggagaactgtagtaattcacaaaggagaggaagaaaactcaaaatatgatgatagctatggagtcgaaagtaagataagaaacacaatgaatagttggcggtcctattgattaagtggagaaaaattatattgaagttgcaaacctaggagaatggccagataatacagattatgaaataaatggagaagggaccaattttgaaaaagttaattttccttaaaaacataaggaaataaaagggtcctgaagtgagagaaatcaaagattggagaaggaaagagggagaaattatgccacttttaatttcagctactacctctattaggatttgggagttatactaatagaggtaatagttgaaattaagagtggatgagttctggtatgaagtggttgatggggacaactgttgattgacaactgcattttaaggagaggatactgatagtaatgggagatgggatgaaagaatgcccaggcagagaggaaatttaataatttcaggagtggggaaagaataaagacaaatgttactgcagcctacctttcattcttttactgtgcatgagatactgtatttgctggatgttttcctgtagataccacattgttcttcctccgggagtggcatgtcagaaaatttgatgattattttaaagatgttgagttttattcctgaaattgaatatggtaacggaaaaagggtcttgggtagtttttggtgtcatatgctgtgttccttttagttcataaaatctttcatcttgtttgaatatctgtgggtctaaaaaaaaaacagctaatttttggataggtaaaagtccagatactttgtacattttaattgattatttaaaaaatattccctggcttttaaaacttggctaatacaaattgtaagaatcaccatctttttagaagaacatactgtgaattcagaatttttgctggcttagtgcttgtcagcatggagcctgttcacaggaaatgctttagaatcagagtcagagacctgtgacacttctggggagtcagtatgtaaaatagttagagtgcaggctccagagtcagtctccctggttccactgttcactagaagtatatccttggatagattacttagctcgtccattagatttgctgtctggacgtgtcagtagtaacaatctcaatgtcacacggttattgaagagatccatcatagagcttacattctagtaaggagagacaggcagtatacaaatactataaatacactggaggaaaacatagtggggctgattatagtcgatttttgctcttttatttccggtaacagtaaaacaactctgataagaaaaggtttgaacatgaaggcagacctgaagcgagtgagggagtgagctatgcagctaaccagggaagagttccaggtagtggggatagcaagtgcaaaggcactgaggaaagggcacatgggagggggcagcaagaaggccactgtagccagagcagtgagtgagggaaaaggagaaataatttcagagatagcgagtgatcagcatgtatagggtattaagcataagaaggactttggattttatcctgtgtgagatgggaaaccattggagtgccagagtaattttttcttaaagctagtctgcttgtcatttcttttcttaaaaatgcctcagttccctgttgcctttggaataatgttcacgtactttactttggcacacaaggtccttcacagtcaggcctctgcctgtttatttagcatcatctgcttctttcccacatgtacccttcactttagccaagtgggatcacatgcagctccctggatgggtcatgatgctttgtgtcttcgcgtctttctgtaccgtttgccctgtgagaagccctccccctcagctcacatggtcactggctctgttttagagggtcctctttgtgctcttgctctctcatcatttccacccggagccactttgcacttaagctgcttaggcttgaaacgtgctgtgttcttttaccagccttgattttactcttgccacacccttgccggttgaaagtatgcctatccagctcagacactgccatcttctgcctccttgggaccctcagaaacactttgtagctctcttctacctaataataattatttggaattaaaatgtttctttgccttcacaaaaaatccttgggctaacttatttcagttttctttgtagctcctagaacagggtcttacagacatttcatattcagtaggtattcatggtgtgtaggattcatagtataattagaaaactattggctttcaaacaactaagggccaaaagcagcaaaaatgaatgcacaattaaaatgagttcctattaacaaaacaaatttactgtaattatgatagctaggtaatccttgttctcttatatatttatatatacttactagtggcaccaaatattagtatacccagtttgagatgcagtttgttgaaatatatttggacacagccaggcgtgatggctcacatctgtaatcccagcactttgggaggctgaggtggcaggatcgcttgagcccaggagttcaagaacagcctgggcaacatagtgcgaccttgtctctacaaaaaaaaaaaaaaattaaaaaattagctgggtgtggttgtgcatgtctctaatcccagctactcagaaggctgaggtgggaggactatttgagcctggcaggttgaggctgtagtgagccatgactgtgccactgtactccagcctgagcaacagagcaaaactctgtctcaaaaaaaaaaaaaaaagacacgtaaataaatgctcatggtttttgacaaggtcataccacttctgaaaatcttcttaagaaaataatacaaactagccagccacagtggcttttgcatgtaaatctcagcaacttggaagactgaggcaggaagatcacttgagcccaagaatttgagatcagcctgggcaacatagcaagaccttgtctctattaaaaaaataaataaataaaaaagagaaagtaacaaaaactaaatgataattacaacatctactactactaatgttgaaagtataccatgtaacaggcactgtacaaagccctttatgtgcattactttagtcctcacaatcccaagagatgttgataactgataaccttgtgttttagatagggaaactgtggcacaaagaaggtaagtgacttgcacaagatcatacagttgctatgttgtcaagctaagattctcactcaagcagactgtgttcaagaagccatactctttttttttttttttttgagacggagttttgctcttgtcacccaggctgtagtgtgcagtggctcgatctctgctcactgcaactgccttctgggttcaagtgattctcctgccttagcctcctgagtagctgggattacaggcacttgccaccacacccggctaatttttgtatttttagtggagacggggtttcaccatgttgaccaggctagtcttgaactcgtgaccacaggtgatctgcccacctcagcctcccaaagtgctgggatcaggcacgagtcaccgcgcccagccaagaagccatactttcaattacatatgataaaagcttaggcacaaaaatgttcatagcagtgttatatagtattaataagttggaaggaatgtatatcattcatgaattatggtcatccattgagtagaataattttttagcagcttaattgagataaaattcacataccataatattctcccctttaaagtgtacaattcaggccgggtgtggtggctcatgcctgtaatcccagtacattgggaggctgagatgagaggatcacttgagaccaggagttcaagaccagcctgctcaatgtagcgagaccccatatctctataaataaataaatacataaaataaggtaaatcaaaaataaaataaagtatataattcagtggtttccagcatatttccagatttgtgcaactattactgctgtcccactttggaacatttataaccctaaaaagaaatctcccactccccatttcctcctgtttcccctaaccctaagcaaccaccagtctcctttctgtctctatgaatttgcctattctgaacctttcgtataaatgggatcatataatgtatggcctttcatgattggctgccttcaagtgaaattaatagtcctaaatatgcacctaataacagagcttcaagatacatgaatcagaaactgatagaacttgaaaggataagtagatctaaaattatagttggagatttcaatacctcacctgtctctcaataattgatagaacaagtagacaaaaaataatttagaagatgtgaactacattrtcaactaacctaattgacatttacatagtattctacccaatacaagcagaatacacattcttttcagttgcacacagcacaggacatttaataagatagatcatatttttgttcataaaatagtgtcagtgttggccaggcgcggtagctcatgcctgtaatcccagcactttgggaggccgaggcgggaggatcacctgagctcgggagtttgagaccagcctgaccaacatggagaaaccctgtctctactaaaaatacaaaatcagccgggcgtggtggtgcatgcctataatcccagctactcaggaggctgaggcaggagaatcgcttgaacctgggaggcacgggttgcggtgagctgagattgcgtcattgcactccagcctgggcaacaagagcaaaactccgtctcaaaaaaaaaaaaaaaaaaaaatagcatcaatgcatttaaagtgacttagatcataaagtatgtatgctgaccaaaagggagttaaattaaaagtcaataacagaaagatacttggaaaattattaaatatttagaaactaatgtattcctaagaagcccacaggtcaaagaagaatatcaaagatgaatttagaaagtattttgtacttaatgaaaatcatatcagaatatgtgggttgtggttaatgcaaatgtttaggggaaaattcatagcactaaatgtctatattgggtaagaagtaaaatcacaaatcagtgtcctcagctttcaccttaagaaattagaaaaagaagggaaaattaaacccaaagtaaacagaggaaaagagttaaggataaaagccaaaattagtggaatagaaaaaaagaaaactagtagagaaagtcagtgaaatcaaaagctggttctttgagaacaatgaaattgataaaactctaacctgactaatcaggaatcagagagagaagacaacttaccaatatcaagaatgaaagaattgctaacaaagctcagattctataattattaaaaggatgagagaataatatgaattactttatagtaatacattagacagctagatgaaatgtgcaaattccttgaaagatacaaaatacctaagctcactgaagaagaaacaacctgaaaagtcctatatctattaaagaaattgaattcggccaggcttggtggctcacgcctataatcccagcactttgggaggctgaggtaggcggatcacctgaggtcgggactttgagaccggcctgaccaacatggagaaaccccatctctactaaaaatacaaaattaactgagtgtggtggcgcatgcctgtaatctcagctactccagaggctgagacaggagaatcgcttgaacccaggaggcagaggttgcagtgagccaagatggtgccacagcactccagcctaggcaacaggagcgaaactcagtctcgaaaaaaaaaaaaaaattgaattcccacaaagaaaactctaggcctacatggtattcctgattctaccaaacattttaggaagtcataataccaattttacacaaactcctccataaaattgataaagatggaatatttcttaagtcactctatgatttttattatttatttacttatttcttcctgaaccagggtctcgccctgttgcccaggctggagtgtggttgtgtgatggtgtgatcatggctcactgcaacctccacctcctgggctcaagccgtcttcccacctcagcctctgagtagctgggactacaggtgtgtgccaccatgctcagctaatttttgtattttttggtagagatggggttttgccatgttgcccagattggtctcgaactcctgggctcaagcaatccacccgccttagcctcccaaaatgctgggattacaagtgtaagccaccacacccagccagcaatattttttaacaaaattttagtaaattgaatccaacaacatataaaaatgataaaatacartgaccaaatagggtttattccaggtatccaaggttggtttaacatttgaaaaccaatgtcatgtaccacattagcaagagaaagcatatgatcagctcaatagatgcagaaaaaacatttaacaaagtttaacatgccttgctgatgaaaactcagcaaactaggaaaataagggaacttctcaatatgataaagggtatctgtgaaaaaccaatagctgaaatcatagttaatgctgaaagactgaatgctttccctatataatatttagaacaagtcaagatatctgctattcccaattgtgttcagcattgttctggaggttctttttttttttttttgacggagtctcaaaaaaagacggagtcgcccaggctggagtgcagtggcgcaaactcggctcactgcaagctctgcctcctggggttcacgccattctcctgtctcagcctcctgagtagctgggactacaggcgcccgccaccacgcccggttaatttttggatttttagtagagatggggtttcaccgtgttagccaggatggtctggatctcctaacctcgtgatccacccacctcggcctcccaaagtgctgggattacaggcatgagccactgcgcctggccaatttttgtattttttttttttttttttagtagaaacagggtttcaccatgttggccaggctggtctcaaactcctgacctcgtgatctgcctgcctcagcctcccaaagtgctgggattacaggtgtgagccactgtgcctggccttataattttattacaaaattgagaaaccagatgttttactttatgttttctaaatttctgaatgtattttcagaatgatataaaatgttaaattttattttagattagaacattgttatccaactggatgataaataaagaaaaggaaaaggaaagaatgttgtgagaccccctaagtacaaaatggaggaagtcaatggaattccaagcttgagagaaattcttaggatcttgattggatgattaggtatcggtggtagagagaataatggatcctcaaaaatggaacttgtaaatatgttaccttatagggcagaaaggactttgcagatgtgaacaaggttaaaagctttgaaatggggagattatcctgggttatccaggtgggctcaacttaatcacgtgggttcttaaaagtggaaaactttcccaactatagtcagagagagagatgactacacaagaatgatcaaagaaatgcagtattcccggctgaagatggaggaagggggccaccagccaagaaatgtgggcagcctctagaatgtggaaaaagccaggagatgagtgctctcccrgagcctccagaaggaatgcagccctgccaacaccttgattttagcccagtgagacccattctggacttgtgatctccagaactgtaagatgataaattggtattatttcagccactaagtttgtgttaattttttcttttttcttttttttacttgagacggagtctcactttgtcacccaggctggagtgcagtggcgcgatctcagctcgctgcaagctccgcctcccgggttcacgccattcttctgcctcagcctcccgagtagctgggactacaggcgcccgccaccactcccggctagttttttttttgtatttttagtagagacagggtttcaccgtgttagacaggatggtctcgatctcctgaccttgtgatccacccacctcagcctcccaaagtgctaggattacagccgtgagccaccgtgcccggctttttttctttttcttttttcttttttttttttttgagacggagtcttgctgtttccccaggctggagtgcagtggcacgatctcatctcactgcaacctccacctcccgggttcaagcaattctcctgcctcagcctcctgagtggctgggattacaggcacgygccaccatgccctgctaaattttgtatttttagtagagatgggttttcactgtgttggccaggctggtctcaaatctcgaactcctgacctcaagtgatccacctgcctcggcctcccaaagtgctgggattacaggcatgagccactttgcccagcctgtttgtggtaatttcttatggcatctgtagaaaactaataccacatgtaagtgggtaaagctcagaattcatattttgccagagggttgcaatggaaagtgaactctgtattgttaagataactttctatcccttggaaattgtttttccttccacatagcaaacctcattttccccaaaagtaaaacatatatttataaattactttttaatgaataaatacaaaataacagagttggaataaaccttagatatgattctagtctaacccccgaaaagtatagatggaaaaactgagtgagggccagagattccacagctagttaatagtagatctgagtttattggccttttcttccttccatatttttatggaatttaagatggggatttaagatggccgagattttttattctttctacacagactcaaatgctattcttgtacagtttttctcttaggcatataatggactttgggaaacaatttatgtaatagtgttttaatgagctagtactgtaagaggatacagtattacataaaacttttgggtttttctgtctgcgtctcaagtctgaaacatctcttcctccagttgctagttaatgtatactcaaatattggcagctaggtgtggtcctttgttcttgactgtccatatttaaaccaaactaatctaattaataaggtaaatctgctatgtgttgtgtatgtacagacactcttataatgtacttcagagatagattttaattatgcttaggtgttcttaattagtactcctgattagaacagaattttatttttacttttatagttaaacgctcaggtacagtgtaattttccagattagatttttcagattaaatttagagaaggaatatacttagcttgtaatggtatttcagcactgattctttatggtgtctgatattttgccatctttacatggactgtgattttgaaaatcgtgatcatctcatcatttattgagtactgctcctatgccatttacttatactaggtggtggagtacaaaatgaataggacacattctctacatgtatagtgtttatagacttttctcatatgttaccttgttggctcgttcctagaaatcatcaggacacttagaaccaaactctttggccctagtgaatcacctcaagttactctaccactgtggcacaggtagaaatttgactttctatagaaaacctagacaaataataggggctcattcctactgtcttcacccttatcaaaatgtaagttccatggagacagaaattgttttctgttgtttaatgctgtatctccactacaatagtgcctggcacatagtaggtattcagtagatagttgttgaataaataagtgaatggctcctacttatccttcagctttcaattaatttattattattattttaaatttctgtttctttttagacatggggtctcactatgttggccaggctggtcttgaactcctggcctcaactgatctgcccacgtcagcctcccaaagtgctgggattacagttgtgagccaccgagcctggcccacaactacttttttttgaagagtcagggtttcactatgttactcaggctagacttaattcctgggctcaagcgaccctcccacctcaaactccaaagttgctggaggttcaggcacttggcactggacccagctgctgccataactttaacagtgatgcctatcagatgtacctttgagctaaggggtctcttgtcttggtacagagctggatacagcttatgagagataagaggcaatgcataaaattagccaggcgtggtggcgcatgcctgtaatcccagctactcaggaggctgaggcaggagaatcgcttgaacccgggaagtggaggttgctgtgatctgagatcgtgccattgcactctagcctgggcgacaagatcaagactccatctcaaaaagcaaaacaaacaaacaaaaaaggcaatgcataaagtcaagaaagaaagtgccagagaaggattcaggttgcttcagggggtaaaacagcagtaagtagttttatttgaacaatggtatggtatggtattaaaagacaatgaggggaatagtacactaacttcagacactttctaagtgctgtagatcttttaaaatccatcatagtyttgctgacttctttagtgatggtttgagttttaattattcaattatgctgccaaaagtactgcaggttgtcaagtatcatttatccaaaatgcttgggacaagaagtgttttggatcttggagtttttcagattttggaatatttgcaaatttctctaagggaaaaaagatattttggcatgtaatgcataatatttgcataattataatccagtgttctaaaatgattgtacccaccaaaatctataaacaataaggaactgtggttgtttgctgcaaataactatgataaaccacactgtttgtatcacatgtattagcccattgtgacattgtcaattgaccatatgcacatacatgtatacatgagatatagtatcttggggatggaacccagatgtaaacatgaaatttatttatgttcayatgtacttatacacacagcctgaaggtaatattatacaatattttttatttttattattttttttaagtcaataaatttttattcatggaattccatgttgtgatttcttccactatccatcagggccactttagatcctctaaagagctggagtcaaaagatttatcttcaagttagccatttttaatgaaactgatgcttattttaatccacttgtcctgtcagcccataattcttttattttggcttctgtcatctccttttaatatggatatactgatgaagacttcaaaattcaccaagaatctttgggatctaatttcttcaaccagtgtactttagggtcctttttactgtaggtggtggatctgcctggttctcaatttgacaccctctcttaacatgaatgaattcaaatcatattcattcctaagcgatgacactcaagaatagtacagatgtgtggaatatgccagtacctttaactccagatatcatgttctcaagataactccattaaaacaaaaagccatcatatgtatcgtcaatatgaaattggaatgcaaaattaatactgctgaggacttccctcatatcccatgctgtttaactatctattctacagtcctagaatccatctttttttattaagagacagggtctttgttacccaggctggagtacagtggtgccatcaaagctcagtgcagcctccaactcctgagctcaatccttttgcctcagcctccccttcctgagtagctgcagctacaggcacatgccccaatacccagctaatttttaaatttttgtgaagatgaggtgtttgttactttcttgcccaggctggtcttgaactcctggtttcaagcaatactcccgcctcggtgtggggattgcaggcttgagccactgtgcctggcctggaaccaacctttatgtctatcaatactcccatcagttaactgtctcaggtatcataatatcccttcttatcgggggacctgccccgataatcacgtaggttcttttctattttcctaagcgtcagctggcttgagaaataaaaggacagagtacaaaagagagaaattttaaagctgggcgtccgggggagacatcacacattggtaggatccgtgatgccccacaagccacaaaaaccagcaagtttttattagggattttcaaaaggggagggagtgtgygaatagttgtgggtgacagacatcaagtacttaacagggtaatagaatatcacaaagcaagtggaggcagggcgagatcacaggaccacaggacagaggcgaaattaaaattgctaataaagtttcgggcaccattgtcattgataacatcttatcaggagacagggttttgagatcaactagtctgaccaaagtttattaggcgggaatttcctcttcctaataagcctgggagygctatgggagactggagtttatttcacctctgcaatctcgaccataagagacaggtatgccccgggggggccagttcagagacctacccctaggtgygcattctctttctcagggactttccatgctgagaaaaggaattcagtaatatttctcccatttgcttttgaaagaagagaaatatggctctgttctgcccggctcaccggcggtcagagtttaaggttatctctcttattccctgaacaattgctgttatcctgttcttttttcagggtgcccacatttcatattgctcaaacacacatgctgtacaatttgtgtacttaacgcaattattacagggtcctgagacgatatacatccttctcggctgacaggattaagagattaaagtaaagacaggcataggaaatcacmagggtattgattggggaagtgataagtgtccatgaaatctttacaatttatgtttagagagtgcagtaaagacaggcataagaaattacaaaaatattaatttggggaactaataaatgtccataaaatcttcataatccacgttcttctgtcatggcttcagccggttcctccgtttggggtccctgacttcctgcaacaccttcttatatgtatcaaaactcatactgaacaatgagttctgggttgcaaaagaggatttattttttgcacctaaccataagtctttgtccacaagttaaacaaaaacagtgtagtatacagtatttttaataattttgtgcattaaataaaatttgtgtaycttgaatcattagaaaacaagtattaggtgtggagtttttcacttgtggcatcatgttagaattcaaaaagtttcagagtttggagcatcttggatttcggatttttccaattaggaatgctcaacctaatcagaagtaagacttggatattaaaagtttgaaagccacggttttatttgcttagtagtatataactgcaacagtactttttatcttaattattgtgtagaatctgatgactccccaacatataactgtcacccacacttctctcctgagctcaggccttatctctgataaccttctggacatcgcacaagcaccccttgctcaacataccccagccagagttctcttgctctccataaaaagcaatctgaaatgttcgaattaaattgaagagaaagaataaaaagtcctgatgagtggaaccatgaaatgtttcatcttttttccctaagtttaaaaagatcatgaaagtaatacatgtttaatgttaaactatttaaataatataaaaataaaatctaagaagtgaaaattccttcttatcttcccaaatctcattctccagaggtaacactgtttgagcagtttggtaagttatctttccaaacttcttctatatataagcaaatatacaaacacatatatacttttttcctcttggaaataggatcatgttacaaatcattctgcaactcaccattcacttaatagtacatcttgaaaatccatctgtcttttcatgtgagtattagaagattgtttatgtggaatgggtaagacgtcacctgctccatattagtgatattttcagagattagctgtcttaaagggaaaacagtgaaaaagacattttggcatgtaatgaacaatatttgcataattgtaatccagtgctctaaaatgatcatacccacccacccaccaaaatctacaaacaactgggaaccatrgttggtggctgcaaatatattggtataaattacactgtttgtgccaggtgcggtggctcatgtctgtgatcccagcactttgggaggctgaggcgggcgggtcacttgagctgaaggagttcgagaccagcatggctaacatggcgaaaccccatctctactaaaaatacaaaaattagccgggcattggtggcgcacacctgtaatcccagctactcaggaggctgaggcaggagtatcatttgaacctaggaggcggagattgcagtgagccaagatcaggccactgcactccagcctgggcaacagagcaagagtctgtctcaaaaaatttaaaaaaataaaaaataaattacactgtttgtgttacatgtattagcccattgtggcatcatcaactgacttttttttttttcaatggtccagataaccaaatcatcactgggcactatgcaccattaacaatacacttcatttactacaatgctattcttttttcctttttttttttttttttggacaatatcttgctctgttgcccaggctgcagtgcagtggtgcaaccatggcgtgatactcctgcctcagcctctccagtagctgggaccacaggcgtgtattttttatttttagcagagatcgggtctcactgtgttgcccaagctggtctcaaactcctgggctcaagccttgacatcccaaagtactgggattacaggtgtgagccactgcgcctggcattcttttataatggatgaacatttacaaaatagtttcccaatttagttgtttggatgtttttgtttagactcttagctaaatgattctctactgtatagatttatctcatgcttttcaaaaactgtatatttttatagtatgcatttgccaaattttagtctaacattcccatgaccatccttttaaggaaaaactttgaaatacttttatttagccatacggttaaaatttagctggaactaagtgatctgtgtttagttgatgaactgatccatgctattcttgcatcatgactttttcatcttcccttgattcttttccctatatgcatttaagcctgtctggttcttttctcaagcctttgctctctactcccctttcactcaaagcatttcatgtttcgcctttataaccctagtataagtatcaaacttctcacctgtgacttttgcctctctctacatctctcttctacttttaactttcatgtttacaataagctacctttctcttattttcagttcttaccttctcaaacttcagagaatccccactgcttagtgttcttgggagatgctagaggttacacaaaatgccacctcccagaaggtcgaggcattttttttctttaaaaaaaaaaaaccttttagccaaatacttactcataagaaatgctccattttattctcagtagtatcttcagaaagatttcagaggtaattgcatctacaaaataaagacttagtgctaagaaaatgagcaatccgataagaatatgtaaaataaaaaacattattactaaattcttttttttttttttttttttagacagagtcttgctctgtcgcccaggctggagtgcagtggtgcgatcttggctcactgcaagctctgcctcccgggttcacgccattcttctgcctcagcctcccaagtagctggaactacaggcgctcgccaccacgcccggctaatattttgtatttttagtagagacagggtttcaccatattagccaggatggtctcgatctcctgactttgtgatccgtctgccttggcctcccaaagtgctgggattacagatgtgagccatcccgcctggcctttttttatttttattttttgagatggagtttcactcttatcctccaggctggagtgcaatggcacaatctccrctcactrcaacctccgtctccagggttcaagcgattctcctgtctcagccacctgaatagctggaattacaggtgcccgccaccatgcccagccagtttttgtattttcagtagagatggggtttttccatattagccaggcttgtctcaaactcctgacctcaagtcatctggctgctctggcctcccaaattgctaggattacaggcttgagccacctcacctggccactaaattcttttaaaaatctcttgagcacactaaatgatatattgaatatagctgatgaccaaatggtgttgtaaaaattccatcaggccaggtgtggtggctcactcttaataatcctagcactttgagaggacgaagtgggaggatcacttgagcccaggatcacttcaagaccagcctgggcaacatagtgagaccctgtctcttctgaaaaaaataataaaaaaaaaacattaggtgtggtggcacatgtctatagtttgaactactagggtggctgaaggggaggattgcttgagcccaggaattcaaggctgcagtgagctatgacggtaccactgcactccagcctgggcaacagagcaagaccctgtctcttaagagacaataagaaataaataaaaattccatcaaagaatttctcttagggtataaagccagagacaaagatgaaaaatgggagaaatgtccagtggttctcaaccatgtctgactgcacattaggatcatctaacatggtttttgaaaacaccattaccctggccccaccacagaccaattaaatccagactctctgggctggagtccagacatcagtagcttttttaagctcctcaggtgattctgttgtttagcccaggtttagaaaaatacttaagaaacctgaagaataataccaaaatgtccgaagtctatctaataatacttctagaagtagaggacagagacatcaaaggaaaagaaataatgctagaaaatttttctggagattcygcaaagacttgtcttcagcagttaagggccagaatatcaaggcccctgcaggaattaaggaaagaagacaagtaccttgacatatcctttcgatgggtctgaactccaaaaataaggattattatgtcttccagagaagaaaagatgggagccacagtgtgcactctggaaggaaagaaacctacctggcctaactgatccaaacacagtttctgctttttcccccagatgctgctctccagtgcattcccctagctcactcctgctttctggggctgaccccagacctagagcttctccaggctccctgggaagagctgctcttaacagttggtgtttgggaggcaactttctcttctttgctctctccttcggtctgacctcatctgctgtgtagtgttcagaaattcccccaaagttctggttcagttaggaacatgtcttgttttccacctcagagttttgcagattttaaaaactttttcttgtcatcccagcatcttcctggggagaggaagttgatgacttagtcctgtcrttcaacctttttgaggccaaatagggtaaaatcatattaaggggaataatcctgtattcaggttcatcctttagtatataatggtaacatttggatagtctaatattttctggggtttttttgtttgttttaatataatcctttgctttctgcttacttgaaaacagtaatttatccaactcagcactcagagtcaggggaagtgtggtctcttagctttgttttcttcagtaattatttgttccgagaagaaaaataagtttaccaaagaaatatctttctgaaaactctcctgttagtagcataatctgaggcaagacactgatattttaacaaagagaacaatacagtaatttacataatatacatagggaattggtagatatggctttaaaatgacttctcatttgggggacctgatagtttagttatgttaactgaartttttagtacactgttgataaaatattaagtgtattctcatttttctgttatgtctcaggtgtttgctgactagcactttggagagtgtatgcttatctgccatgtccataacagaacgaactgtgttccctttctgatgcattgggtagcaattttccgcctttggacagttcagcacagtaagctttatcatagattaatatccatagctacatagtgattttaaatccagaataaatctagggtgagggaaagaagaaaagtctctcttataaaaatggtgaaactgtctcagtgtgtcattacagtttttaggaattgtctgtccttactgtcttttttatataacattcaatcaaggaaaaagttttatttgttttgttagcttacaaaaacctatactcctaatggcttaactggaattaaggggaaatacttggaaaattcagtttatgtctttattcttccagctttatctgcttttgaaagttcaaaagtttgttttcttgttgtttttatctttgtgttttaattattcatagtacttctcttcatatggactcagtactactgacaagagccatcctctgagattactaagatgacttgcatcccttgaagtgttggagccaaaacatgaagagctaattcctttatcagatgggatttagaaagctagtaaatcagcttatacaggttgcctatttactcgaatttaaacaagccattgttttcaaaatagcaaggtgagaaccaaaagaaaatgtttctttttttcctctctcttttttttgagaaagagtcttgctctgtcacccaggctagagtgcagtggcatgacctcggctcactgcaacttctgcctcccaggttcaagtgattcttgtgcctcagccacccgagtagctgggattacaggcgtgtgccaccacgcctggctaatttttgtatttttagtagagacggggtttcatcatgttggccaggctggtctcaaactcctggcctcaagtgatcccacccgcctcagcctcccaaagtgttgagattacaggcgtaagccactgttcccagcctgaaaacatttcttcattgacagtattttcatttaaaaatttagctgaactccaaatgatgaacattcaaaagaaagcattgtctttggatgatttgaaagcaagtggcagatatcatgacacctcacccctaaatactacagcatgtgtctcctatgaacaaggatattactctgcataaaaccataatactatatcacattccaaaaggctgacatatagtagtaataagctaatatgcagtctcctgttccaagttcttatattttgtcccctaatccaggatccagccaaggatcactgattacacttggttgtcatatctctatagtctcctttaatctggaacagacctcccgtctctccctctctctctttctctctctttttttatcttttaagagatggggtctcacccttcggcccaggctggagtacagtggcatgatcacagttcactgcagtctcaaactcctgagctcaatcaatagtccttccatctcagccacctgagtagttgggactacaggtgcacgccacctttttggttctttatgttgttaacattttttcaggagtgtaggccaatggtcttgtagagtgctccacaatctgtttttgtcttttcttcctggttagtttcaggttaaacatttttgatagggatagcacataggtgatagcacatctaaatcacatcactacatcatattaggagacagagtaatagcactttttttcattattggtgatgcagagtttggttatgatgcagatcatttgttaaagtgttatcagtcagattgttttacttgaaaggtctttttccttttttaataataagtaatctgtggggtactttcccaataacctctcacctggtggttttcatttgttcagtgctttacacccagagatctattgatggatgtcagcatctctgtgaatccccaggaaatttttttgtgtgcatatattttcccaggcatacagtccaggaccctccaaatatttaagagatcttttccctctgttatcaaggtgccttttacaagtttctgtgcatcacagaagcatattataagcagtgggtttctagaagctgggaaccaatcccgttcttctgattttcctgattatctagctcacctcatgtagagctaggtacataatttttgttgtttgtttgagaacgattgttctggcctttcgcttatcctgagccaaacatttggatctttcatgtttggtataaagcgtactagaaactagagcagagagacttagcccctggtttttggtgttctcatttgaagattttggggcacaacaattggatttgtgtctctgttgaactgaatagtggtcatttggaaatgagttaaaacactacagtatatgttttagttgtctaattatagttgtatcaataagacattttctgcaagtgcagaaagactctttgactctgtagacaagaaggctcaggagatgagtttagggggcattaagtttgttattagcctaatgtgtaatagctgtaggagtgattccttcttgattttccctgcccaaacagggagcagtgtggaattcatcatggcagtggttaggtgtgttttgcttagcctatgattagcctgttggttacattggcttgccttgcatgaaaaaatgtctgtcaggtgactaccaataacaataagagctaacatttgaatagtataccttaaaaatacacattataccacttcagaagattatctgtgaaaacagatatttttattctaatcacataggtaaggaaaaaatcttagagaagttaaggtagccaacatcaaacagcttgtaaggagcagaggaagaacacccccaaattccattacaaattccttgcactttttgtcttaccattctcaaaggtagaggcattctagggaatctaaatatgaacaaagcatggaccttgctctgaaggatcttttaaacctaacaggcgcatagtcttatgaatctcttacagacaacaaatcgagagaagagctaaggaagtacgtaaaagggcaaaatggcctacaaatrgagggtcaaggttggtatgacagaagtaggatttgagagaggtggatgttttggaaacaagaaagggagtgaccagaagaatgactatgggaaagcactgggtttgttgtagaggtggaattggcctagtttggctggagcatgagctgcatgaaagaaagtaaaataaaataatggcagctagaactcaaagatagattagggccagattgtgaagggccttgaatgccacatggaagaacattctgtaggtattttgggcaggagatgaaaaatgaccctacagaaggcccaawaatgatgataaatggttaaatatgtttaagttaccaatctatgctaatcttttaagaaatgttatctcactgtaactatgaatagtgtactgtgtccattttgcagatgaaaaatgaaggctcagcaagattaaggaaactggaaatgtcaagagctgcagctaggacccagacttgggtctgttggattctaaatcctgttctgtgtctcactgtgattgatatattgtcacttcttttattaagaactgataaggtcttaatcctctgtcaagaatatggctgtagaaaaaggatgttttcaaagttgtgaagggactgcttctcaccatgttatgttaaggaatgtaatcactacccaacttgacttgtactgttctctgttttgagaccagagctagatgggaaattaaagaattggatgatgttttatttacatgcctgatgacatcaatacatgctcatagcaaatgcctttgtwttcattttcagtatctaagcttattggccctaagtaaatcttaggttaggtagagctcagttcccagggrcattcaagattcataaagaagtgatatttttcccagctaaaatatttttcttcttaccaggttctctacttaaaagacaatgactactgatgaaggtgccaagaacaatgaagaaagccccacagccactgttgctgagcagggagaggatattacctccaaaaaagacaggggagtattaaaggtgaggccacaaagctgagtgacatacaaggaaacctgctgtctggaaagattatagcatctctttctgaggggggctggggtggataatgtttattgatggttactaagtgccaaacactagagctagattctcattttgtcttcataacttcaaggttttttttaagagttgagtctcgttatgttkcccaggctggtcttgagctcctgggttcaagtgatcttcccatctcagcttcctgagtagctgggattttctttttaaattaattaattaaayttttgagagagggcatctcattatgttgctcaggcaagtcttgaaatcctggcctcaagcaatcctcccacctcagccttctgagtagctgggattataggcacgagccactgtgcccagctagagattttaatttttaatcccagattatagatgttgaaattgagactgggctaggtaaattaacttgcctaatatcatatatcttagtaatgcagatttacctggggttcaggtccaagttatatctcactctaaagggctatatttccctattctcagagtatacaaataggttactattttaatgtatccttttagtacactaaagctagctaatgacaattttgaagactttttaaggaaagaaaagctaacttgaaaaattcaaaggggttttattttattttattttattttattttattttattttattttattttgagacagagtctccctctgttgcctgggctagagtgcagtggtatgatctcagctcactgcaacctccgcctcctggattcaagcaattctgcctcagcctcccgagtagctgggattacaggcgcctgctaccatgcctcgctaatttttgtagagacagggtttcaccatgttggccaggctggtcttgaactcctgacctcaggtgatccgcctgccttggcctcgcaaagtgttgggattacaggcatgagccaccgtgcccggcccaaaggggtttatttttatatataaatattgttcctgtgtacagtgaagatatcttttgcgatttcctcttagaatatatcttacttttgaattagctttcctacttattaaagcactatacagtcattcaccatataatgacatttcagtcagtgacagactgcaccttcagcagtggtcccataagattataatggggccgaaaagttcctatggcctagtggtgccatagctgttgtagcatgggtagtacagtgtattatgtgtttgtggtgatgtgggtgtaaacaaacctactgcactgcagtcacagttatgtatagtacataatacttgataataaatgtttatattactggtttatgtgtttactatactttctatcattattttagagtgtgcttcttattttttaaaaagttaactgtaaaacacccttggctgagtgcagtggctcatgcctgtaatcccagcaccctgggaggccaaagcaagaggatcacttgaggccaggagttcaagaccagcctgggcaacatagtaagacccctatctgtagaaaaaaaattaaaaaaattagccaggcatagtggcatgtacctgtagtttctactactcaggagactgaggcaggaggatcatgtaagcctgggagttccaagctgcagtgaactatgatcataccactgcattctagcctgggtgagagtgagatcctgtctcaaaaacaaatgaacaaacaaaaaacagccttgggcaggtccctcaggaggtattcaagaagaaggcattgttattataggagacagcagctccatgcatgttactgtcctgaagaccttccagtgggacaagatgtgttggtggaagacagtgatactgatgatcctgaccctctgtaggcctaggtttatgtatgtgtttgtgtcttagttttaaacaaaaaaaagtttaaaaagtaaaagaataaaaaatttaaaaaacagaaaaatgcttatagaataaggatataaagaaagaaaatatttttgtacagctgtacagtgtttgtgttctaagtgtcattacaagagtcaaagctaaaaaaaaagtttacacagtaaaaatgttatagtaagctaagattgatttattattaaagaaagaagaaaaattttaaaataaatgtagtctaggtgtccagtgtttataaagtctacggtagtgtatggtaatatcctaggccttcatgttcactcactgctcactcgctgactcatccagaacaacttccagtcctgcaagttccattcatggtaagtgttctgtataggtgtaccattttttttcttgtataccttttattactgtacctttttctatgttgagatatgcttagatacacaaataccactgttttacaattgcctgcagtattcagtgcagtaacacaatgtacaggtttgtagccttggagcagtaggccaaaccacctaacgtgggtgtgtacaagtaggccaggccatctaggtttgtgtaagtacactctgcgatgttcacataaggatgaaatcatctaagaacacatttctcagaacatatccctgtccttaagcgatgcatgactgtgtgtgtttcttcactctatagttaatcattttcacgtgcatttcttttgttttgtttcttacaacaatgtggtgagacaatcagagcatctcttgattcttccatcttataagtgaataaactgaatctgagaaaggttaagtggctttagtcacattaaatagttatttctcctacaccattgttaacacatgtaagttttgtatagttaagttttgtttttcctgaaaagattatctgatgcattctgaatattaccaggatgctgagttttaatatctcttgtgccagcagtagcaagtaagaatttttgttttgtrtaactttgcttatgtgaaagccttctgtgcctggatctcttctgaatatatgtgaattgctattatgtgctaagtcaaattttggggacttgcagctatagaataagggctttatgctatagatttacatcctattgtctttttttagaaggcttctcaaccttgtagctatagttactcatcctaaattccaggaagcttctagaaacagtggagactttgcaggctgtcctcagcatctccctgcctctgtttacgacttaccctttcatcttttcagagtgcccatgcccagagaacatgatccccaacttgcctcagaccctgttctgttctagggagtaaatctaattgcaagatttttaggcttattaagaaacatttgagatttgaagccctttaaattatatcatttatcattgtctagagcctcggatttcaccatgaggcttttggttaagatttaaataggtctagtaactgtgcaagctagggcaatttagttaacctctctgtgattaagttcctgtttgtaaaattagaataataatgccatcaacctcatagagttattaggattaggtgaagcacttagcatagtgcctgtcctatagtaatctatcttattaactattacgtatttttaaaaaaagaaccagtgctggtttggaaattcagtaactatctgaggaagataaaagatggatttatattttaaaaatgaatagaacctagattgtgttcttaaggcaactctagatttaggtacaaattcatcttgctagggaagcctgaagtgataccatagtaccacttgctggtgtggatggctctctgactctctggtagccattcatcccacatgcccagttactgtttatagtcctagaaatgcagattccttccacgtgaggcttacagttgagcatagcctcccaaataccacatgcagttcgtgaacatgagcacttgtagaatattgtgtaatatcttttagattaatgttttgagactttttttttcttttgaagtcctagaagggcagtagtgtttctttgcctttaaagaatatttggggctgggtgcgatagcttataccagtaatctcagcactttaggaggctgaggcgggagaatcattggaactcaggagttccaaaccagcctgggcaatgtagcaagatctcatctctactaaaaataaaaaaatttgccaggcgtggtggcatgtgcctgtagtctctgctactcgggaggctgaggtgggatgatcacttgagctgagtgatagaggctacagtgagctatgattgtaccaccgcatgcactctagcctgggtaaaagagcaagaccctgtctcaaaaaataaaataaagatgtttgggcttttgagttaagaaagctgtggaatttaagttcacagtgtttatgtgatatttatgttaggtggacggtatacttgtaaaaaaagaatttaggagcaaataatcgaattatttaaataaaactcaaagcaaactccttccccaaaaagatgttcatcagatgttagctaccatcctctgttatctaccaaaaatgattaatttggcatagattacaaattaacaaattacaccatcacacacctgggtttgattttcttttcccagaactgaccaaatacattagcagcttgctctgccaagaacaaaataaatacactggattttacagtagttaaatactttactagaaaacaagttattcagtatcatatcaagcagtgcaatgatactcatgttttttacagatagactatgtttcaaataataggaaatgtaacctgttttaccaggaaattgggctttctgaaaataaacaagcagaatctagtcaggagctaatgtttttagcaaaggagggaaataaaattacacctttgaagctttgcttaagcttctttttgaatattttaaaagtccaccattctttctggtctaagtccgtgtgtatatggactagctcacaagcctgtgttagagagtttagtgtcgggcgcggtggctcatgcttgtaatcccagcactttgggaggctgaggcgggtggatcacgaggtcaggagttcgagaccagcctggccaacatggtgaaaccccatctctactaaaaatacaaaaattagctgagcacggaggcgcacgcctgtaatcccagctactcgggaggctgaggcaggagaattgcttcaacctgggaggcagaggttgcagtgagccgagatcgtgccattgcactccagcctgggcgacagggcaagactccgtctcaaaaaaaaaaaaaaaaaaaaaaaagagtttactgtcaaaatatagggcattaaaccaatgaacaggatttattggttaattctttgaaggaataaatagtgcgattagcaataaaagtagatataacataaaagacaagttggtaaaggacagttttctaacaatgagttattgtgaggaatgaagggaggcattagaaagaatggataatagtatatttgcatatctgcctggatgtcttgggatggactgtgtgacctttttattctctgattacaagtaaaaagtttgacctcctttttcttaatgtttgtcttttctagattgtcaaaagagtggggaatggtgaggaaacgccgatgattggagacaaagtttatgtccattacaaaggaaaattgtcaaatggaaagaagtttgattccagtcatgatagaaatgaaccatttgtctttagtcttggcaaaggtaagagggtatttttttgagttgtgttttacttagctttattactatttgtaatatataggagcagaggattctatcctttctaaaagtaaagaaattttagagtagtagtactcaaagaatggtctgagaatccctagggctccctgagatctttttagggggtcccaaatgtcatttattttcataacaatactaagatattatttgccattttactgtattgacatttatttgcactgatggtacaaaagctgcagttgtaaaaaaactgctggttccttaacacaaatcaaggcagtggtaaccagctgttccagtagtcatggtattttccactgccactccttcactatttacataagggaaaaagctagtttcacgtaaaaatgtcctgataaagcagtaaaaattattagttttattgaaacccaatctttgagtttcacatcactttgatattctgtgacagaaagggaagcacgtgtagagcacttctgtcccccaaagtatgatggttgtctcaaggaaaagtacttgtgctcttgttttagttgagatctgaactaactgcatttatttcatgagataccatttttacttgaaagggcaaatctgattatgcagacttgattcagtatttggcaggtgtttttctgagaatgaatggagtaagtctgtcayttcaaggaaaaacaactgacaatgttttttgccattaagttttcaagtaaaaattatagtttaggagaactcctatttgccactgtgggcttatttgccactgtgggcttgacagcttccgaagacttttctgatgagattggtgggtattaatgaatgtggttttaaatatacaatgaaatgtgtccacatttggaagatctgtataactaagaatgaatattttctcagtgaccaatgcaagatgttacaagatcatgtgtgaataaacaattcattcaaagttagaccaacagattttaatgtaacagtatgaaaagttcactgatacactttcagtttccacattgtaattgacttttatgaatcttacaagttgtacagttttgatgtagtatcagataattatattcacaattatctaaaaggttgttaaagggctcctacccttttcaactatctatctttgtgggtttggattttcttctctatgtacttcaaccaaaattgcaacagatgaatgcagaaataggagaatctggttgtctcgtgttacaagtcaaacacatttccacatgtataacattctaaaacaatgacactcgtctcactaattttttttttattttggaaaatacaaaatatacaaatactttgtacaaaattaaattacttatattaacatggggttattctaaaatgaattattaaataactacttttttactaaatctcagtagatatgtcaaataaacaagttctttggagtcctcaatttttaagatgttaaggggtcctgaggaaaaaaggttgagaactactattttcaagtattaagtatgatttttactaaattattttcaaatgccttttttttttgagacagggtctcgatctgtcacccgggccggctcactgtagcctcaacctctcaggctcaagtgatcctcccaactcagccccgcaaatagctgggaatacaggtgcgtgccaccatgtctggctcgctctgttgcccaggctggagtgtagtagcaccatctcggcccactgcagcctccacttccgaggttcaagcaagattatcatgcctaagccccccaagtagctgggactacaggcgtacaccaccacacctggctaatttttgtgttttttgtagagatggggctttgccatgttggccaggctagccatgaactcctcacctcaagtgatccgcccacctcagcccacccaaacacctgggattacaggcatgagccaccatgcccagcctaatttttttttttttttttttttgtagagacagggtttcaccatgttgcccaggctagtcttgaactcctgggctcaagcaatctgcccgcctcagcctcccaaagtgctaggattataggcatgagccaccacacctggcctcaaatgctgttaaatgtctttagttcatttaatgttcttattttttaatcttgtaggaataatagcccatacatcaaattaaactttgtagaacatgtggcttattggaagttggtggctgagttacatcttttattcttgtctgccacagacaagcaactgtagtttgttcctagattagggaaaaaagtattccccctattcaccaccatggctatgtgtggacttcattcccttgtccttcagctctgtatctagttgaattgctaactaagcatggatctggaaaggaaatatagtaagcagaaactgaggagttactttctgtctcttgccactcagccttccctgcttcctgtatcatttgtgtgcctggtgaattctgcttcccgtccagctgtgctctttccaagctccagttctggccacgcccctgctctcttctcctttgggtctttagtaggttaatggctcatgagatattaattttttgtttgaataagatagcagtaaaaatcaaatacagtcttgtggcagataattatgacagttattttagaattttgttgttgttgttgttgttgatttaggcatatgaacctccagggctgccagaatgggtgtggcatcattatttaggtgacctaagagtgactgaccttgtcagacccccttgttcctgccacctgctaaatccttactctatccttagaattcctgtcttaaagaagctgagagttaagataacaggtccttttagcagttatcttggtgagcagaattaagaattgttgagaatttatattggtatcttctctactgagattttctcagtaaaacactatggtgaatgagtttcctggaattttaagcagagtaagaagattttctgagttatttttttaaaatacaagttgggagaaaaaaagaggcaactttcagttgactttgtacctctgacacacctgtctagagtcagtgcggtctcatggaaaaagcttccagccgggcattaggaagccagggttcctgtcttccctgttccttgtggtgtgttaacatgagtaagccacttaatcttacctgcttctgtaaaaagaagtctgtggagagcttatgtgattccattcttgttccttctgtaaagaatgcgggaacaaaaaccataaaagactaataccaacacaaagagacccttagaggcctccttaagatggtaattggaaatactaggatagagcaatatacctctggtaaaacatctataacataacgtatttagttgcctacaaaacaagaaacattggttaggcagtttatagttttgtggggttttttttttcctttttttttttttttttgagatggaatctcactctgtagcccaagctgaagtgcagtggcgtgatcttggctcactgcaacgtctgcctctggggctcaagtgattctcgtgcctcagcctccccagtatctgggacttcaggcgcgccccaccacgcttggctaattttttgtgttttagtagagacagggtttcaccatgttgcccagggtggtctcgaacttttgagctcaggtgatccgcctgccttatcctcccaaagtgctgggattacaggcatgagccactgtgcccagactatagttttatacttatattttatagcattaggtagtttatcaaaatgaagaaaataatataaatggacagtagtataaatattattcattgaactccattgatcccttatattgtacctctcccaagggaataaatagaaatatttcaatggaaagtcatcctaatttggggattctagtatgacttcagtatttaacatagaactataagagcctatctgtaaaaatcccattgaaaagataaacatatcataaaatacacaaattcaagctatacctacacttgctttgtatatgtcttttgctttgtgtatgtctgttgcttttatcataccatctttttctcttttctttttttttttttctttctgagacggagttttactcttgttgcccaagctggagtgcaatggcatgatctcagctcactgtgacctccacctcccaggttcaagcaattctcctgcctcagcctcccaagtagctgggattacaggcatgcgccaccacacctggctaattttgtatttttagtagagacggactttcaccatgttggccaggctggttttgaactcctgacctcaggtgatccacccgttttggcctcccaacgtgctgggattacaggcatgagctaccgcgcctggctagccgtaccatcttttaaactctattctttactttcttcatctaaggttatgataatcatatatactacatatattatatatgattatataagtatatattattatgttgaggattaagataatgtacaccatcgcctagcattcagcctaacaaatggtaagcactcagatgttgattattattgtggcagtgttaggatttttcactggttttataatggaatggtaaaagctgtgttataacatcttgggtcctgacttcatctgttgactatgcatgcgtacaaaccttggaaacaatgctcagccatcttgcttagccccaggaagttgggaaagacagaatcaatctaagggaactgattattactactgtggaatatgttacagaaattagagtgaagaggtgatgatttctcttactaggttttcttaactaaatattagaggttgtgaattattagaactggtcatagcccatttaaaaagaagctgaattaagaacaaggattttcatacatacttctataataggggttctgttcttttaccctactccccccagcaaatatattttcactaaaatggaagagggcaatagatttggaggatgaaagaattatttctaccctttttttttttttttttttttgagacagagtcttgctgtgtcgcccaggctggagtgcagtggcgtgatctccgctcattgcaacctccgcctcccggattcaagcgattctcttgcctcagcctcctgagtagctgggactacaggtgcatactaccatgcctggctaatttttgtatttttagtagagatggggtttcaccatgttggccaggatggtcttgatctcctgacctcgtgatccacccacctcggcctcccaaagtgctgagattacaggcgtgagccaccacacccagcctcaatcttactattttttggattctttgtacaattagtataatttaggtgacaatcatattaatatttgtgtcgaagccactttggtttttttattgaggtattatttacgtataataaagtttacccttttaagtatatagtttgatgaattttgataatatttctgtaactaccaccacaatcaaaatataaaacaatttctttaccctaaaaagtatttttatgtccttttgcagtcactttccttcctggaccctgagccccaggcagtcactaacttggtttctgttactataattttgccttttgtagaatttcatataaacagaatcttgtattatctttggtgttgacttctttcacttaacataatgactttgggattcatgcatgttgaattcctgagaagtattccacaatttgggaatgccacagtttgttcacccattcaaaaataggacatttggttgtttgcaatttggggctattcagtttttcatatccttattaacacgtagtattgtcgatctttttaactttagccattctagtaagtatgaagtagtatctcaccttggtttttgtttgcatttccctgatgactagtgatgattgagggtctctcttcttgtgcctagtgggcatttgtatgttttcttttgtaaagtgtctgttcagatcttctgcccattttaaaacatcagttgtttgtcttactgagttgtacttaaaaggacaagcactttggcaaatatgatctcccagtctatcttgcctttttattttcttaattggtcttcggaaaagtaaaagtttttacttctgattaagtcagctttatcagttttttcttttatggtttggttacctactgttattaaccatttttggtttgatgtgattttttgtttactatattacagactaaggtacagagaagctcggtaaattgcccaaggctatacagtaagtggcagagccaggattcaaatccaggtagtctttcttaagttatgttagatcttaaggtttaaaacatagcccaaaccaggtacagaaatgaagtaggtcctggttagcagtatttatcgagtgcctgatatacagtagaaatttctctttttttttgagacggagtctcgctctcactcaggctggagtgcagtggcacgatctcggctcactgcaacctctgcctcccgggttcaagtgattctcctgcctcagcctcctgagtagctgggattacaggcatgcaccaccatgcctggctaatttttatatttttagtagagacggggtttcaccatgttggcgaggatggtctcaatctccagacctcgtgatccgcctgccttggcccccaaagtgctggtattacaggggtgagccactgcacccagccacagtagacatttcttaccagtaatgatatgtcatagtaaggtttatcaaaagcactggcgcttgtgttcgctcgctctctctctctctctctctctttcttcctcctcctccctctttctctctctctttctctccagagacttgctctgttattggggctggaatgcaatggcaccatcataactcactacagcattgaactcctaggcttcagtgatcctcctgcctcagcctcccagagtgctgggattacaagcatgagtcactgcactcagccaatatattcttagtatctgtttacttttttttacatgcagtttaggagcattcaggagatttttaaggaaagcttttaggctaaaatatttaatttttttaattgtccccaaaagtgtgagccagaaagacagcaaactttaagaaagtacttactttggtttttcctggtactttgcgatagaggaggaatgcttccaatttccactgctgagtggatatcagggaggagctgatttaggctgtggaaagctgagcaaatttctcactccatttaaattcgatattacatcatgcctttgttctctttttgagtacagtgttgtggtgctatagttctttgcaaagagtaattaaaacatgacccctaccttcaagtatgtaacaatttagtctggcagagttgatccttaaggctgtcccaggacagataatgctaccatatctgttttctttccctgtttgtttgtttgtttgttttaattataagccatgaaggtggggagggattatcctgtgattagttctcttagtagttagagaaatgacaaaaatacaatgtaacataagatatgaacactttaaaagagtcttaaacataaattactgtaatctcagcagtttgggaggccaaggcaggaggatcagttgaacccaagggttcaagaccagcctggacaacatggtgaaaccccatctctacaaaaaatacaaaaattagccaggcgtggtggtgcacgcctatagtcccagctttctcaggaggctgagatgggaggatcactggagcccaggaggtccaggctgcagtgagctatgatcacatgccttcactccagcctgggtgacagagcgagacactgactcaaaacaaaatacataaattaatttgtttaattcatgattagttactattggtagggagtagggatgattattagagcccttttatagctattttaaaataaaactaggccaggcgtggtggctcatgcctgtaatcccggcactttgggaggccgaggcgggcagatcacctgagtttagaagttcaagaccagcctggccaacatagtgaaaccctgtctctactacaaatacaaaaattagctggtgtggtggcacatgcctataatcccagctactggggaggctgaggcaggagaatcacttgagcctgggagtggaggttgcagtaagccgagattgtgccattgcactccagcctgggcgacagagcaagattccatctcaaaaaaacaaaaacaaaaaaacctaaaatatatgaggaaaaggtatacaggaaaaataatttgctttatttagtataaaaagaagaaaggatttctgtattatctgttatatgaggtttttcttatttttaacataaaaattagcagaatatgcaagtagttaaaatagagatcagaaattggtactgagtcctaggaatccctcaaggaaggtgaagcaggaatgaatcagatgcatttttattacctgaagcttattagtgattaaccttgtttgtcagcttttatattttgaaaggaaatcttttacagttaaaatatttacctttcttgttcttttctactcccatatgaaaaagtaattttttttctgtatgatatggtgtagctttcatcctatagtgtgttcaagatgctcatattcaaatgtaaatgtacatttaaaaggtagtgatttttcaacaagggtgccaagaccattcagtgggagaaagaacagtcttttcaacaaatggtgttggaaaagctagatatccacatgtaaaagaatgaaattgggtccttatcttacaccatctgcaaaaattaactcaaaatggatcaaagacctaaatgcaagatctaaaccttgcattagaaaccttcccataagaatatggaggaaggccgggcacagtggctcacacctgtaatgccagcactttgggaggccgaggcgggcggatcacctgaggttaggaattcaagmccagccctgaccaatatggtgaaaccccgtctctactaaaaaaaaaaaaaaaaaaaaaaattagctgggcatggtggcgcatgcctataatcccagctacttgggaggtggaggcaggagaatcgcttgaacccgggaggcagaagttgcagtgagccaagatcacaccattgcactccagcctaggcaacaagaacgaaactatgtctcaaaaaaaagaaaaaagaaaagataaagaatatggaggaaaggcttcatgacattggattttgcagtggtttcttggcatgacatcaaaagtacaggcaacaaaagtaaaacaattaaacataaattactgtacatcataaattaaacataaattagaatacatcaaaattaaaaacttttgtgcatcaaacagtaacagaatgaaaggcagcctatggaatgggagaaaaatgtttgcaaatcttatatctgataagggattaatacccagaatacacaaacaactcctataactcaacaaaaacaacaaaatagcccaatttaaaaatgggtaaaggaccagttgcagtggccatacctgtaatcccagcattttgggagacctaggtgggagggtcacttagacgccaggagttcaagaccagtctgggcaacatagcgataccctgtctctaaaaactttttaaaaactgggcaaagggcttgaaatttctccaaagaagatataaaaatggacaacaagcatatgaaaagatgttcaacatcactaatcattagggaaatgcaagtcaaaaccacagtgaagtattaccctcataccggttagaatgggtactgttaaaaaaagagaaaacaacaagtgttgatgaggatgtagagaaattggaacccttatgcgctgttggtgggaatgtaaaatagtgcagctgctgtggaaaacggtatggaagttcctcaaaaaattaaaaatagagttaccatgttgatctagcagttctacttgtgggcatataaccaacagaattgaaagcagggtcttgaagagatatttgtacactcatgtttgtagcagcattattaacagcaaccaaaaggtggaagcaactcaagtgtccttcaatagatgaatagataaacaaaatgtgatataaacgtacagtggaatatttacgttttaaagaaaaattctggcagatgctacaacatggacgaaccttgagggcattatactaagtgaagtaatccagtgacaaaaagaaaagtactgtctgattccacttatatgagttatctatccagagtagtcaaattcataaaaacaaagtagaatagaagttgccaaagattagggaaggaggaaatgcttaatgggtataaaattttagttttgcaagatgaaaaagttctggagattggttgcacaacaatgtgaatatacttaaaaatagtgaactgtgcactttaaaatagctaagatggtaaatgcttttttttatccccccacaattaagcgttttttttaaaactcaaggagaaaacattatgtagtcagaatgttctgaagtggtcactatagtctttactataaatgaaactgttaagtgattaaaatgttgtatcttaaaatatgttatataatttttttaaaccagaaaaaagtgtaacattacagaaggaagaaaaagtataatgcattgcttttatactgggctttgtatgcttttaaactttttcacctgcctatagttacatacgtataaaaagcatttaaatttagtaatagctatattatacatttgtatacatatatattcttgttttatattttattacaaatggaataagactcctgaaattgataaattgtgtataagctagtaaaactgaagtccagatcaagtgtaagaataaattgacgtggccaggcacggtggctcacgcctgtaatcccagcactttgggaggctgaggcaggcggatcacgaggtcaggagatcgagaccatcctggctaacacgatgaaactccatctctactaaaaatacaaaaaattagccaggagtggtggctagcgcctgtagtcccagctactcgggaggctgaggcaggagaatggcgtgaacccgggaggcggagcttgcggtgagcagagatagcgccactgcaccccagcctgggcgacagagcgagactccatctcaaaaataaatgaataaataaataaataaattgacattatgtattcttggtgtgtttttttttgagacggagtcttgctctgtcgcccaggctggagtgcagtggcgcaatctcggctcactgaaagctccgcctcccgggttcacgccattctcctgcctcagcctcccgagtagctgggactacaggcactcaccaccacgcccggctaattttttgtatttttagtagagacgggatttcaccgtgttagccaggatggtctcaatcctctgacctcgtgatctgcccacctcatcctcccaaagtgctgagattacaggcgtgagccactgcaccggcctattcttggtgtatgttacctatgactgagatcctgaagatgaagaatctttaaaatgtttatgctttgggggttgggcatggtgactcacacctgtaatcccagcacttcgggaggccgaggtgggcagaccacttgaggtcaggagtttgagaccagcctgaccaacgtggtgaaaccctgtctctaccaaaaaatacaaaaattacctaagcgtagtggcacgtgcctgtaatcccagctacttgggagtctgaggcacgagaattgcttgaacccaggaggcagaggttgcaatgagccaagatcgtgccactgcactccagcctgggcaacaaagtgagaccgtgtctcaaaaagaagaaaatatttatgtttttggtccagtaattctacatctaggaatttaacctaaggaaatgtgtagaagcttgcttaaccctctccagactaattgatgctctccattctgtttgcatatatactgagtgatacaactggtttcttgttctgtggtgtggtctcacacattgctcccgtcagtgagtgggccttgtcagtgccctgcagccacagaccactaggaacacacctatagttgaacacgttggttcattacttgtgagggaggatgcacaccatgcgaactgtggagtatctcagtaagagtgttaggaggaatattttataggacttgtgcttgtattaggtgattttggggagtttaagaaagcagagctttctcgattggatgctgttaggatgtggggtgattgatgtttgggtatcttaataaatcttattaggacgtgggccaactagagtagagtgagaccaaagctagaactggtagagaagcagcagtcactcatattagccaggagagggggatgtttggtattttgtgaaaatgctcagtgaccttgtttttttcctctgggcttagacaaaaaaaaawttttttttcttttttgaaatggagctggggtgcagtggcgtgatctcagctcactgcaacctccagctcccaggttcaagcaattcttctgcctcagcctcccaagtagctgggattacaggcgtgagccaccgtgcccggccagacaaaattttgaagtatttttgttttgtctcacttgaacacagtctcagagtgaccttgtctcatgttgatattttgcgagattgtttatgtcccacaggagaataatatggcctccctatgatccctaggccagcttcaaacagcactgaggtccagctgtaagtgttcaagcagtttccagacgttggggaggctttttctttctcaaactcttgttaagaatcagttgaagccaggtgcctgtagtctcagccactcagaagctgaggtgggaggatcacttgagccaggagtttgagtccagcctgagcaacatagcaagaccctgtctcttaaaaaggaaaaaaactgggctgatgcaatggctcacacctgtaatcccagcactctggaaagctgaagcagaagtatcacttgaggctaggagttcaagaccgacctgggcaatgtagcaagactccatatctacagaaaatcatggtggtattcacctgtagtcctagctactagggaggcagaggcaggagattctcttgagcccaggagctcaagaccagcctgggcaacatggtgagactgtctacaaaaaaaaaaaaaagaagaagaaaagaaaattagcccaatgtggtggtacatgtctgtggtcccagctacttgggaggctaaggtgggaggaccgcttgagcctgggaggttgaggctgcagtaagctatactcacatcattgcactccagtctgtgtgacagagcaagaccctgtctcttaaaaaaaaaaaaagtgatgtagccatttcgtaaagacagttgggcaataactatcaaatttaaaatgcatatcacctttgcacttccaggaatttacattccaaatatacttatgcaaagtaggcaaacatacatggacaagtagtctcattagattactgttggtaatatatgcatcaatagaagattgtagtattatacacccattaagaatgaggtaggtctatttgcatttattatgatgatgatgtctttcctttatcaaatacatattatgtgccgggcaccgtgccatgcatttgatgtgttttatctaataactctttatttatttatttatttttgagacggagtctcgctctttcgcccaggctggagtgcagtggcgctatctcggctcaccgaaagctcctccttctgggttcacgccattctcctgcctcagcctcccgagtagctgggactacaggcgctagccaccacgcctggctaattttttgtatttttagtggagatggggtttcaccgtgtgagccaggatggtttcgatctcctgactttgtgatccgcccgcctcagcctcccaaagtgctgggattacaggcgtgagccaccacgcccggccttatctaataattcttaaaacaactattaatatatggcaagtactgttattatttacattttgcaggtgaggagactaagcacagagattaaataacttgcacaagtttacacagatagtaaagggcaaacttggtattcaaatccaggtattctgaagttagagtatgctgcatttttgacctctaaaatgtacatcctcctttctactgatggagaaagaggatgaagatatataataaatgaaaaagtagtttagaactgaatgtctagtttgctgtcatttgtattttaaatttttttaaaaagtgacagcacacagtaggataccaaagaaacgtaacagttacttataaggagcagatggatggcctttcagctttcactttccatctctttcatgggtgttttaataataggcatgtattacttgatttttttttttttttaagagacagggtctcgctctgtcacctagtctggagtgcagtgacataatcattgctcactgtagcctcttactcctaggctcaagctcttctcctgtcttaacctccaaagtagctggagctacaagcatatgccaccatgccgcactaattttttaaatttttgtagagatggagtttcactatgttgccctggccggtcttaaaactcttgggctcaagtggatgctcctgctttggccttccaaaatgctgagatgagaggtatgagccactattcctggccacttacatatatttttaactgaaataaatgtagctgacattttgaaaagttgtaatatttaatgaagattaagctaaagtcatgaataaaaaatggtttatctatccctgcttacatactgttatgtagggtttcccttgtcctaatatcctaccaccagctcacttcaaattcacttcctctggggttcatctcttatctgatcctacttttgaatacttacatttttgtttttgttttttgagacaggacagggtctccactctgctgcccaggctggagtgcagtggcatgatctcagctcactgcagccttgacctcctggactcaagtagtcctctctcctcagcctgctgagtagctggcaagcaccaccacgcctggctcattttttaaatatatttttttgtggagatggggtttcaccatgttgcctgggctggtctcaaactcctaagctcaagggatctgcccgccttggcctcccaaagtgctgggattacagctgggattacaggcgcgagccaacgtgcccagcccccagatacttaatatttctgattgacagagtacctcatttgtcatttagcctttttttttttttttttggagacagagtcttgctgtgtcgcccaggctggagtgcagtggcatgatctctactcactgcaacctccgcctcccaggttcaagcaattctcctgcctcagcctcctaagtagctgggattacaggcacgcactaccatgcctggctaatttttgtatttttagtagagacggggtttcaccatgttggccaggcttgaattcctggcctcaagtgatccgcctgtcttggcctcccaaagttctgggattacaggcgtgagccaccatgccccaccaaaatgtaatttagccttttaaatggcctaaattttctattgtttccgaaaggacttgatactgcttacagtaagataatgatgcacatcataggaactataaacattgagattacaattatatagcctaatatagttctacaattgagcagtaaatttaacttagtttcctggaagtaggcaaaaaataaaatattttaagttctgtagttgtggtttgacaaaaagacacatatgtttttgtttaaaggaacatttttctgattctaaattttgagaagaaatgtgtttcatggacccttttatgcaatttatcctgttctggttacttcttgttttgttgttttttttgtctacccaactaaattataagcttccttaggacacactctatttttcaatactatttttgttctatctctgcctagaaaatttgcgcttattatagttgaaatgataaattaggcaacaattgcaacatagccatatttcatggataatgttaccaccagttttcaaagacttaatttttgagtagtttaggaatttatattactttcatccctttcagcagggaatcctttttgagacagggtctcactctgtcacccaggctagagtgcagtggcataatcatgactcactgaagcctcaatctcctgggctcccaggcttaagctgtcctcccaccacagcctccggagtagctgggactacaggtgtgcaccatacccagctgtgttctttggttctttggggtgttttttttttttttttagagatgaggtcttgctgtgttgcccaggctggtgtcaaattcctggactcaagcagtcctcccacctcagcctcccaaagtgctgggccgatcaacagggaatcttttrtgatagccttcaaaaaaaataatttatttatttgtatgtagcactctgtcatcttgtagcccatactttctagctgagtatgtagtatgaaaaactggaaattagaactttggttttatgaaagttaaatctttttaaatagggcttatagctttcaactaccttttcctttcccttaggccaagtcatcaaggcatgggacattggggtggctaccatgaagaaaggagagatatgccatttactgtgcaaaccagaatatgcatatggctcggctggcagtctccctaaaattccctcgaatgcaactctcttttttgaggcaagtatgtgtgtgatgttgccttgtcagcatctgctctacaataggaatggctttgaagcaacaggcagtgggaaaaggagctaagcttgctatagagaatcagatccaacttacttattttggagcatggcttcttgaattgtttcccacaaacccaagggtgcgcgtgccagtgctttcttagaaacgtgtttctagcacaaaaaggtcatatccaaataaacaaaagacgctacacttagaaataaagattctggtccatggtgtgagtgtgacatactcaaaattgaccagagtacaggatggaaatgttggcgataaatgttgaaatatgcctatgtcacgttgcggggtatttacatattataaaaatttatgtgtcacagatctcacttctctagaagccgttggtggtgataaaacattattcatcctatgttgaattacatatatttggcaaaacttgatttttaagaaccaccccagctaggtaaaatacacctttaatcagtcgtaggtcacatccatgagatttattcttacattttgagaagggaactccataaacccaggatgggaaagttgtggcctcaaacaaaatagttctacaccagcaccttgtagctctggctttttgcccacagggtagttttcctagtatttcctatctttgcactgcagtcccttaggatatagttctagacattagcattacatgaaattctttccaagtatggaaaagtatagtgggtttttttttttttgctacttttccaataattaagatgcataaatgaatgtatatattttaaaacagctttattttgtaaaatgaaataattggttgcccttgccttcacatatgttcagttggctttatttggtcttttctcagctgaattccttttttctttctagattgagctccttgatttcaaaggagaggatttatttgaagatggaggcattatccggagaaccaaacggaaaggagagggatattcaaatccaaacgaaggagcaacagtagaaagtaagtattaaagtaagagggaactagtccttaaaagttgggccatttatgtggacgaaatggagacttaaaaaaaaatgtttgtagaaatgaatatatcggctgtgcgcagtgactcacgcctgtaatcccagcactttgggaggtcgaggcgggtggattgcctgagctcaggagtttgagaccagcctggccagcatggcgaaaccccatctctactaaaaatacaaaaaactagccaggtgtggtggtgcacgcctgtattcccagctactcgggaggctgaggcatgagaatcacttgaacccgggaggcaggggttgcagtgagtcgagatggtgctactgcactccagcctggatgacaaagcaagactctgtctcaaaaaaaaagtattgaatatatctcaaagatagtcttagctgggcacagtggctcatgcctgtaattccagcactttgggaggccgaggcaggaggatctcttgagcttaggaattygagaccagccaggacagcatagtgaggccccatctctactaaaaagcatcaagagaattagtcaagtgtggtgtcacgtccctgtagtcccagctacttgggaggctgaggtggaagaatcacttgagctctggagatgaatgctacagcagagagccgtgattgtgccattgtgcttcagcctggacaacagcaagattctgtccaaaaaaaaaatagtttcaggttcaacatttatttaataattttatttagtaaatattaattcaacatctacgtgtcaggcatgctaccagcctctacaaactcaaaaatgaatacaaagtaattccatccacaagaaattctcaatctgtggactctctggtgtgccaacaactatattagttgcctgatatgtttgttcatttatttctcacaaccttaagaggtaaaatttcttgtccccagatgagaaaagttaattcagagatgttaaataaattgcccagggttacagagttactaaacagagcagtagattataatcccttttaggactcaaatacatctcatcagctgtcatcaagattaaaaaatagttcatcatttagatcaatattggataataatgttcattctattccatatcaggagacctaggttcaagtcctgctttggtgtttattgagtaacctgaagctattccgtttcttcatttgctaagtgggagtaggggcagctctgaggactgagatagctaactcttcttccctcccagagcaaattatatgtaccactgtgtatactacttgtcactttacattgtaatcagtatttgcccatttctcccagtatactttgagtgcttgaggaccagaatctttcttcatccttttgtgttcagcatttcctgcagtgcgtgacacacatttggtgttcagtaaaggctttctgcatggataagtgcttgagaagtgtcattagtgagctgaaatccttcaaaagagagttgtgagaaaacagagaaatacttccattaagaacaaaaatcaaatcattcaacaaggatgggaacatgaactattattataaaaggtctgtttaaaataattatttcaaaagccaggtgtaatggtgtgcacctgtagtcccagctacttgggaggctgagataggaggatcactagaggccaggagttcgaggctatagcgtgctatggttacaccagtgaatagccagtgcactctagcctaggtaccatagtgagaccttgtctccttaaaaaaaaaargtaaagagttcatttaaacagaaaacaagaatagctgagtttctttcttttaaagtatatactattttcaacccatatttcatttctacgagtctggcaaatcagtttaaattctgttgttttgggaagcagttacaaatattatttatcccaaattgccatttgggataagtttttgaatacatgaagagctttaaatgtagaataccagggaaatagctccagactaggagttgggagatagggttccagcctcagccctggcctcaggctggcttcaactagacttcacctctgggcgttagcttccttcctatgcagtgaggcaagcttgaacctcttgatttttaaggtcctactagccctaaaactccatcatagaattctaaatatttacaaaagttgtaggaatgatagaaaatcatcttcactatattagtaagcacttaagcttgtctataatgtgtattttaaatttttcttatgaaaaatttcaaatgtatgtacaaaggtagaggtttactcctatggatacaggcacaccctagattcagtaatttataatatatatttttaaactggagggttttgtcaactaagaggaaaaacttttcccaattatagacaatatcacaaaattaccgctgtggagatgactttagagcagactaaattaaatcagatcttgcttttggtaatacttgcgatgggagtcaatttttttttaactttttgttttgaaataattttagaattacagaaaagttgcaaaactagtatagcgcgttcccttatatgctttacacagcttcctctaaatgttaacatcttacctaatcacagtacatttatcaaaatcaggaagttaacattgatgtagtaccagtaactgttttccagatcttatttgaatttcaccagttactacactactgtcgttttctggtctaagatcaaactcaggatccagcattgtatttactttttttttttttttttttttttttgagatggagtcttgctctgtcatccaggctagagtgcagtgatgctatcgcagctcactgcaacctccacctcctgggttcaagcaattctcctgtctcagcctcccaagtagctgggactataggcgcacgccaccatgcccgactaatttttgtatttttattagagacagggtttctaacatgttggtcaggctggtcctcaagctcctgaccttgggtgatacacccgcctcagcctcccaaaatgctgggattacaggcatgagccaccgcacccagcctactctactattttgaatacaactgaccgttttgtagaatatccctcaatttgggtttctgggatgtttttagattgaggttatgcattttttgaaaataccactgaagtgatgtgcctttcatcattatcaagaggtatatgatattgatgtctcattactggtgatgttaccttcgaacactgggttaaggtgggaaaccatgtttcactactgcaacgttactattttccctttgtaattaaaaagtattaggagtgaagtactatcttgttttgtatcacaactttacacactcattttgacatttgttgatttttgcttgcaacagttattactgtggcatttgactaatggtaaattttctattgctgttattctctctacattaatttgaatcctactgtatatttattcagtttatttatatcattatggatctgtgtatatttattccataagttattattcattactattcttatttattttgttgttcacattgtcccagatttgaccattggaaactcctttaagtttgtttttgtgtcctttcaatattatccccattttttttaagtgcttccttattttctggtaccacaagacactcatggctcatcttaaaattttcctgccctagacctggaaccaaccatttctccaaagagccctgattccttttattggagaaaggcatttagaaaccaagatctgagtgctaggtttgctcctgctatgggatatcatcattcctagacccacttagcagacagagagatagagaatatatggacctcaacatacatacgtatacatctatatgtatttctacatcagcctctgtgtgtgtgtgtgtgtgtgtgtgtgtgtgtgtagttgttgttgttgttgttgttgttgttgtttgcgacagagtctcactctgtcgcccaggctggagtacagtggtgcaatctcagctcgctgcaacttccgcctcccaggttcaagtggttctcctgtctcagtctccggagtagctgggatttacaggtgcctgccaccacgcccagctattttttgtattttcagtagagatgggatttcaccatgttggccaggctggtctcgaactcctgacctcgtgatctgcctgccttggcctcccaaagtgctggaattacaggaatgagccaccgtgcccggccagcctgtatgtatatgttaaaaaccagggatactcactggcagttgcagttccagttccaatccaacaccacaagtttatttgccctttgctcatttgaaactccattctccagaagtgagaaaatgctctcattctccacagcatactcattgctcccatcctagtgtatatgtaagatggttttagaattgctaacctagacccctgtgacaaactgactttaggaaatatttgtttatagtaccttttgtcatcagtcttatagtgtatattcaaaacacttgctttccaactgaggtaacttctttcttcctcacccccttcaatgtgattatgttactcaattgtaacaaattattcatttgttaccctgtatattccattttgggttcctgccatgctctggttaattttaattattcgttttattttggatatgtgaaacattaccatgattttaaactatataaaaaacgatatactcaaaagtgtcatttccccctcatccttattaacctgttcccacttccccattatttccaccctattccagtctcattagttatatcattagatcctggtttttcttcctgtattttattacgttttatgtcattttatttttttctgtttctgttaacaaagggagccagtcgtggtggctcacacctgtaatcccagcactttgggaggctgaggcaggaggatggcttgacctcaggaatttgagaccatcctgagcaacatagagaccttgtctctgcaaaaagtttaacatttagccacatgtgatggcacatgcctctagtcccagctacccagaagactgaggtaggaggatctcttgagcccaggagttcaaggctgcagagagttgtgatcatgccactgtactccagcctgggcaacagaacaaggctctgtctcagtttgaaaaaaagagagaaagaacaaaagaaagggcaatgactaatcttttgtctttcatcttgttagaatgtactttcctgggaaattttagattaaatggttgattttactttttcactcaaaagaccgtcttggttttctggaacaaatctatttcatagaaatttattgtgttatactttcatttatcaaggttaaaatgtcctggtttttcctcctttaaacaagttagctatctgggggaggagaaaaaagattaccctaaaggtggtcctgttcaaaaccaagatcaccttgttctttttgaaatcttctcagtctttactggtttgccttttctttatagcatcaccaaatacacttagatgtgaaaccagatataaaacctggaactaggccaggtgcggtggctcacgcctgtaatcccagcactttgggaggccgaggtgggcagatcacgtgaggtcaggaatttgagaccagtctggccaacatggcaaaaccccatctctactaaaaatacaaacaattagctgggagtggttgtgggcacctgtaatcccagctacttgggagggtgaggcaggagaattgcttgatcctgggaggtggaggttgcagtgagcagagattacgccactacactccagcctgggtgacagagggaaactccgtctcaaaaaaataaataaataaaataaataaaacctggaactaaagccggctatagagtgaacaagaacaatagacactgatcacccattacaatatgttgttatagatacgtgatttactaaatttctgtcatttctgtgtaaagagacaatgaagtggtatggaggaggggacagatagactttgtaagtgatggacttgatttttgaatcttggaattgctacctgatacttttatgactttagacaagttacttaactacgtggagcattcagtttttttaatctgtcaaatgggaatagttttcactcccacaggttgtgtgacagtgataacggtttggctgtgtgcctacccaaatctcgtcttgaattgtagttcccacaatccccacgtgtcgtgggaaggacccactgggaggtaactgaatcgggggggcattttctcccatgctgttctcatgatagagtgagttgtcacgagatctgatggttttataagggtctggcagggaaaccctgctggctcttccctcttctgccgccatgtgaagaagggtgtgtttgcttccccttctgccatgattgtaagtttcctgaggcttccccagccatgtgaaactgtaagtcaattaaacctcttttctttataaattacccagtctcaggcagttcttcatggcagcgtgagaatggactaatacaaacagttacaaagaagagtgtcagacatttagtggacacttaatttcttctaccctatatattgtgtttcactaatttgttttgcttccttttaattgatctaaggaaaaagatccttgactcctctttttctttttctgttgcccaagctggagtgcagtgggccaggctggagtgcaatggcgcatcttagctcactgcaactgctgccttccgggttcaggtgattctcccacctcatcctcccaagtagctaggactacaggcacgtgccaccacacccagctaatttttgtatttttagcaaagacggggtttcgtcatgttagccagactggtcttgaactcctgacctcaggtgatccacctaccttggcctccctaagtgctgggattacaggcgtgagccactgtgcctggctgactcctctttttcttatctcctacatgtcatccatcagcaaatcctcttggctctacctaccatggttattagagacctaaaattgtctctaataacagtcttcaaattaatgatatatcttaatagtaatcttatctaaatcacatttctcaaggttccggggaaagaataacattatggactcaaaaaggtttttactgaattgtaaacttttacttccttttcataatttgtctctgtgtggaagagaaaacttaggttagtttgatgggatttattctttctcaaggaaattttgatttttactctttatatgaggatcctaatggttacaaatcagtttttagaatctgtccccctacgctttttcttgtgtcagttaagatgaccatcttgtaatttttattcaaagtttttctttcatttaaaaagttactgtgttctaaggtactctaattgatatgattatgatgactgatacttcagtctttaagtttaattgcaggtcttggctacattgctacttttcagctttgctttcttagaaaatcaaatctgacttacataaggttctaaatagctaccagttactcttcccccatcccccagtctctcacatcgtctgatttgtcaactttagtggttggaagaggcccatcaaaatgctggctgtatgtggttctctcgcctctcagtactttcagccacatttgaatgcaaagaatgcagacagtcagcagtatttttaaatgtgaaattttcaacagagtgttctacaggttccagttgttggcgtacctcctttccctctccaaatctcactgaaatgatagatggagggaacaaagattttcaaaagaagaagaagagatcaataatagygctggaaaggagaggaatgtaagagtggatcagaaattatggagaatttctggaatatgtaaagttgatgaagttgaaccaatggaaactagtctcagcaaatccaacccgagacaggtgtaaagaggacttaagcagaggtacacactgttcttctcaacaggcttaggcggaactccaagctcatggtcatctggtgtgagggagcccaagcaggctatgcagcaatcatcagggttgttataaaacaagatggaacagcggggccagtaaacctccagtgcagtagttctcaacttttcctgaatttagaattacctagggagcttttaaaaattctgacacccagaccagttaaataagaatctcacatctcagaagatggaactccaggcacaagtatttttttttaaactcccagattattctagtttgcaggcaaggactgaaaactactagactacggtctgactgtgactttttctcccaagctaaaaccagtaaggccaggttytaaaataaaatagaaaaataataaaataaatttaaaaataaataataaaacaaaatgtgcctcaaaagactccaagtgttaggacttcgactagggaaaatgaatgtattttttgaaacttttttttttttttttttttttttgagacggagtcttgctctgtcactcaggctatagtgcagtggcgcggtcttggctcactgcaagctccgcctctcgggttcacgccattctcctgcctcagcctcctgagtagctgggactacaggcacctgccaccacgcccagctgattttttttgtatttttagtagagacggggtttcaccgtgttagccaggatggtctcgatctcctgacctcgtgatccacctgcctcagcctcccaaagtgctgagattataggtgtgaaccaccacgcccggccttttttgaacttttaaaacaaatttaaaggggaaaaaagtgtaaagacagcttttcacagtaaataatactaaagtgttctgctcctaaagtcaactttcctgtgcccatcatgcccagctcatagtaaatgcttaataaatatttgtgaaatcttcacccttagatccccgcaatcagcccatccttttgcagaaaggcctgccatggaaacatatccaactgcttagaaaaatggtgccagctaactatagtcatttgatcatccagaatccttcctttataatacggccagacagcaaagaatcatcagcaaatatcacgaaaaaagcagcactaaaatggactaacagaagaagtagaagagaaccttaaaaatactaattattgtcttcagaaattgttaacaggacatcagattcataagtcaaaaagccaacttccctgaaaaaggaaagggaggacaagaaagtttctggaagttagagcatgattaatcaaaactgaaactcagaggaagggttgaagagcaaaatggacagtccctgaaatcaggtgatctgaaagatagccaaggatttctcagaacacaagaaaaaagagggatgaaaagtgaaaaagaaattagaagatatggataataaatccaggagaggtaatatgcatccaatcaaacatctaatagaaaatttcctacagggaataaaagaaaaagattcttaagatcgaaagggccagttgatagtggtacccaggaggaaggagtggtttttcacccagatatatcctggtgaaatttctgaattctgcagcttacaagaaaattctgaactcttccagggaagaacaagctatgtacaaaggaataagaatcttattcattacactaaagacaatgcttttgatcattgtctatagctatgtgtattttgaacctagaattccgtactcagcccaactgtcatttatgtatgagaacaaaattaactttttggaatttgcagactcatattcttttcgaaaaaaatactgtgggatgtaccaaaacaaaaaaataagtcaagaagcaacaactcaaggcataagaaacagtagcgagaaaaaaaaaataatttccatattggatacatttatcctgaaagatctctgaagcagtagagctgtaatgttagaagtaatattaataatgaaacagtctggcctgggcacagtggcccacacctgtaatccctacactttgggagggcgtcacttgaggccaggagttcaagaccagcctggccaacatggcaaaaccccatctctagtaaaaatacaagatttagccaggcatgatggcacatgcctataatcccagctactcaagaggctgaggcaggagaatcacttgaacccaggagacagaggtggcagtgagccaagattgtaccactgcctaggtgacagagggagactctgtgtcaaaataataataataataataaaacaataataacagtctggattctgggttattttaacaaaaggtggtgaggataggaaatgaagaggggaaggcaaaattgtctaagattattttcttttttaaaacattttttggagatgaggtcttgctctgttgcccaggctggcatgcagtggcacagttgtggctcactgcagcctcaaattcctgccctcaagccatcctcccacctcagccaccggagtagctggaactgcaggtgcacacccagctaactttttttatccttttagagacggggtcttgctatattgctcaagctggtcttgaactccagggcataagcgatcagcctgcttcagcctcccaagtagttgagattacaggctcgtgtactaccacaaccagctgccttaatttcttgttccaggggagattatgctgattaattcttttattttaagattcaggggggacatgtgccagtttggtacatggatatattgtctgtaatgccgaggtttgggcttctattgaacccatcatccagatagtgaacatagaatatagcccttgtacccctccatccttttttgcttttggagtccccagtgtctcttgtcctcatctttatgtctgtgtatactcagggtttagctcctacttataagtgagaacatgcagtatttggttttctgtttctgtgttaattcacttaggttactggcctccagctgcatctgtgttgctgtaggggacatcctttcattcttttttatggctgcatagtatttcatggtatatatgtaccacattttctttttttttttttatttcaagtctgtcaagctattctttatttcggagagagggcagggcagagtgctcagtccttggcagcggcttttgtcatggtggccaggacattgctcagctcctccygcttcctcttggtgcatccccacccttgtcttgatgaacttgagggcccatttgtccttggagaccttcagtaactccatggtgcaccgctcgtatggggtgaagccacacagctctcagatcatgtccggcacgaacttggtatatttggtcaggtgcctgcagcagyggctgtgcctgggcgtcctcatgttctcggtcaccttgtggcccttgttgaggcccatggccatagggcagcacagagccatggccgctgctctccaatggtggccgtrgcagaaggaagcccacatttttatccaatccaccattgatggacacctaggttgactccgtgtctttgctattaagaatataactgtgcttaagagtaagtgctgtgtgtggctcatgcctgtaatcccagcactttgggaggccaaggtgggatggtcacttgagcccaggagtttaagaccaaactgggcaacatagtaagaccccatttctacagaaaaaaaaaaaaggccaagcatggtggtgcatgcctgtagtgccggctactcaggaggctgtagtgggaggatcatttgagtcacatttataccactgcagtctaacctgggcaacaaagcgagaccctgtctcaaaacaaaacaggctgggcgtggtggcacatgcctgtaatcctagcactttgggaggctgaggtgggtggatcatttgaggtcaggagttcaagaccagcctggccaacatggtgaaaccctgcctctactaaaaatacaaaaattagctgggtgtggtggtgggcgcctgtagtcccagctacttgggaggctgaggcagaattgcttgaacctgggaggtggaggttgtagtcagctgagattctgccactgcagtccagcctgggcaacagagtgagactctgtctcaaaaaacaaacaaacacacaaacaatgctgcagtaaacatgtcagtgtaaatgccagctatctttctgatagaacgatttattttcctttggttgtatacccagtaatgggattgctgggtcaaatggtactttgatttttagttcttcgagaaatttccaaaactgctttccacaggagctgaactaatttccattctcatcaacactgtttaagcattcccttttctccacaaccttgccaacatctgttcttttttgactttttttttttttttttttttttttttttttttttttgagacggagtctcattctgttgcccaggctggagtgcagtggcgcgatcttggctcactgcaactcccgcctcccaggttcacgccattctcctgcctcagcctcccgagtagctgggactacaggcgcccaccaccacgcccggctaattttttaaaatatttttagtggagacggggtttcaccgtgttagacaggatggtctcgatctcctgacctcatgatctgcctgcctcggcctcccaaagtgctgggattaaaggcatgagtcacagcgcccggccttgactttttattaatagtcattctgactcagttgtgagatggtatctcattgtggttttgatttgcatttctctgatgattagtgatgttcggcattttttcatgttcgttggctgcttcttcgtgtcctttgcctactttttaatggggctatttgcttttttcttgttgatttgtttaagttcttttctggatattagtcctttgtcagatgcataatttgcaaatgttttctcccattctgtagtttgtccatctgcttcgttgatagcttattttgctgtgctgaagctctttaattaggtcccaactgtcagtttttctttttgttgcatttgattttggggacttaatcataaattatttgcctaggcaatgtccagaagagtattttctagcttttcttctaggatttatatagtttcaggccttacatttaagcctttaatccatcttgagtttgtttttgtatatggtgagaggtagacgtctggtttcctatttggatgccttttatttctttctcttgcctgattgctcaggctaggacttgccgcatactgattgctgtggctcagtaccatgctgaataggagttgttaagagtggacaccctgtttttttccagttcttaggcggaatgcttccaacttttgcccgttcagtatgatattgacggctgggtgcagtggttcacacctgtaatcccaagactttggaaggccgaggcaggaggattgcatgagcctaggagttcaagaccagcctgggcagcatagtgaaaccttgtctctactaaaaataaaaaaaattagccacacatagtggcatgcacctgtagtcccagcttacttgggaggctgatgcaggaggatcacttgagcctgggtgatacaggcttcggtgagttatggttgcaccactgcactccagcctgggcaatggaataagaccttgtctcaaaaaaaaaaaaaaaaaaaaaaaaaaaaaagatattgtcataggtggctcttattattttgaagtatgttcctttgatgcttagtttattgagggttttttataatgaagggatgttggattttattgaatgctttatgctgattgattctgaacattgataaagaggtatatatatatatctttaaatgatttgttcagactttaatggaaagtactagtaagaatagcatgtagaatttccaaatcaccccatgtggagtggggaaatagaggaacaaggaaaacttcatcaattgagcaaaaattgttttaaaaaataagaaaacacgggccgggcacggtggctcacgcctgtaatcccagcactttgggaggccgaggcacgtggatcacgaggtcaggaatcgagaccatcctggctaacatggtgaaaccccatctctactaaaaatacaaaaaattagctgggcatggtggcgggcgcctgtagtcccagctacttgggaggcaggagaatggcgtgaacccgggaggtggaggttgtagtgagccgagatcacaccactgcactccagcctgggcaacagagcgagactccatctcaaaaaaaaaaagaaaacactgtgtagaaaaccaaagacaagaataaaaccactcatatcagtgattacaaaaaatatgaatgggataaagtcacctattaaaggcaaaaggtctcataaagtgagaacaacaacagtatctagctatgtgttctttataaatgaaacactaaaatcaaaaaggtaccaaaaattgaaaatagaggaaagattacgtctgcccatattgagatctgatggagctgtgagactttacatttttgtttttcatatgcttttgaagtatttatgaatgtcctgggatataagtctaggaataggagcaaattcttgaaaccattttattatatgttttcacaaaataatgtaatatggtacttggtctaaagtggccagtgtttattctttcaaatattttggatttatataatttctttcttccaaaaagttatcttcaagtcttcaggtagaataaaatcatagtagaaaataagtctttctggccagccatggtggctcacgcttgtaatcccaacacttcgggaagccaaggtgggagggttgcttgaggccaggagtacaagaccagcctggcaacatggtgagaccccattcttaacaacaacaacaacaaaatagccaggcgtggtggtgtgtgcctgtagtcccagctactagggaggctgaggaaggagagtagcttgagtccaggagtgtgaggctgcagtgagccatgatcacaccactgcactccaggctgggcaacaaagtgagacccccaactcaaaacaaaaacaataaagaggccgggcacggtggctcacacctgtaatcccagcactctgggaggccaaggctggaggatcacttgaggtcgggagttcaagaccagcctggccaacatggcgaaaccccatctctactaaaaacacaaaaattagctgggcatggtggtgcgggcctgtagtcccagctacttgggagtctgaggcacaagaagtccttgaactcgggaggcagatggttgcagtaagtgaaggttgtagtgaggcaagatcacgccactacactccagcctgggcaacagaacgagactctgtctcaaaaaaagaaagaaaacagtcttttgttgctgctgctgctgttgttgttgttacaaaaaaaaaaaaaattccagccaattggccatttattttagaatagtattaaaaaacaaagtttccatatcaatataaaatttgtatagcttcctagaatttattaaaataggaatactaatagattcaaaaaggaaaatttgtataaattagtgaaaattaccaccctgtccttaatgccctattttaagattagtcattaaataaatatttacttgctggccctgaactctgtgctgggtactgtgaggcacaaaagaagtacaagatactgcctttgcctactaagaattttattcatactttgacagctttctgtgttgaaccagtaaatgttttcttacacagagctctaaaacatgtttaatctggtataatttaccactaggcacaggaaaataattatagctaacattcctttagtttgtctctgtatatccacacttaacaacagcattttcacatgatagacaccctgacatatgaatgaatgaatgaatgaatatcaggtgctagattaaaagctctaattcagtatctaatttaatcctctcaacaattatcatttagctagtgtattatccacattctatcagtgaagaaactgagcttcagatcactttaattaccttgcccaaagtcataattgaagtggcagaatgggactggaatccaggtctaactcaagtgctatagtggtgtgaagggaagactggtaagggttggtgttcatggagaatttgttgctgggtgtatacttcttgtttagatttcctgttttgaaaacattcaaacttgatcaaccaaaagaaatcatttgcataaatgttattcagttccaggagccaggttccacgcctgttagcatctgtccgtcagttctgtaagcaatcttacagtggtgtgtgttcatcctaagtagtacaaaacagtgcagaggaggaaggcggacagcttaggggaaatctgaccaccatgcgtgttggaagtatttctcttgttctcctgcttttagaaagccatctctgcttgctttttcagggggttattaagatcctactctcttggatactgtgctctattaggcaggagacacaggcagaaagaagctcacttggcatgaattaggcaacagagaaaactcttgctcagtgggagtaacctgtcacaacctggttttctctggccagataaccagtcttgtcgagtagtaatgccattacaacattcccattcagatcctcatgacccagtaattgttttgagaatgagtgcaaagctatcagacaccaactactataattagaaaagggaaaaatagacacttaccagagctaatgtctttaggctggagcatttacagctttttgttttttgttttttaagttatggagcctctttctcagttttgcttcctaaaatacaaattgcatggtttaggggttcttgcatttcatttttgttactgctgtgcactctctttccttttttcccccctattttaatcggagtacaaattgctgtcagcacatcgagttcatgtgccagccacattcagaacagggtgttctgtgctcttcaaaacaaaattgctctagggcagtaagagaacaataagtcagagctccagtttaagtgatgttttgcagctcgcttgatgtggttacactccgattgcgcagctaagcttgggtaatttggtttggtttgactttgtggggatttggaggacctccctccccctttaagttacatagtctttaagtcaagaaaaaaatgttgtctctttttaacttgtttatttctttctctaccaaaaaagccctaagtagaagcatcctgtatgtacttttattctctttgggcatgtcatagatgatttacttcccgtaaatcatgctggttgggattagcaacagacctcctgagccctacaggctgcactcccagtgagtcacgatggttattattaaatatttattaagttagtatttgcactaaaagatgccaggtcaaaaagcaaccacagggcttccacagccagagctgccatggtttttgttctgttttgttttggtaggaatttttaagataacattaaaaagaataagtggagctataggagctaggctcatctgcatctgttacygcaatcagggcccctactgtggcaatcagcagtctttccgtggctccaagtggtgtgtgagttcttgtcagcagtctcgtagaacttttcacatcagtgttccaagtttagaaaccagttaacccagcaatgccctttgctacttgtagatgtagagaatcaatgggctgtattcaccatgaggctgtgatacctccttttactctgacattccgaatgttgtcagtattacaaggcgatggttttggttttttatataaactggggtgtatatgtctggatgtatatccgtttaagattttatagtactgcagggtccaattgtgaagggttagatttaccaggaaaaaaaagattagtccacatgtaaagtagaaaatatttataagagctatcacaaatgtttactgtcctattacagcatcagacactagttctgtcatttattgtctctctgagaagactagctacaatgaatgttttgctttcttaattatgcctttgttacagtttgacttttttttggcatggttacttcatttatctttcccaacatgtttattagtagccaatctttttccctcactaatgatgggttatcacatctaaagagaacttctgaaattactcatttaattttaatatcaagtacatacatcaagctgaaaaacagcctaggaaactaacgcacaggcaggaatccttgcagagtctctggatttcctgttttgaaaacattcaaacttgatcaaccaaaagccacaacaaatgtactgataatttcctcccccactaaatgtactctccttaagggaggaagatgatacttccaacaataaacttcagacaaaaaaaatctgttaactaagttgtgagctactaggacaataaatctctatacttgagacattccacaatacatgagaaatttactttgctcagcaaatctttttttttttttatgaaaagtgttattagtctaaatttcttgggcagagttttaaatatttagaaatgcaaactttttagaactcttaacctccttagaaatatcaatttttactccagtaaaaatatctttttttttttgagacggtctcactctgtcacccaggctagattacagtgccgcaataacaactcactgcagcctggaactcctaggttcaagcaatcctcccacctcagcctctcgagtagctgggacttataggtgtgcgtcaccaccctcagcgaattcagtaaaaatatcttaagcctcagactccctgtagaacctctctagtatgcatgtacagtcatatgctgcataacattttgtttaacagcagattgcacataggacagtggtcccgtgagattataattccatatctttaccttctcaatgtttagatacacaagtacttaccattgtgttacagttgcctacaatattcagtacaataacatgctatacagatttatagcctaggagcaatatgctataccacttagccgaggttatagtaggctgttccayctagatttgtgtaagaacattctaagatgttcccacagtgatgagaatacctgatgacacatctctcagaatgtatccccatccttaagtgaagcrtgactgtatttgaaaaagtttaaatttgaatttattttttaaatgttttccaattcagaatgaactttcaatttgctacaagttaattttatctagagcattctaaaagtaagtctaacagaaggaattatcagcatttatgagtgtgggacataaactaaaatgccatatgcgagctctaccaagccactccaactctagcccttgtttggaggagctgactcaagagttaggccctttctagtttggcccaagtttcttagaccccattctgtgtctgcaaggggaacacatcaagatggtattaatactggtgagttaaaaaagagtagtgagtactcacttcggcagcacatatactaaaattggaacaatacagagaagatttagcaaatcgaaaaaagagaagaaaagggtagaacgctttagagcataaatgtccaggggacatttcggcccctagtgtctacaccatttctgttcattcttcagtttttctcatttctcaggcctgggctaggggtaattcaattaaattattaactgcaggaattagatttgaagctggtttctggactataytgatattgagagtgatattaccaggtcatagaatcatagaattttagagcttcattgagatcatgtagttcaaaagtagaataagttagatttgaatttttatttggaaggtaatagttgttttattgggcatggaatgagtataacagaacgagtgatttttagtctctctacaagttgttgatctaaagtagatcagccagtgttagaaaagaagcattttaggaaatctctagatttgaatataggctattatgttacagaagtaggaataaaggattttctttcttttttatttttatttatttatttttttatttattttgagatggagtctccctctgttgcccaggctggaggctggagtgcagtagcgcaatctcagttcactgcaacctccgcctcccaggctcaagtgattcttgtgcctcagcccaagtagctgggattacaggcacgtgccaccacacctggctattttttgtatttttagtaaagatggggttttgccatgttggccaggctagtctcaaactcctgacctcaggtgatccacccgcctcggcctcccaaagtgtgggattacaggcgtgagcaccgcgcccagtcaggattttcttatgaaatccaaattatcatattgcttggtgactgttatgctgtcataccagccatccatttttcttattacatcaaaaacttaaaatagaatacccttaatattaaaagtagttgtaaagtttcagagaattgtttttcctagaaataaagagtctaggccagacctggtggcgcatacctgtaatcccagcgctttgggaggctgaggcgggtggatcacctgaggtcaggagttcgagaccagcctgggcaacatggtgaaaccctgtctctactaaaaataacaaaattagctgggtgtggtggcacacacctgtaatcccagctacttcggaggctgagacaggagaattgtttgaacccaggaagtggaggctgcagtgagcagatatcaygccactgcactccagcctgggtgagacagagcaagactgygtctcaaaaaagtcyaactcatcaagaaaaaatagatatctgtatgcattttttctattttgtcttaaaatatgagaaaaagcctcttattttaatatgaaattactctgggaaagagcttggtaaattggggtggaacggggaattaggcctcccaaaattgacctcctaatatttcaggggaggttattaagtaatttgatttgtgaagttatagtagactattgattctttcacactttacatttattatttccagtaagggatatagctaagatagttattgatgttgttgtctttggatttaccatttttattcagatatatttgtgaatgagattaggactcttaaagaagaaggagcatctgtattcatttaatctttgtatatcattggagaaatagccatttagttggctttttggcccaagcatctgaagccaagatgcagttacagatgtttatatatttgatattaaatttgtggcatttgataactttattaaataattcagcatctcttgactttgtattataggtgaggaaacttctgtcacatagtaggcttagaataaacctgtgtttctggtttgttacctactaaactgtcttattgatacaaatatcagtaattacaagtttaatttagaaatatggttgctcctaaactttcagactgggtagactaagcttcaccaagacacactgtgtgtgtctcttgatgaaatgagaaaggggaaatggtatttgctacattgtcgaccactcatttatcacttcactgaattagccagtcctaagaagcagctctgttgactctcctgtctccttgccctcagtccacctggaaggccgctgtggtggaaggatgtttgactgcagagatgtggcattcactgtgggcgaaggagaagaccacgacattccaattggaattgacaaagctctggagaaaatgcagcgggaagaacaatgtattttatatcttggaccaaggtaagcagcataccagtttggaacacagtgaagtcacctaaaggacagggatatgcttgctttttcattcagtgttttggcattttcagtgaagttaatccaacaacggaaacaattaaatcaggctgcagttagtcatcacgtaaattaatgggccttacaatatcatagaggtttgtgagcatgtttacttgattgatatatgttcagaacaggtcttacagccactttttgcttttgtgatgatttgttttgcctgcagtattgccaagacaggcagctatggacccctctcatatgtggttctcttaccccctcttcccttttctctaagttaggcaggaggcaggaaaacatgggggttgggagtcaaagaagcatttggatgatttactaccacttgaacttgtgccacttgttcttatacagagtccctgaaaaaaaaagcacattcttcctggatctaaaggcaacagagatgactcattttttgtctaagtttttcccatcataaggatatccattagcactttcaagcttagaaccatcagacactgacagtctctcttgtgaaaacatgtttagtagtatttttagatctaaaattataccatgaatccaactcttctgtcttgagaaacagacccctgagagaacccggggtgttttgattttgtctgcatgagagtgcatctgcttatctagtgtatcctccctccggctccatggatttcagacagtgggattctgagttactgagaatcttgatgacctgcacttgccagtaggtgatgttaagccttttgtggtgtcattttatagactctgtagtaatccaatggcagtttacctttgccccagcacttgatccataatcatatatatatatattttgagatggagtcttgctctgccacccaggctagagtgcagtggcatgatcttggctcactgcaacctctacctctgggttcaagcaattttcctgcctcagcctcccgagtagctggcattacaggcacccgccaccatgcctgtctaatttttgtatttctagtagagacgaggtttcaccattttggccaggctggtctcaaacgcctgacttcaagtgatcctcccgcctcagcctcccaaagtgctgggattacaggtgtgagccaccacgcccagcccataatcatatttttgaggtgatctagccatgcaactaccacttgaaaatccttccaaagtgctctaccttgaactcttcatagccgtcactgaggcaccctttgtataatggcttctttttctctacctggttcctctttccactaactatagcccccacttcaatgtgtcttatttatattaatatttactctatatttgtagtttattcttaggtgaaactaattctgtttctaggagatactccttaaaattcagatagagcatagaaaaagctatctcttccatatccaaataatctctaattacttttttttttttggtaacaggatctcactctgtcgcccaggctagagtgcagtggcacagtcacgctcactgtagcctcaacctccagggctcaggtgatcctcccacttcagtctctagagtagctgggactacaggtgtgtgccaccacacccggctactttttgtattttttgtggagacagggttttgccatgttgcccaggctggtctccaactcctggactcaagtgatccgcctgtctcaccctcccaaagtgctgggattgattacaggcatgagccactgcgccaggccatctctgattacttttaatcagcatttcaaaattacagtagttctaaactcagagaggtggatttatgtgtaatgtatattttcaaaatttaagctcccttaggataaattctgtatgtattatgacaacataatgttataggaaccagtttatatacattacattttagcctggctgacaaggcaattgtggggacagatgtctcaagtttagtgacaaagaaaaatagaaattgtctttaaattttttaacgcaaacagttcttttcagatttaaactgtttgttgtatcattagtggttacactttgctctgtgcgcttggccaaggcacttaaccctcctaagcttcagtttcccctctgtaaatggggatgacagtatccatctcataaagttatggagagctaaataaaatcctgcacatatagggcacacatgagcccgcagtgtgtgagcttttgttgctattgtgacggctcaccttctcttccattttaccctcggaccacaagaaaaaggaaatcctgtttaacatgagatcaatctttcagatcttttcaggcataaaagttgtcaataggttttcataaatttctaggyataaaagtttatgagttttatggaaataatttagcatatttagaaaggaacattatttttgttcaaggtgttggtatgttggagaattatgtgaagtgcattctctgtaatatgagactgctgcatatgcattgcgtagtactacatatatatgtagaaaacccctacrtgctatatatgtgtgtgcgtatgcatactgtgtgtataraaaaccccctacatgctatatatgtgtgtgtgtatgcatgctgtgtgtgtgtatagaaaacccctacatgctaagcatgttttcagtgcaggcagtgaatttacttgttttattcagcttcccactttcataaaacattgcatctaaatgttgctataagtatggctgttgcagaaaatatctgcaaatagctcttagtgtcatctgtatttcattctccagaaaatttccaaggcagaccttctctgtgactctgatactctgatagactctcgggaagaatgttttctttctgtccctcccccaccccccgagacagggtctcactttcacctaggctggagtagggtggcataatctgtagcctcgaactcctgggctcaagggatcctcccacctcaagctcctgggtagctgggactacaggtgtgctccatcctgcctggctgatttttttcattttgtagaaacagggtcttactatgttgtccaggctggtctcaaactcttgggctcaagcagtcctccagcctcagcctcccaaagtgcttgggattacaggtgtgagccaccacacctggcctagaatgtcttcataataagaaagtcataaaacatttccagacaatccatttttctttctcctcattgggacaatatcttccctttgtattgttttaaatactgagactaataaatcttttttgttttaggtcaagtgtatatagttttaacttttttttccgtcctttccttatgtttctgtcacgcatgaaccccaaacaaaaacacaggctattggtcaggcaaggtggctcacacctgtaatcccagcactttgggaggccgaggcgggaggatcacttgaggtcaggagttcgcgaccagcctggccaacatggtgaaaccccgtctctactaaaaatataaaaattagctgggcgtggtggtgcatgcctgtaattccggctactcgggaggctgaggcaggagaatcgcttgaacccaggaggcggaggttgcagtgagctgagatcatgccactgcacgatgcctggggtgacagagtgaaactcttgtctcaaaaataaaaataaaaaaacagactaccaagagccataatgtctagttatgaggcagtatgagtccaaaaaacctgattttctggggacacacagggtctgaatttaaacctggctctaccactgcctgtgtgtgacttctcaggaagcactctgtgtctttatctgcaaaaagggagcaattggtaagagcttgtagtccaagtgcttcttatatgcacattaaggcttaatggtcattcatagtcattatttgtatctctattctctggaggaaactcttaattcaagggcattaacgctgaattccttctgttaccatagtctagattatcttttggttaggtcttgggattcctcttgtggtgttttgtttttcagtcagatgagttgggtgccctggttccttcttcacccaggctgacaactttctgtgtaatatggaagtcagggtaggtgctgccagaatatcttggcgtgggcttccacctctgcaggatcatgtgcgccacacgtatcttgactgaatcgcttcattttaacctgggagagattgtagaaataatatttttctttagtcttctttaatcccatcaataataggacacttggtgcctcccttgatacagccccacattccccacaggcagattttctcatcctcagcactgttgacactttgggcttgctaatccttggtcatagggggctgtcacgtgcattgtagaatatccagcagtattcctggcctcttcccaccagataccagtagcacccccatagttgtgacaacccataatatttctagacattgccaaaggtttcctggagggaagaggagttaaaatcaacctggttgagatctgctggtctaaggcaaatgccagatcatttgttgcatttgcaactgcttagcacaggactccaaatataacatgctctcagaaaatatgtgcttagcaaggactcacctacctacctgggtagttaaggaatttttttaaaatttattagatggcagaaacaaggtagtaggtatatacatctaagagctcaaagtagaaaattaggcatcacttcttaaaattggtcactggtaattatgtctttgtggaagataccctttgccccgctcctcattcctaccagctctcgtatctctattcctctttttggctccagcttccattttctgtgtaacagtggaggtgagtgagtaagcatttttattcctggaaaatccaggcaaagggtaaagaaagtggtgcaagcaacaaaatttgagtgttcccactctagtccctttgccccagagaaaactggaggtattagattaagtcggttttgacatctttcaacctgtaccttgaaagcttgagtttactaagttttttgtaataccatttcatatattaaagaacagctttgcttgcaacaaatgggaacataatatatttcagtgaacacttgactaatatgctgggccttgttctaaacaaacactgggaaacaggtgaaccagacagagctctgctacagctcccattctagtaaatatctgcttcccgaatacatttaatttgctggagatcttacatgatcccaagaaaacaaatgtatatgtcctcagttatttttttcagtaagttttggctaaaaggtatagaatcctacactctgatagctataagccataagaatatttctctagaggaggtgtcagaacttgctagggcagctatttttgagtatatcattatgttatttgtgtttcttcatgtgcttttaaaaaaacttaaatagtgtgaaaacttttctctcctgatgtgtgagcctttccccttcacttatgtgactggaagtggtactactagaagtgacagcactttaaagttaaaagcttattaaaacatacctcccgtgagtaccactctaacaattacagtggctgtgtcttctctgtcctttttgctgataaaacttaggggaaaattcctggcagctaaatcatggccattttattaaaaaaaaaaaactagatatgaaatcaagtagagaaaaagacagtgacatttaaaatcccatgaatcaagctgccccaaggagtacaggtgttgcattacatgtgaatgtgaaggagaaaagaaaactaaacctagcctggtttctaagaaaactgtagcagtgaagatacttcacactgtatcttctggtcaacatctggtttgtcttcagggtctctgacacatgtagcttgcaaatgatagctctgttgatgcctcaaaatactgaaggaagtgcctggaaatacaccaatccttttaaagttttattttttactctccatttcagatatggttttggagaggcagggaagcctaaatttggcattgaacctaatgctgagcttatatatgaagttacacttaagagcttcgaaaaggtgagaaaataccaacttccttaaaattatggtaggtttcttctccatccacttcctataaatcagtatcttatcttagtaggtggtatagatagatggtgtttattcattatcaagtttgtctcttgcctccaacactgctgctgaagaatagaacaactgacatagcacagctgatatacaacgaaggagctccgtgttcttattttgttcctatgtgtcagcttttttttttttttttaacttttttgggtagaatccaagacttgttcccttatttgttcctagacttgttctttttgtactttttttttcctgggttgaggacagaaaggttcacgttctgccaagtggctccttgggggagtggggtgcagcttttcagagctgaacggattgtacccttcacaggagtcacgaagaggcctgcactgtggctccaagttgttatcccaactgcaagtcctcgagggccactaggctctgtgaccagagatacaagaaagaaagcagctaacccgaagccattttttttttatacttctccaagtagagaagagagagaatttgtcagttgccttggattccagaaacagcatgcctccttgaacatatttccatctcagtttcactctggaggctcccagcagcagccgacctggacacacacagcatatacctgagctaggtatgctgttgtcttcggccacgtgcccctggcatttccaaagccccaccctttgtggagctcaaggactgcatttgtgttccttttttattcctgcacagtgctacctccacgttctgtacattcaacttttttttttttgagatagggtctcactcttgtcacccaggctggaatacagtgagcgcgatcatagctcactccagcctcaacttcctgggctcaagcagtcctctcacctcagccttccaagtagctgggactacaggcacacgctaccacacccagctaattttgtttattttttgtagacatggggtctcactgtgttgccccagctggtctcaaactcctgggcttgagccatcctcctgccttggcctcccaaagtgctgggattgtaggggtgagccactgtgcctgaccacattaagcacattaatataaatggaaacatgaccatttatattttgttagattcagaaaagaaatcattgtcctgtgggcctgtacctttgggctaagaaagtgaggggaggcctgctttgggattcacccccagtagtgacattcctaatcatacctcttctacttcatgttcccccaaacaaacatatgtctggttatgaccactgattgttgtcatgtaacctcttctgaaggcctgctagctcagcactgatcccccaatgctgttgtcatagcatatggtgtttttttattgttaaagagagagaagataatctttagcatgtggttatttagacctatggctttactatttccatttttgtaaagcagcctcttgccccttccttctcgtggcccagtggacattgcttatttaggagcactctcccagtggtgtgccacagcaagcctgtgctctgtcatcactccaagagtatattcatgcactgctgcttggtatatttgaaatcacatgaaggtatatgatgttgtttggggcaatgtgatttaatcctctgccttgttaagaatagactaggccaggctgggcgctgtggctcacgcctgtaatcctagcactttgggatgccgaggtaggtggatcacctgaggtcaggagtttgagaccagcctggccaacatggtgaaaacccatctatgctaaaaatagaaaaattagctggacgtggtggcaggtgcctgtaatctcagctattcgggaagctgagacaggtgaatcgcttgaacccaggaggtggaggttgccgtgagccgagatcatgccactgcactccagcctgagagacagagcaagactccgtctcagaggaaaaaaaaawawatatatatatatatatataaaaatatatatatatataaaaatatatatataaatatatacacacacacacatacacacacatacttatattccaggcatggtggctcacacctataaatcccagcactttgggaggccaaggcaggattacttgagccgaggagttcaaaaccagcttgggcaacatagtgagacccccctctctgcaaaaaaatttaaaattttcctgggtgtggtagcacattcctatatttccagctactcaggaggccaagataggaggatggcttgagcccaagagtttgagaccagcctgagcaacatagtgagaccccgtctctaccaaaaaaaaaaaaaaaaaattagctggacatggtggcacatgcctgtggtcccaactactcgggaggctgaggcaggaggattgcttgagcctgggaaatcgaggctacagtgagccgcgatcgtgccactgcactccagcctggacgacagagcaagatcctgtctcaaaaaaagaaaaaataaaagagtatcctgtctcaaaaaaagaaaagacaacagagcaagatcctgtcttagaaaaagaaaaaataaaaaaaaattccataaagactgaagccaacctaagaaatacaaagagacttattaactaggtgttctttgtttttgttttttgggtgctaaaacctggaattgaaccataactaggtttttgagtaatttgagctacattattaggaagcagaattacatgagttgccagaaagatgagtaacccttttattattcacttttaaaaagtagaggatagtcactgggcgcggtagctcacgcctgtaatcccagctgaggtgggtggatcacctgaggttgggagtttgagaccagcctgaccaatatggagaaaccccgtctctactaaaaatacaaaaaattagccgggcatggtggtgcatgcctgtaatcccagctactccggaggctgaggcaggagaatcacttgaacccgggaggcagaggttgtggtgagccaagatcacaccattgcactccagcctggacaacaagagcgaaactccgtctcaaaaaaaaaaaaataataataataataataaaagtagaggatagcaggggctgtgacaccaggaacacacactcgttatcttttgaatagagagaattttagttacccatttaaacttcataatttatatgcagtaaatagcactgaccacacccactgtcacttttcctaaaggctcccagattgttctcttgactctggtccttctaaatccagcttgtaaatggcaagtgcagttatttctggatttgtatctgtaatggtggaagtaataatacacacaatacaagctagcagatgataatgaagtcatttatttatggctctaaagtgatatttttgcatgagctttactcccaattatgttttgcttgaagtcccccccagtatacatctgcaagttgatacaatttagcagtattattagtatatctggttgttttagagtggcaagacaacctgacccagaattttgaaaattctgtatgaatatacaaactacaacttgactacagtcatgttcccattttagagttgaaaaacaggcttgagagaaacagcctagtggagaggtttgcagagggagataaggcatggccttaactttgtgtgggttcaccttgtatttctaaagatkcactttgtagcagtgcttaccagagtacgttccttactgtgtttttgcggctcctctctcttgagcaacattrttcaagctacagcttggtcatgatggaaagtgagttcttcaaacagtatgaagmagcactggcctagcagtaaattggcactgacacacaatttcaacagccagagtgttttcagtttggagtatcttctagaattagctgctctttgttccaataggcctcaactgatgcttttctctctgttcatctaaccattgtcacaaatttacacacaggccaaagaatcctgggagatggataccaaagaaaaattggagcaggctgccattgtcaaagagaagggaaccgtatacttcaaggtgtgtgagtccctatgcaatcctttccatctcaaagaatttattcaagtgttggtgaattgtgctgatattccctactctgaattttgtcaacactgcttggtaagaataagctgcaatttttataaatctgtcattttcaatatgaaaaatggtgagaaaacaatcatgtggaaaaaaaaaaaagtacagattcctcttttacacattctgctctagattgtaaccttccatacaggcagaccaggtctggcatccccacccaccacagtatcactcactcctaaagcatcttgcttggtacatagttggcactcaacaagtgtttttggaatgaaaaaagaatgaatagaataattgttagcaaagaatggaattcataagggtaagtttcacatcatttttctttcttcctttttttttttttgtatgagagacagggtctccctttctttcccaggctggtctcaaacttctagcctcaagcaatcctcccacctcagcttcccaaagtgctgagattacaggcgtgagccactgcaccgggcccatcttcctttagactgtcttgatgaagtcactagagcatatgataaaaggagagaggacatgcacaaatttcaaaacaaactgacaggagagtattgattgcttctaatggccaagatgattcctgcacacttgcttttatgaggaatctccggatattcctgaatgatattcatcataaattgcttctcagaaacccttcttggagcaactaggagtgtgatattttctcacttagatcttaaacctctagatgtaagaaaaaaagaaaccgcccttcattctgttttaatcagtgttctacccattgcttccccaccccaaatatatgccttctccatgtcaagcagaaagggcttagtgatgagaattagagggagaatgggagttctgtcaaggtttctttcgttttctgccactgcaatacagaaattagatgtttttcagcagtataaagcagtgaggcataagtgtactttaacaagtctttatggggcatctgctataagacatgctattattaagttacaaccttgtcaggagggaggagtggcaatgttaatccaaatgaaacaactagagaattatgtaagaatatataatcaacccaaaattaacacagccagagggcaccatgtgttttcagaatttgagctgagacaatattgggtcatgaaatcagttttgtggaagtgtattgcaatatgttataaggatcagttttgttgcataaaactttgcttgtgtatgagtaagtactggattgcatatttcttactgtgggtggtattcaaacaaattttaaatcatgggtttagataagtataaatatataaatatgttatttatcattatttactatgtatactaaactcttatggatcaccagaaagcatgggggtatgatagaataagctcagaattgggaaaaatgggctttattgctcttcaaatgatttagtcatttaaggtccaaagaggttatattttcaagtgaaaaataggggagttagatgttccccaagtttctttccagcctgaatttctgtgagtttctaaactctcaagaacaagtgttatttttttggttttgttttgtttttaattctaattgaggtatattggatacttctaaactattcaagtaagattccaagtgggttatttgtatatccaaatacataatacactagagggaaaaatgtttctacaaaatttcttaagatcgtgagtccttaacagtattttctatatttccgaagtccataaaaatccttaactatattttatatatttcctcaatacttccaaatagaatattaacagtttgggaagatttgaggcttttggcctttgactagaattatatcgattcagtgtagtaaaacagctcagctattcagaggctctaatcggtgctatgatacagaattttggagaacattattggtaatgaaataatgttatgaagccatctgtcatatagctgtgttctgaatatatacagagagatggccagaattagtgatcagtagcagaaagcaatgagtgtctgtacagttacttaactttgttgcttatcagcatcacaactgcaagagtgatactattatgaacctacttaaaattaccaatctttggataaaatctggatcagcagtcacacacatggaaaaaattatttttaacatggaatttgataggcaaaatttttcaaaacattagtccattggggaaaaattaatgaaaggttcaaaaccactgacctgagacttttctcccagaatgtctctgaacattttgtaccactaaaaacttccctggaggcacctttataattataggtaaaagatcccagcagtagtcctagcgttagctgtaaaacttcaaaatggttagtagatagtttcctgtacatattcccttcccaactcagggcaggtttcaatctgccatactgccctcccgggccttgtctttccagggtgtctgacttggcatgttatgcatttgcacagagtccagatgtgtaggtgagagcagagatgggctgaactaaagatctgtatttcatgccatctgcatattggaattctgtttccattgatctgttggtttggtttatacctaaatgggtaaagcctctctcctgagtaggattgaattgtactcagcttttaagtgggaatgattttgccattgaagatgtaaagtcctcatttcaacctctgaatactaaagagaagaaaaatagagaactctatttggctctgaaaataattattaagtacaggtaacagcataatattaagccaggcattgtgcaagcgagttaaacagacacgatttttgccctcatagctgacagtgttctgcaggacaggagcattaactcacacctggtcagtgtttttcttttttctgacttggcagcagagtggcaagaaggctaagaacactgaagtgatgtgggattcttgcgcccccttgtgcttctcctgggaagaaagcatttctaaaacaaactagttgaggagaattgttcaacctctaaactcttcagataaatcgggctttgctatattttcaccacccttgctgttccaagataccagtaatgtgatttagaaacaagccgtttatgactctaggatttgatgttttaaaaaaaattcctaagaagagtccaccctgtctttcatctctttcctttagtgcagaatttttcaacctcagtactatcaacatttggagtgggataattcttgattgtgtggggctgtcttgtgcattgtagaatatttagcagcattcctggcctctgcccattagatgccagtagcatcctacccagttatgacaactaaaaatgcctccagacctgccaggtgttccctggggggcaaaatcaccccccagttgagaactgctttagtacctcagaagcagggagtacaagacagacttttcgctaattggaagttgaagtctaaataaagttacatgatatatatgcaagagctttcaaaaaattaaaatgccctatgtgaaggaactattaagaagtctaatacctgttttttgtgttttgttttgttttaccatggccttctaccattctgattattcagaacttattgaaatgttaagatctaggtttttgtcctccctggctcttcttttctttccctatacaatatattaggagataatcagaaaagttaagttaatcratgcattagagagggaggaggagagaggatgaagaaatgaggcatgacaggggaartgcctgtccttcctatctcatctcagtgaaacaacacttttcatttccacccacacattttttgctcccaatgatagcaaaaggttttgttgttggtattgtttttagagagagagggtcttactctgtcacccaggctggagtgcagtggcacaagcatagctaactgcagcttcgaactcctggacttaagagatcctcctgcctcagcttcccaaagtgctgggactataggcgtgagccaccacaccactttagaaaaagtcttgattccatatttacattcctttgatttcaatatttactcaacaaacctttattaaagacctcttggtgctaaaccctgaatattccaaaagggagaggacaatgctgcctgtcctcaaagaccagcaagagaaaaggcagtgacagaaagaaaatgccgacctgaaactggtgaggactttattcttttttttttgtagcatccaaaaaaggagtggtaggcctaagactatgacaaaatttaagtattgtcttagcttgggctgccacagtaaaataccatacactgggtggcttcaacaacaggaatttacttctggagactgtaagtcccagatcaaggtgttagcaggatcagtgtctggggagggcctctcctctggttccttgtagctcccttcttgctgtgttctcacatggcctttccacatgcatgtgagtggagagagggcagagggcagcaagcacccgagtttcttcttataaaggctctaatcccatcatgaggccccaccctcatgaccacatctaacctaattccctccccaaatgctccatctgcaaatatcacattcggggtgagggcttcaacataggaatttaggatgggggacacaattcagtccatagcaaatctaatttcctcaagaatttcagcatttaaaataaaatgccctggtttcgtgttcttatgaatgacctgtatcacacacttctgaggcagagagggtgacagactttgattttagtgccagtcttccctctcctaagtgagtgacttgggaagaaggatgttcgagggatgtagcctggccctcattcacacccaggccctccagctggaacaggtctgccccatcttcatcaccagaaaatccayaccagggcttcctttctacaggcagagctcgtttcttacatcacccacttgaagtcctgtatcacaggcatgtcctcttagacctgctctatggtttttctcttactcagactccttgggtgagggttggagtatttgtggggagagacaactcgrcagtgagatgtacgcgctgcttgggctgtggtaaatcctagtaacatggtcttaacactgttggtcaggcattgaatttaatgtcctaataggtctggctgctcctctgccatctggcaggatgtatcatctgtggttttgagcttatcacctcctcaaaggagaatccccacttgtactcctgtttctatttgcgtatttaccagcgattccccagtgctttcatttaccttaaaatcacagtggacacattgtctcagccctggaggggttttgttttgttttgttttgttttgttttgtttttgaggagtctcgctctgtcacccaggctggagtgcagtggcatgatcttggctcactgcaacctctgcctcttaggttcaagcagttctcctgcctcagcctcctaagtagccgggattacaggcatatgccaccatgcctggctcatttttgtatttttagtagagacggccaggctggtctcgaactcctgacctcaggtgatccacctgtctcggcctccaaagtgctgggattacaggtatgagccactgtgctcagcccccagcgtttctcatatgagcatgtatatatatatatattatatatatattatatatgtttatatttatatatattatatataactgacagacctttctgatgtatattgttttatagttgttatttatgttgtatgctactatccaactattcatattcccattgcctatagatcaggggtcagcaaactacagtttgctggccaaatctggtccctgcctgtttttgtaagtacagtttaactgaaacacagctgcacccattgatttacatactgtctagagcagcttttgcactacaaatgataagaatttagtagttgcaacagagactggttcaaataggattggctgtgtttggaactagcacttgccagaatgtaatatttgctgtgaagtgctgaaaagaaaagtaacttccttttcatttttttagtggcatagtctaaaactgctcacaatccttttgaaagactaaagaataggccaggtgtggtggctcatgcctgtaatcccagcactttgggaggccaaggcaggcggatcacaaggtcaggagttcaagaccagcctggccaacatagtgaaacgctgtctctactaaaaatacaaaaaaaaatagctgggcttggtggcggccacctgtagtccccagctactcgggaggctgaggcaggagaatcgctggaacccgggaggcggaggttgcagtgagctgagatggcgccattgcactccagccctggagacagtgcgagactgtgtctcaaaaaaaaaaaaaaaaaaaaaaaaaaaaaagactaaagaatattagcaccaaagaacatagcccagaagccttgctgtactacacctgctgaagggatggatggaaatgctgcagagcagcactaggcagtgctcaggcactgccccaaaccagcccacaggccatcgaggcctccaagggagtgggaaaggtacctggagagccatctccagaaggaaagaaagaaaccagctgtaccagggtttgctggaggggttgcttcactttgaggatttgcttttcttttgtaccccctcaagagctgagtacaagtaatgacgcttttttatcctagggaggcaaatacatgcaggcggtgattcagtatgggaagatagtgtcctggttagagatggaatatggtttatcagaaaaggaatcgaaagcttctgaatcatttctccttgctgcctttctgaacctggccatgtgctacctgaagcttagagaatacaccaaagctgttgaatgctgtgacaaggtaacatcgtgtctcctgtgagatggactttagatactccagatcttttctccatctctgtcttttgcttcctctcagccaaaggttgcaggatttttcattttgcttttttttatttatttgaatgtttgggattatttgtttctcagtatgaattgggaaattcagcaagatttttattacagtcagacttttatgatacctagactgtttatcataatgcattctgaagaaaagttttgattaaaattaaataatttttatccacgaccttccttataactgtagtatttatatcagagtagacgtataactcctcaggttcagtttaataagagaagatttaacttaagcttttctggactttaacagactgcaactgttcatataaagcatatatataggtcaatttttattataatcatttattcactgatatgcataaataatatgaaaggtccacagagcatcagcagcctttttatttttacatttgtcttattaatactatctttggtcttttgagtgcttacacacagtactctataacagtggtttatcatctgtatcgttatgtatcgttctgatatatttatacaccagccgatactattttaggtatctggtctcagagtgaacagtatatattatactgtgggtaaaagtaaaaactaatcattggatgtatcttaaaggtagacataaaaggataagaaaagcaaggcaactattttgtacattctttgtgagattatttttgaattttgtggatcagtgtttcctatcgcatcctctctcccaagaccagttattaattttatatgtattttttcgtttttttcatacagagcggagagagagagagagagagtgtgtgcgcgcgcgcgtgtgtgtgttttgtttgttttagagacaagttgttgctattttgcccaggctggggtgcggtggctattaatacacatgaacataatgtactacagcctcaaactctggggcccaagctatcctcccacctcagcctcctgagtagctgggactacaagtgcatgccaccacacaccctgctaatttttaaatttacttttgtagagatgggggtcttccaaagagctgggattaaagttgtgaggtaccacacccagcacagccttgactacattatttttctgtcttctattgacagaagcagtcatatagcatcactattaaccctatctttggcaataggaagcctgttctccttattttcctctttttttttttttttggagatggagtctttctctgttacccagtctggagtgcaatggcacaatcttggctcactctaacctccacctcccgagttcaagcgattctcctgcctcagcctcccaagtagcttagaccacaggtgccgaccaccacaccaggctaatttttgtatttttagtagagacagggtttcaccatgttggcccggctggtttccaattcctgacctcaggtgatttgccacctcagcttcccaaagtgctgggattacaggtgtgagccaccacaacccagcaattttcttttagctttgttgattatatctttctctttaaagaaggttttaatgtttatgtagtcagatttgtcgtctcctttctagttagaaaagacttccccacaccaagattataaaaataactgaagccaggcacagtggtttacacctgtgacctgtaaccccaggactttcggaggctgaggcgagaggattgcctgagcccaggagatagaggctgcagtgagctgtgattgagccactgccctccagcctgggcgacagagtgagaccctgcctcaaaaaaataatgattatattttacatattttaaaataaaaaataattgaaacattttatggttttttttaatatgtaaatatggttgatctagaatttacttttgtgcttacaatatgaggtaagaacttttttttttttttttttttggagacaagagtctcactctgtcacccagcctggagtgcagtggcacgatctcagcccactccaacctccacctccctggttcaagcaattctcctgcctcagcctcccaagtagctgggattacaggcgcctgccaccatgcccagctaatttttgtattttcagtagagacaggatttcgccatgttggccaggctggtctcgaactcctcacctcaggtgatcacctgcctcagcctcccaaagtgctgggattagggtgtgaaccactgcacccggccttaactcttattttctatgtggatagctgccatcctggccccgtttattttaaagttaactctccactgattcacattaccacctttgtcattttcaaatgtttttatatgcagacacatgactgtttctgaatgattcgttctgttccactgagctgtttgtccacatgctagtaaccaaactgtcttaatttcagtagttttaaagtttgtctttttctctggtaagacaagtgcctcttatttttttcttttttcccaaattttttcagccattcttgggcacttatttgttccaatgaactttaaaatgaacttctcaagagccccctctcaaatctccttgggatctttctagaaattgcattaaatgcagaaaataatttgggtagtaaattttgatcagtagtatgtaattatcttgagccccatttttttaaatacactttttccatctcctttggcaagagaactttggtaagctgtttactgaatttattaaaattcgtcctttctaaaatatagaccatctattcctaggcccttggactggacagtgccaatgagaaaggcttgtataggaggggtgaagcccagctgctcatgaaygagtttgagtcagccaagggtgactttgagaaagtgctggaagtaaacccccagaataaggctgcaagactgcagatctccatgtgccaraaaaaggccaaggagcacaacgagcgggaccgcaggatatacgccaacatgttcaagaagtttgcagagcaggatgccaaggtgtgtgcagagcctgatgactgcaggtggatcaagagcctgaccatgcccctttgattttagggkacaggaacagctaaacaacccaagaggctcaagagcagggaaaacgatttccaatctaatctgaggctgctttggatccaaaggtcgagtagggcagttccagtcaccaaaggcacacgtcatgagagatgagaaaactaaattcccttcagatgtattagattggttcaaaagtaattgtggtttttaccattactttcaatggcaaaaacagcaattttgcaccaactccccccgcccgccccccgggcccctgcccgagtcagagtctcactctgtcacccagactgtaatgcagtcgtgctaacatggctcactgcagcyttgacttctctggatcaagtgatcctcccacctcagcctcctgagtagctaggacaagcacactaccacactgggctaattttttaaaattttttgtaaagatagggtttcactttgttgtctaggctggtctcgaacccctggcttcaagggttcctcctgctttggtctcccaaagtgctgggattatagacatgagccaccatgcccagcccttttgtcatttttgaaaaattgtaaacccatcaggatttttttttcaagtaagacttacgattttcccaggaaatgggatgttataggagccccatcatcacacctgttatcttgagggtcggcagccagcctgaaaaatgtggcaggagaggtctgtctgcagagagggcggcctccctacagcatagttggcattctggtcctgtccccagtctccaggaatgcccagacttcattatcccacagctgtcccatgtgtcaaccaaagaaaggtgaagctcccactctaactattggtagcacagccctgacctacccagctagatatcctagagaaaatcattgcaatacctcgtgtttgggacctgatacacagtctggaggagccaggaattatttcacttctttattctctaaccttcttgattgcttatttcttccttaggaagaggccaataaagcaatgggcaagaagacttcagaaggggtcactaatgaaaaaggaacagacagtcaagcaatggaagaagagaaacctgagggccacgtatgacgccacgccaaggagggaagagtcccagtgaactcggcccctcctcaatgggctttcccccaactcaggacagaacagtgtttaatgtaaagtttgttatagtctatgtgattctggaagcaaatggcaaaaccagtagcttcccaaaaacagcccccctgctgctgcccggagggttcactgaggggtggcacgggaccactccaggtggaacaaacagaaatgactgtggtgtggagggagtgagccagcagcttaagtccagctcatttcagtttctatcaaccttcaagtatccaattcagggtccctggagatcatcctaacaatgtggggctgttaggttttacctttgaactttcatagcactgcagaaacctttaaaaaaaaaatgcttcatgaatttctcctttcctacagttgggtagggtaggggaaggaggataagcttttgttttttaaatgactgaagtgctataaatgtagtctgttgcatttttaaccaacagaacccacagtagaggggtctcatgtctccccagttccacagcagtgtcacagacgtgaaagccagaacctcagaggccacttgcttgctgacttagcctcctcccaaagtccccctcctcagccagcctccttgtgagagtggctttctaccacacacagcctgtccctgggggagtaattctgtcattcctaaaacacccttcagcaatgataatgagcagatgagagtttctggattagcttttcctattttcgatgaagttctgagatactgaaatgtgaaaagagcaatcagaattgtgctttttctcccctcctctattccttttagggaataatattcaatacacagtacttcctcccagcattgctactgctcagcttcttctttcattctaatccttgctattaagaatttaagacttgtgcttacaatatttttgacctggagtggatctatttacatagtcatttaggatccatgcagctttttttgtctttttaagattattggctcataagcatatgtatactggtttatggaactttatttacactcctctatcatgcaaaaaaattttgactttttagtactaagcttaatttttaaaaacaaaatctgtagkgttgacaaataaatagttgctcttctacactaggggtttcacctgcaggtttgacacgcagttgctcgcttttcctgccctgtcaagcttctctgttctggcgtgagttgtgaaagagttgaagacagcttcccatgccggtacacagccagtagcctaaatctccagtacttgagctgaccattgaactagggcaagtcttaaatgtgtacatgtagttgaatttcagtccttacgggtaaacagattgagcatggctctctattccctcagcctaagaaacactcatgggaatgcatttggcaacccaaggaaccatttgcttaaacctggaacatctcacctttttaaatcctaaaaaacactggcagttatattttaaattagtttttatttttatgatggttttatcaaaagacttttattattagattgggacccccttcaaacctaaaaatcaagttatttccttttataatacttttcttccccatggaacaaatgggatcaatttgtgagttttttcctttaatgataactaaaatccctctaatttctcatttatgcttttgtcttttttatgaaatatttcttttaaaagccccagtctcacctacgaaatatgaagagcaaaagctgattttgcttacttgctaaactgttgggaaagctctgtagagcatggttccagtgaggccaagattgaaatttgatactaaaaaggccacctagctttttgcagataacaaacaagaaagctattccaagactcagatgatgccagctgtctcccacgtgtgtattatggttcaccagggggaactggcaaaagtgtgtgtggggaggggaagggtgtgtgagtggttctgagcaaataactacagggtgcccattaccactcaagaagacacttcacgtattcttgtatcaaattcaataatcttaaacaatttgtgtagaagtccacagacatctttcaaccaccttttaggctgcatatggattgccaagtcagcatatgaggaattaaagacattgtttttwaaaaaaaaaaatcatttagatgcacttttttgtgtgttctttaaataaatccaaaaaaaatgtgacttcccattgtttttggttttgcttaagtgattttcagggaaagctatattggttaaaaaaccatggtgggggccaacttgaagaaattagacatcagagaggtcaggcgtagtggctcatgcctgtaatcccagcactttgggaggccaaggcaggtgcatcacctgaggtcaggagtttgagaccagcctggccaatgtggtaaaaccctgtctctactaaaaatacaaaaattagccaggtgtggtggtgcacacctgtaatcccagctactcaggaggctgaggcaggagaatcacttgaacctgggaagtggaagttgcagtgagccaagattgtgccactgcactctggcctgggtgacagtgagacttggtctcaaaaaaaaaaaaaaaaaaaaaaaatcagaaaatcggcaatggacagtatcatcctacactttgctctaaggtgaacctgaaaccaacattggggtgaaagtggcagaacaatgcatcgttgctaaaaagaaccaagtaatgggaaaaataaaaaggttttgttttttcattagccagcggatatttcacctttttaagctgattttaaggtaggctcgacttgcaaaataaaatttaattgtgccctttaataaatatatgaaacataagtaaggctatctaaggtggtggtccatattgagcatgcattttctttcttaagtagcatatatcatcaatactcatcatcacagactctcaaggcctaaggagatgtcacatatactgcaaatcctcattttcacactgcaaaagaaggtggcacagtgctggaaggtacttagtaggacctctgaggtctacagacaggttgatgcaggttctaggcaccctttattccctctgaattcttggcttcatctctggatttgaattatatttctccctcctccctgttaaattatttggtaatgaaataaattcctagctaggtgcggttgcttatgcttataaccccagcactttgggaggccgaggtgggcaggttgcttgagcccaggagttcgagaccagcctgggcaacatggcaagaccctgtctctacaaaaagtacaaaaattagacagacatgatggtatgcacctttaggcccagttacaggctgaggtgggaggatcacttgagccctgggaggttgaggctgcagtgagccatgatcatgccactgcactccagcctgggtgacagagcaagaccctatctcaaccataataaattccctttatttgcgtgctttttttttgtaagaaaataatgatcaccctagggatcttgaggatgagccagagaagattcctggctgtaaatgtgtgatctcagaaattcagaggcagcttgcacaacctccaaaacgaggactgccagtgaagggctttgtctatacttacttggccttagcagcacactgaactccacttttagtatggtacatgtgaagcctgtattctctggggctggagactatctccagtattggtgacaaaacgcattgaatttgagccagttagtcaaaatcctgaaactcagaattccccaacccagctgtgtattttttccatcagctggctacttatgcatctgaatgacagtgactgacgaaagtacataaaaggacattctctgatggcttgaaaagttttggtagaccttcagtacttcccttcagatttttctctactacatgtctgacatggagatttctgtgggaggagaaggcactatctgtaattgcccagaatctccacgtgtgaccttaataatacacggcaagaaagagacagcgttaaatacaactcttaagatttttgacagcatcttgtttgggtaactgcagcctatagttagaaaaattaaagcacagtttataaggcagggattctttgtcttctaaagatgagggaaccttggagaatcaagaatatggggaggacccagaatggtgatgcagcctgcccatggccgtcaggtcacctgatgcccttgcaccattttaaaataggtctttttctagtatgatgagtgatgctcttggtgtatggaaggagatgttggtacttccttagaattcccacattcggtggaactgaaatggcagcagagccatgggcctcatagtctactttggaataaatctatggtgggaagcttgccaacgtgttaagcagaggcatctttttaaaatacactttaggggccagggatggtggctcacacctgtaatcccagcactttgagaggctgaggcaggaggattgcttgaggccaggagttcaagaccagcctgggcaacatagtgagaccccatcactaccacacacacacacacaaattaattagctacacatggtggtgcatgcctatagtcccagctacttgagaggctgaggtgagaggatacttgaagccatgagtcgtaggcttcagtgagctatgatcacgccactgcactccagcctgggcaacagagtgagaccttgtctctaaaattagaaaaaaaaatgtggctgctacattgtttccacctctcaaatctccacaaggtcattggtccttgctaacccagaactaagcagggaaggaattctgggacatgtgtttccaacttggcttagttgacacattgcaaatacaacatgtggctaaggctttcttttttgtttttgtttttgagagggagttttgttcttgttgcccaggctggagtgcagtggcacaatctcggctcactgcaacctctgcctccagtattcaagtgattctcctgcctcagcctcctgagtagctgggattacaggtgtctgccaccacacccagctaattttttgtatttttagtagagatggggtttcaccatgttggccaggctggtctcgagctcctgacctcaggtgatcaacttgcgtcagcctcccaaaatgctgggattacaggcgtgagccaccgggtccggtctgtatctaagcctttcttgaggtattaaatatttccagcctgggtctgctctgggataatgtgttttcataagataactccttattgtaggcattgttcttggcttaaagttatctccttaaagcttctgactagggaaataagtggtaagaataaacagttgatgagtatttggggatgcaatgactaattctagttactctagttctagtgaatgacttgatgagtttgtattgtatctgctcacaaccgtgtttccacactaaggactcctgaatttttttgtcttaaaaacttaaacccgctgggtgtcctggctcacacctgtaatcccagcactttgggaggccgaggagggcggatcacgaggtcaggagatcaagaccatcctgactaacatggtgaaaccccgtctctactgaaaatatgaaaaattcgccaggcttggtggtgggcgcccataatcccagctactcaggaggctgaggcaagagaatgacgcgaacccaggaggcggagcttgcagtgagctgagatcgcgccactgcactccagcctgggcgacagagcgagactctgtctcaaaaaataaaaataaaaaacttaaacccatgtgtatcctattgccctctgtggctaccagagtcttcctaacatgacaccagcctttacctgtagttaacaaaatgtgattccccttctcccactgagggatcaggaacactgccttactcatcaccatcctcagcacccagtccatcatccccaaactagaacatagtagatactcggtaagctggctttgtccctcctctgaaggcagcctcttgtctgtatcccagtggcccttcactcctgttacctgagatgtggaggccaaagccccatgatactgtggttgtccctgcagcctgattttgtgtcttgaattcttttccaagtggtgaaccagcagcaacttgaattttgagagcccataactgtaaaatgggtccatcgtcttcaggctacattgatcttatatctatttttagtcacaattgataactcagagttcaccaaatacgaagatcaaatataaaatattttccttaaaagtattctaagaccaccccgcccagtctggtgccctggtcagccagcccccaaacatttacggcccatctgttgtgaactgggtactgttccactgaggtgaaggatggggccccctgggctgagcgactcgcagacaagtgaaaaatgaggcatgcagatggctgcatcatcacagagcatctgccatctgctactgacatctacaaaatagggaacagcaggaaactcaagcctgcctctccagctctccccactcattcagagccacactggagaccgagtcaagccagggcccaccccactgctgacatccagcccagtgctactgggcaagcccttcctcagcactgcccccagctggccactgttccacccctgtgcttctctccaagcatccgggctgcaaaaagtgcccagccctaccctgagctataccagccctcttgccctgggcccagccaggatggtttctcctggtggcaggatgttaatctctttggcacaccaggcagaagtctaggagcagagagctatgtccttaggtctgtttttcagttacctgcctactggaatacagctgcaagaaaactgtgtcctttatttacgagacaactgtacagatacaccatgcctaactttgcttactgcatggtcactaggatgtactgagtttcaaggaaatatgtttttgctacattttaattagcactaccccccttaggtgaaatttgggccaggtgcagtggctcacacctgtcatcgtagcactttgggaggccaaggcaggaggatcacttgaagccaggagtttgagaccagcctaggaaacaaagcaagaccctgtctctacgaaaaaattttaaaatcagccgggcgtgatggcgcatgcctgtagtccctgctactcagatggatgaggtgggacgactgcttgagctcaggaggtcgaagctgcagtgagctgtgatcatgccactgcactccagcctgggtgacagagtgagaccctgtctcaaaataaataaataaataggctgggctcggtggctctcacctgtaatcccaacactttgggaggccgakgggggcggatcatgaggtcaggagattgagaccatcctggctaacacggtgaaaccccgtctctactaaaaatacaaaaaattagccgggcgtggtggtggctgcctgtagtcccagacactcgggaggctgaggcaggagaatggcatgaacctgggaggcagaacttgcagtgagctgagattgtgccattgcactccagcctgggcgatagagtgagactccgtctcaaaaaataataataactaagtaaataaacttcctgactgttctgggaaccctcacccctttgtcaccaacacactttccctgcagagaaagctacactgcttgagtgagttggtaaatgctcctctctctctccactctgtctctcgcaagggcacgcaaggctttctatatgggcttctaagctttctctgaacccagctgtctggttgacaaggagcagattgtaataagacaatacagtgaggtttgcacccttctacccttcagccgttaccaaatgtgacagtaggtaagtaaaccaagccaccttcaggctgcaagtcggggcctcagaaccaagttataacctgagataaccccagttggctggatgattgccgagaccagacttcctacagagagtgctgcccacttctgcggtgataactgcaaaacagggcccctcataatgtcctcatcaggacctcctcaatctgaggaacacagaggcctccaatgtttggcaagagcactggtttgggtccagctctgtgttgggatctcttgtttcctcacctgtgaaataacaatggctaatatttatacaactgttttaa

SEQ ID NO: 93790 - DNA, 26502 bp, Homo sapiens
caaaccaaaggagaaaaatcttaactgtaactacagggaatttagagtataatgagcatgagaacactgtaccttaaaaacttacaatgagacttgaccaaattagtaattagaggaatacttacaatcataaaaaaagaataaaggataataaataatatgaataaaaactcaagaaacaagaaatctaacctaaggaaaggataaaaaataaaagtagaaattaatgaatttataaaccaaaaattgtaggcttgataaatgaatctaagagctgattctttagcgagcataaagtaagtaaaataaacaagactctaggttattaatatggcttaagctcagtgtagcctgtattctcaaattaattgttatttatatactgtaagacaagaagtttatgcaagaatgtaaattgactaagtcactaaacacactgtcgatgttcactaactttttgcttttgtaagtctttcttgaagcagtgcattgatttatctcctggtgcaagctgctgaggactggttgaactagctctgctattaatctaaaatagaatgcacaatatacaaaattaataaagaacaaagggattgtctttttgatacagataaaaaatttacgatgtaatattagtttaatatataatgctagattaaaatgtttcaaactcatataaatgaataatcttcaaaagaaaataataaattgacatgcataaacatataaagcctataaaatgaagtgtttaataaataaaaattatctccaagaaaaaaaaactgtcctcacatggttgcctagcaaattggtgttagccttccatatacgaataattaccatattatgtacattgtccagagtataaagtaaatagggcaacttcttcataaacctgatagcaaagatagcataactttgacatggtgcaaaaaattaagcagcaaaccaatcttaggtacaataatcttagttataattttaaatgtaaaagctctaaacaaaattttaagaaatagaatccaacctttatacatatcaccaccaagaaagctttaatgtagaaatataaatatagttcaaatagaaaatctgctaatatcatccatcacagaaatatatgaaatgaggaaaccatattattatcttaatagatttcaagcatgcagtcaataaatcaatagtattttctgattacacacacacatacacacaagcatacatgcatacaaagctatctagaaagataagaatatttctttaatgtgatatagaatatgctcctcaaaacaagagccagcatcatattcaaggatgacacaccaaaagaacaactgcagtcaccacttgtattggaaattgttctgaaaatacaagacaactcagtaaatgagaagaaaaatattggaatatttataagaaagggagaagctatattatgttatcattttggttctttgattctttacttggactgatatgagaatccatgaaatatttagaatgaatgaaggtttagcaaatgactgaaattacattgtgtatgaactattaaaagtataactatatagttttccatataacatatatgtaaataaaatatatacaactattaactaactaatatgccaataataataatttggaaaatatagtggaaaaaataacattgccaataataataaaatatgtaactagaaattaacaacaaaaattgtgagcccatgtgaagaaaatttcaccataagataccaaaaaagtgaataaatggagtcgttctttgttataaagatgtaattaacccataattaattgatggatttaataaaattttattttttggaactgtgaaaatactcctaatttcatctataagaataaatttgatagaaaagtcaagcaaaagattatcttaacaggctctattgaaaaagaagagtaataattggaggctattcaagggaaatttcgacaatccttaaaagctacaataattaaatagtgtggttttgatatctgaatataaagaagcattagtggagcagaagataaagatccgcaatacagcccaagcacataagtactgaaaatactgtaagttggcattttttcaatatggtagggaaagatggcttcatctgtataatagacagagacacatggtgatctagcaccaaaaaaaaaaaaaaaaaaaaaatcacattagagtattacttcacaccatatgtcacaatcaaactgtgaaaataacaaacagttaaataaaaacctaaacccataagaaaaaaaacaaccgtagaagaataattttataatcttgagatagggaagactatgagcatgacacaatagccaataagtatacagaaaactacattttacttcatagaaaataaaataaaataaaagacaaatctgcaatttttaaaagctaataacaaatgggagaaaattttggaaaaatatgtgaggaaaaaatggtttctattgataataatttttaaatcttaaaagaaaaaagatagaaaaatatagaaagtatattcattaaatttgccaaagaagaaatataaatggactaaaaatatatgaatagagtttagattcactggtattcaaagaattgctgattaacaagaaaatggaatatttactaatatttgctaatataaactcttttttgctaatgtaattagcaaaaaaaaaagaaaagaatatcttcaaacattttttataaaaataaaaatctatctcattattctaggaaatgttatattgaagatctgaatagcatttcttcaaatgcctttgactcaagccataaagaaatagaaatatacaaagttacatgaggatgtttttggtcattgtctcccattccctatccagcatcggtgataatgctttatcaattgaaatgcatgaacattcattaccatcctaggaactgaaatgtttccccaaatttctccaagtttcactatagatcaattcccaagcagtacactgtattaatggagttccttccaggcttcttcatacctgtgatttgattagacttcatgagatcaacacaattactttgtttaaaaaaattttacaacatggcagtttctttttctgaatcccaccttaaaaagccaaaggggaaggaaagagacttgggaaggagtttttgcaaattagtcatcacataaaactcaccttagtgggccacctcgcataggaaagagtaaagaagaaacacatattctccatagatgacaagcattctggaacctgtttctttactacagtgcctggagacatctagagcaaatttgatttttcttttcttctgatacaggttagttttgtgacttttatttcctcgaagactttaaggcttaatggtattttgaatttttcatttataccatataattgcatgactagggaaatatatttgtgttttatatatgcagtcaaaagaaaaaggctaattagtatgaaatattcacaagggatcaagaattcattgaaagaacaactcttaagtatttccagcagggcagaagacgggttgggggacaatgtctgctgcaagtacggagagggatttggcccacggggatttcatttgggtttgtttcagataaggtgataaagggacggagttgattgcagactgaagtttaaggggaacttctgaaggagcaagaggatatgagtgatcaatgacacatatagattataaaaatgtgaattgtgttaatagcttttctatttcaccagccaaggaattcaaaaccctaaagaaaagcatttgacaacacatttttgatattcgaaagctgatttctcaaacaaaagtatatatccaaatggcattttaaaatagacactgactatatcggtctacttttcaaattattaattgcaatattctttattcatgtgtttctgtgatttcatttgccttgttaatatagagttattctgctactgtgtgttccaagtgttagctgacattacaatcccgaatacttggaagacctctgcatcaacaggtatactcaggagggattattttggtattatttgctgttgtattagttaaactctttgcttattagcctctggatacactttcaagtagcaatgtatcaatggtacaaggttatgctaaaaagccttaagttaaagaaacttaccaagggactctagatctaaaaatagtctcatattttaatagctgtggtaatccactatagcacaaacttgttaaagtgcagtacagaattctactcagtttctctttcaattcagggcagagagcaaagatatagggagacaatcatcggatgataaattaaggagacattagcttaagaaaagtgtattaccttctggttcagctgagtggtggatggtgaaacacacccttgcagagtagatagaatacagagaaaagtagtgtccccagagatacttacaggtaagtggcatttctgaatacctgtcgatactgtagagtccatacattttctttgcttcatccttttaaaaaaactgcactccctgatctgactctgctactaatacctgattctgcctttctgacttcatcttatatcctttatacttttttcatacccattcccaaagcttcccttgcttttcttaaaaaaaaaaaaaaagaaaagaaaagaaaaaaaaaagtccagctgggcgcagtggctcactcctgtaatcccagcactttggaggccacggtgggcggatcacgagttcaagagatggagaccatcctggtcaacatggtgaaaccccgtctctactaaaaatacgaaaattagctgggcgtggtggtgcgcacctgtagtcccagctacttgggargctgaggcaggagaatcgcttgaactcggaaggcagagcttgcagtgagccgagattgtgccactgcactccagcctggcgacagagcgactctccatctcaaaaaaaaaaaaaaaaaaaaattccagtatgtacctgcctcagagtctgtgcttggaattccctttcagatacccacatagcttggtcccttcctgcttaaatgacatcagcgagtattctctaacatattatataaaataataccctcccttccgtattccccatagcccttaccctgctccatctttctccatagtacatatcatcatctggcttattctttatttgcttatttgtttagtctttctaccccattaggatgtttttaaggaaccatatctgagtttttcactgctgtatctccccattgaagcagtgtctggcacataacgggcacccaataaatatttattaaattaaatgactagcagaatattaatctcttgcatgaaggcagttagataactgttctaaaaaccacttatgtggcttacactgtgcctcatgcagagtgtaatgagtgatgcttgatgaaatgatttgttggggtttcctcctcccctacctcgcacttcagaccctatgtcatgggggaaaatatagggattccctggcctaaataaactgtacaaaaatacccaacatgagtgtttcaacaagcagatagtagtattggaaggaatgcagactcagtttgggcaaaatctgtgtatggagaggtttttcatgggttgtgtgtgtgtgtgtgtgtgtgcatatgtgaatgtatgaggtagaaggaaggtatcaaaaaagaaatgtaaaaatgaagtcatatggccagaagcattttaagagtcaaaacttgtattgaaaacaatctactttgtacttgaaaatgagaaatagttgtgtgaggtaggcttttccgtcactctaagagcctttgaaaggcataaaaatgttgagtaagacattccttaaatgcactaaccagcaattttaggaaaaaaaaagaatgctcttggatgatagagaaaaatacatggcaatacaaatctgattttatattaagaagtttcctgatgtcagaaacaatgccaggaaaaagaattgcagtgattggygctgaagtcagtggattaaacgctattaagagctgtctggaagagggactggagcccacctgttttgaaggaggcagtgacattggaggagtatggagatatgaggtaartttgaatggtcttatgtttttatgtatatgtgacttccacaactgagaaatagaaatataagaatygcagcactaatttatccttcaattatcagaataataataaatatttttactaatgtctgcacctgtgtgttgaatctcattctcttcttttcctcaaggttaatattcagtccatccttcttcctttgggagtccagcttcttgaaggaagaatgtatgcttgctctcagcactttctcacctcccgccacatttcaaccattgctacatgatggacatccccagcacttcctgaaaactgttctcattgctgtttccaaaggtgtcaaatcaagtggaccttctggcctttttgctttctcaaggagagctaattatgttaaaacccaaccaaccttcttaaaaaacattcgtccctagcttctacaatttcactctcttttcttctctgcttttcctcttcaatatttttccacttggcctctagatgtggctggctgtagctttatttcaatcttctgttcttttaacyttttgctcattccttaggctatctccttatcccttcttgacttcagctgccatatatgctaatatataatctttagatctttatcttcagcctaacaacgtatgtrtgctagagcaactaacackaagggtctcacagacaaattctcaaaccttaagaggttagcataataacaatagaagatatgattaagtagcctttctccaactttaacttatacccctggaccatatagcctccaagggtgccacagaagggaaaagagagaaggtggaaggctactgacccataactgcctagggctagcctagaggtggggtggctacctgattttgctaatctctaggatgttccaccaacacctcattagcttttgaggtcttttattatctgtgagatcaattccctgcattaccttccctgtctcaagttaagagtagtttccatgttcctggttgatccctgagtgatacagacacatctccaggaaggctttcccaacaccacctgcctccaggtccaaagcaccctatggacacaccactattacatctatctcactgcatgtgattgctgatctcctgtgttaggttttcaaagcattttatgtgaattattttatctggggaaattcagccagatatcgggtgaaattcactcctgatatttcacataggttcttttctattttccctacrtgtcrgctggtctgagaaataaagggacagagtacaaaagacagaaattttaaagctgggtgtccggggaagacatcacacatcagcaggttccgtgatgccccctgagccgtaaaaccagcaagtttttattagtgattttcaataggggagggagtgtacgaatmgggtgtgggtcacagagatcacrtgcttcacaaggtaataagatatcacaaggcaaatggaggcagggtgagatcacaggaccacaggaytggggtgaaattaaaattgctaatgaagtttcggrcaygcattgtcattgataacatcttataaggagacaggttttgggagcagacaaccagtctgaccaaaatttattaggcaggaatttcctcgtcctaataagccttgggagcactatgggagactggggcttatttcatccctacagctttgactataaaagacggccatcccccaaagcggccatttcagaggcctaccctcagggacacattctctttctcagggatgttccttgatgagaaaaagaattcagcratatttctcccatttgcytttgaaagaagagaaatatggctctgttccacccagctcaccggtggtcagagtttaaggttatctctctttttccctgaacattgctgttatcctattcttttttcaaggtgcccagatttcatattgttcaaacacacatgctctgcaaacaatttgtgcagttaaagcaatcatcacagggtcccgaggcgacatacatcctcctcagcttacaaagatgatggaattatgagattaaagtaaagacaggcataggaaatcacgacggtattgattggggaagtgataagtgtccatgaaatcttcacratttatgttcagagactgcagtaaagacaggcatagaaattataaaagtattaatttggggaactaataaatgtccatgaaatcttcactatccacgttcttctgccatggcttcagctggtccctctgtttggtgtccctgacttcttgcaacattattttgtcctcawaacaatactgcgactgcaaggacaatgcaaagacttatttacagacagagaaatagattcagagaaatgattttatgtcaggttctttttcctagccacacaatgatatatatcaagaaccacatcaaaataccacctcatgtcatctaacttcactagggatgctcatatgttaggctgtcacttattaaactgctggtcatatttgcagagactaaccttatcaggagggggtatttttgtatacaggtacatcaataaaatgagttttattaataaacaatgctctccagtttgaagaagaaaacatatagtttgatttttcctaaagctgatatactttagcatgaattacattccatatttcatggcttgaaatattacacatgacacaaaacattattaaaacccccaaaattgtgttttgtgtgttcacgtattaaaataatgtagttaggattacaataaatttttctaggagaaaacaacatattttcagtggtggtatgttttaccttacctttaaattacttagatatgtagccataatttttttaaaaaaaatcaataatggctgttaatgtacacaacagatactgtatgttgtatggactcctattatatcttggaaaatgagaataatgtgcatcatagaattgaattatgttattatatattgaaaactcttcaaaaccataagtacagtagtgataaaacattatatacccatctgtgtgtgtatagataaatagataatatatgtagcaagagatcttgaaagataggccgtgattggaagggtatacatcaaaatatttaaagggatcatcatgaatgatagtcttcaccataattttctataaaataataataataataaacatgtgctgctcatgtaattagaaaaaattgccaatataaaaaataaaggataaaagaaagtctaagtatgatcactactattttctatgagtcactacaaacagccaagggcttcctggatgccctcttcccagtactctccagtcacccatcagtctggaacttgaaaccctacaaagctctgcaggcagagaagcagcccttatcttcctctgcttattttcactttccggtgtactacacacatttttattttcctgtccttctgtctgttcctcaytagaattttttttgctcttcttaactatttgccggaaaatatcttatctcttagtaaaggtaatgtgaaattgctttctttgaaagaatttagtccaggaacctcataattctacatataaagagacttcttctttaacttgtcactcttgtattctaaaagatggtgagtgtcttcttctcttgtaggagaaggctgaaggtggcagggcaatcatctataaatgtgtcaccagcaatacttcaaaggaaatatcagcctakagtgattaccctttcccttcccatcttcccaactatttgcacaattccaaattgatggagtacctcagaatgtacatcaawcactttcatcttctgaagcacatacagtttatggtaaatgaggtmgagggcacttagcacatgtggaaccatcttgggagggkggaaaaccaggccagaacaaagtacagcaaggcctccattcagtttagggggtgacagggttcaccttacatacatctctagtgaaatcagcaggagcttctctcttctcttccttcaggaaaaaaaaaaaaatatggtggattggctgaaacatcagactggaccccttttgtagacttacccctaactatgatcccaaccatgattgggagaaaactggactaaataaggctctacttaaagaggcctcagtagcaaaatcaattctaaaggaatcccagaggagagtggctataaccaaccttattcattaaagccaagagttctttggaaggagggcaagtgggaggagtggttatgagtctgagtttgtctcattcccagtcaaaggtgtgcagtgtgaagaagtgctgcaacttctcatgcacaaggcaatgggatgttgtggtcgagactggagggaagcagaaatcctatgtctttgatgggattatggtgtgtagtggccttcatagccatcccgtattaccactccaggactttccaagtatgtcatrtagaatgctaaggcactgcttttatggggttctatygttgttattgattttttttaaagttttcaactccgaaggtcaccttatttttacaataaatrttaccttttctgactgtgaaatcatgcatgctctttgaaagtccgttcaataatagataatgttttaaaattgaaaataaaaattactagtatctcatcagcatctgggctttttaataggaaartcccacattttaacacaattggaaggttgttttgtgttggtaatagtttggagtaaataggaaaatcaaagctacagaaaatattttgagatttagctttatttcatgtgtatgtatatgcatagcatgacaaatataaatagctatttgctggtgttwccatgcatyttaaaatagactgcaatgttattgctctgctatttggaagctcaagcaccctgaatactaggaatgatgcaggaatgatttccctgcacaagatctctctgttcatctctagaaatataagtatttagtcttcttgaagagggctgaaccttaggctccttcaagattcccaggagactctggatttctccacatccattgtttctttcccagtatataaaaagatgagaaggtcataattggccaagagaggtctattttttgtttagttaattaattcgagatttaaacattcctgtacttatgcattcaataataattcaagaaacgcctattgagcaccaacttaccagaggctcagcagagagcaaaacagaccaaacctccatcctcaaggagtgtgcatggtagtggatggagacagacacaaatgggagaaatatgttggaggcaatacttgttgaaggaaggggaagcagggaaggaggaggaattttagcaataggggattgtcttacaacattaaataaggtgtcaaggcaagcctcagttagaaagggacatttgagtaaatacccaaaggagttggggaagtgatgcaggtatctggggaaagcatactgttttgaaggaacagcatgtgcaaaggccttgaggtaggagtgtgcctgacaattctagtgtggctggaccagaggaaagagtgggaagaagatgaggacagaaagtgaaagagagaccagatcaagaagggcctttaaatcttatgtttggactctgactttggactctgggcctcaggagtggcatgctccygccactttggctgctctgttaagaatagctgggagaagatggtagtggtggaagctaggagactggtgtggatgctcttgcactaacccaggtgagagatgatggggacatatattgatatagagatgatggggacatgtatcgaggtggtagcaatggagatatatagagatgtgcttggaacccacatgtagtttaatggtagagatgacaggatttagtgatgaattagaaatgggatgtgacaaaaagagaggggtccaagataataccaatgttgttggcctgcatgagggagagagattgaggaggccacaggatgaccaggttccagagatgctcattgcaagtgggacagaatggaataagattgaaaatattcaaaggagagagctaaatttattttctaagcacttactatgtcataggagcatatcaagggatccttataccgttcctatgcaataggtaaaataatgtccactttacacattacaaatttaactactaagaggttcatgcctaggttaaaagtcacattgactccaagggcaaagggtycattttggaataaaagagaaacattttctcctggagaaaagaagacggaggaaagatagatgaaaacacactaacttctaggtgttgaggaactcacctaagaactttgttgttttcatacaaatgagaagaaaggttattttcagggaatgagaggggtgacatyggcaccaaggaaaggggaaataattgaagtagctgcagtaagataattgatagggagtctatcctatccatgggcaattgaacttgccaaacatagagtttaggaacaattggatccatgccaggagttcactatgtgagaatcaaataactgtttccaagggaaagctaatgttttggagcaaattctgtagggaaacggggacacagcaaagactgaaccaccatyaggactgactaaggctgtgcagtgtcacaggaggagcaaatgaagcccatatgtgcagaccccaatattgtttaaaagatgaaatgctgcaaaatcaatcagcttttatggctttgctatataatctttctctttaaatcaaagtaaaaaacttattttttaggaaaaaataagttcttacgtcctcttagctgcagatcttgtgggtgatgttggagcgtttggccccagtaggagaacagagcratagtgctagtaggaagggtgtacttggcccaggaagcaaaggaaacagctatacaaggatgaagcttggccagggaagacaagacagaggaaactgagtccagggcagtagttgtgaataacatgagtgatggatgaggaaaatatattacttaaataagagctgagctcctccttgaaggctttgcaggatacagataagtaaaaaggagtcagaggtgagatatctgagtttctcagaagtctgggggtctgttctgtcttggaatttacagtctagaacaaatctgtaggaggattcattctgcctgatgatgctgggctggcagggtccatgacactagcatcagtagaccagcaaatgatatgcgttagtaggatgaactttgagttcagtgataagctttggagtataccatcagttaaaataaatggaataatgaccaatgctttagtaattttgttctttcccacagggatcaagaggttcaaaggccaatatattcacagttgggaatacaagaggccagataaatttckggagaagaaaattgttgttattggctttggaaattccagagctgatttggccattgagctcagccatgtagctgcacaggtttggcccctaaaattctctgcccctcaaygcaacctgcccacttctctgagcattgcatgaaatgtgtatagcatctaccccatcacacacacagtctttattgttaattatctcttcacacctgttttctttgtaagacatcatggtaatccattttaaacatttgaaaatgtattaaaagtaaatacttcaaactttaatgactgccatatcgtttatatttactaaagcatctggactcttcattagctcagccaagggtttcaaaaatcaacataccagaaaaccatttttttaatttctttattttccattgacatgacatttgccaccatctcccaactctgattcctccatasttagattctagggacatgatcaacaaagtgctctagatactgtaatactatgattagcagatagatgggatttaygtgtcaatttgttaatttctaatcgtcttgcattatttagtttttctggaatttggaacctgagtgattgtatgatatgatgaaacactgytttgaagaaggttcaaagggctagtgggtgagatccagagggaggcctgggcagatttctggagctataagcaatgttaggtgtgtctgtatgtgtgagtatatgtgtgactgtatctgttggtctaactgagtttgagaagtgaggaacacttcaggctaaaaaggcaagagagttcttatccacttatcctcttgagccaaataagagatatatgaagaactgagaaaacatcttacaaaaggaaatacattgtgaggcagttatttttcatatatttgtcttctctcctaggtgtttctcagcacaagacggggtgcatggatgtggagccaggtctgagattatgggatgctcatggacactgccctctttactcattttaaatctgtcctcaacaaatttcaccctgcattcttaatcaacagatggacagagaataaattaaatactcgatttaaccatgaaatctatggtttacaatccccacataggtatgttttgggatttttaaaacataatatggggtcttttggggtcagcagctgagacttggaacatagaagtggtttagagtccatgtttaccatcttgaaaataaacttcaactatcttrggagaatgttaatcattgttccctttatcatgcttctttaaaccattctactcacttttcttacaggaaaatatcgtgttccaggattatggtggcagcttcacctgtcatttgacaccatcttccaactctgactccttccatacttagattctagggactcgattaacaaagtgctctagatactgtaatrttaatactataattagctgatggatgggatttatgtgtcaatttgttaatttctagtmtccttgaattatttcatttttctggaatttggaacctaagtggggcatgaaagtggatgggcccactcatttaactcacatactggctacttatataataaggaacacacagaagatactcagataatatcatttaactcacattgtggctacctatataataaggaacacacagaatatactcagataatagttattcatttactacacgtggtgtttgaccatttccttcttggttctccggcttctgaaattcactccttctttagactctgagacctgcataaggtggacaggcagtagatggtgtactgtgttataaagcatcacctccattttcccaagccaaaagaatcaggaatctggcaatataaggggagcaataagaggggagacttggggcagggagaatcctttgaaatgcagcaaatgctttctttgccttgaatagaattctggatccagacagctatctgaatccttgcttcaccatttactagttatgtgatatcaccaaatttacttaactacttacttatgcctaatttttattttatataaaatggagacaacattagcaccaactcagaaaattgttttgagcattaaataggagaaagcacatgtatagcttatactagcacctaatgcatagtaaatgctcaacaaatttgtgttgttttatattattaattttctgactatagtaaaattatacctatggaattttaacttatggaggtgactgactgacaacatgaagaagtcaatgccattgaaagaacttacatttacttacatttcccaagcaaagtgggtgtgccataccacgcagggccatagaggagcaccatgtttggtcaggcggaagccagagcaasgcagagaattagaggaatcaatagcaaggatggcaaaatagaaagaagaaaatttcaggaagggaatggccaaatgtcaagtgtagtaaatcaataaatattctctgagcaccttctgtgtgttccttattgtatcagtagccaatatgtgagttaaaagagtgaactcgtccacttccatgccccaaaactcaaaaagggaagtttgctggaaacaaatgaggaaatatcgctcaacttttgtatgaaaacagtttttgtctgcatctgaagcatacaattgtgtattctgaacactgaatctaaaaaaatacataatggagctagaaaaatcttctcagaaasacaatgaaaatgatgaaggtagactgatggtctgccgcatgatgacagtagaaatctgcagatatggtggggttgaggaaagatggaatgtggaattcactcaatgctgactacagactaacagcaaatattcacgaggttgaaaagagtaaaatttgggataagtataaacttacgcattgtatgattaattcaaatatggtgtcaatagaataaaactttgcttgaaaatatagctagagtactagggaaagagaagtagtagaaagtggaagaggtaggcagggacagaccacatagggctttgtaggactagagcatggtggggatttgggtttttgttttcagtaaaatagaaaaccactgaagaatgtttttgtatattaaaagaatcattcaggctgctaagtgtaagagaaaatgtagggagtcgagggtggaagcaggaagaccactaatggtattgaaattagatggtgctagtaaatttattaaaatggcatgtatattctcaatataaagtaaaaataaaaatatggtatgattttcctgttccaatgcaaacaccttggcaactattttttaaaactttctaatgaatgaaattatttaaaagaagttagatattaatgtattaccagtataagcttttatatgacattttaaaatctttcctttgcatatagtaagcattaataaatatcattggcattctgataaatacagaaagtttctgcagtaagtaattcagaaaaggaattgaggaaaagaaatatttctgtaaaacaaaaatgcggctctttcattaagcattgagtcactaatggtaagcaaatagtaattaatagtaagcaaaatgacttactattaattttcctgtacttcaatttgtattattccgattcctgagccatcaaatttctatgagtgatgatctacccaaccatgtaatttgtggaagacttgtgatgaaaccgaatgtgacagagttcactgagacaactaccatctttgaagatgacacagaagaggagattgatgccgtcatctttgccacaggctacaccttgtctttccctttcttgaaggaagactcatcaatcctggacagctgtgttccatgtttaaacatgtgttscytcctcagctggaggagccaacactagctttcactggcatccttcraacagtgggagccaccatttcctcttcagargtccagagctgttgggctgtatgtgtatttaaaggtatgtgctgactttaggaatatttagaaaaggttgccatcaggtggtgtgatttcagagacattgcaaaagtcctttgcygtaaagcatctctgaagttaaaacctttacaatatctgaaattctgccacttgagatctgttacttcagtgtttgatggctacttatttaatcttcatgatccctgtgtgaatatgaaaaataaaaagtactctcgtaagttattaatgacaacrtattggcaagtaattctttagagcactacagggatgtatgtagcatagaaagtgagagcagcagggaaaaaaaaaaagatctcaacatgaagtagaggtgggaaataatagctctcttacttcccaatgttgctagggtcattctggaataagcgaaaattaaagaaagcattttttgcctatctttcaagtgtccattcaaaatataaagaaaacaagcaggtaaatttggcagagtcacagagccactggaataacactacagcacaattcaaagagcaagggctttataatcaaataaacctgggattaaaaactagttctaccatgtactggctgcatgatcttgacctgctacttgaccttaatttcctcatttgtaaaaatgggaagacttatatctactttgcaggatggtaagaattaacaattragcaccttgactttaggaggcattcagtaaatattgatcgaataaatagagattagccattgttgtaatccgttattattattctttattttaccattaattctaagctcaagaatgaatcagtgatgacaaattcaaaacctacctttataaaatgatgccagtcatattgtagtaattctgtttatttgtctctttctcttttaaaaacttttccttatttcctggaacattctgtgtttttcaaaatgtaggatgtcacccattttaggaatgaaacagaattgtaagaaggtgacttccatccattaagatggaaaattagtaggaaactttggtgtaaagaaaacaatcagaagactttgaattaccattaatagctacaatccatatttgtaaactaagtagtaatagaaatgaacaagtttaactccctgtttaaaggagaaccagagtatatattctgataatggaactacaaacatgctcatttgtgccttgtcagttgggtgagactcaascctttagtccatccttcttcgtgggctttgagggctttgaggtctgctaatcaaaatgtgaactcatcaggcatgtgacaaagttgtatgtttgcatctggcaggcatgtgcactgttaaaacaatgagtggagggcattccagagctgtccctggattcatcttccccatgcctgtgctacctcactcatgatgttctttaccaaacggacctttggggtgtctatattttcctgaaacyrcatcttctcaataagaaagccatgttgaaatccagaatttctttcctaggattgaacaaactactttcagtgagtgacatgatggctgacataagaaagaagagaaaaaagttggaaaaggtataagaaacatgttttttggtaaaagtaaattgaaagggtttaggtggagctgtttgcttaccaaattttttttattttactcatcataatgtcttgatctatttacctaggtgagatctcaaattatcaacttttaaatttccccttaaccaagcatagtatcatgtatggaatatttaggggtgaaatggatacagaatggtccrtcatgaaaacttcagaaatttgtttaaagttcatggaatggcagccacagcatacagttttaaatttatgatagccttataaatgtaaggcatagaaaaatgtaatatgaattgaaagattgttttatttccyaggattcctttaaggagtttaaggagttatttcctttaaggaattgggaagataaatcaatgtgagaaatgagttggcgaatcaccatagaatccaattaaaattctgatgtgagttcagcagcttgtagattgtgccagaccttcttaatggaaaattattctcaaccactagggttgggatgtaatttatttctattcaacaagtatgtgttgagaatctacaatgtraatgtcacagcgtgttttctaagatcaaagggcttacatcctaagaacagtcagttatccagtaactttgatttaagaaggttagccaagagttgcatttcagtaatacataaaattaacatcacatatacctaaataactgtcatgtacaattcatagagcatagttcccaccaccaatttaccaagatgaggttatttcctgaatgaaaaccaaatgcatggcaaaaatatagaatttaggaaaaggaaaaaatatgattagtaaggcaaaaatcttctgaaacacacctattgctatccaaaaacctttccaagtatttgaaggagaaaaatacacctacatgaatatttcgttagaaactcctgaaaccacggtagcagaaaataaggaaaccagacttatctcttgctttttgaagcaaccgtcaatgacacagttgctattaagccactgatagccatcatcttttccctatagatgatctcctcacacaaggtctacccagtatttacaggaaactgcttggagggatagaagttatcatgtgacacaaggcttctgattttttcctttttggtgtcagattgctgaaaaatcctcaagatacacayggagtgtactatgtagattacatggatgaaactgcctctgaaattggagcgaaacccaacctccyctcactcttcctgtgggatccaaagctagctatggaagttttctttggaccatgcacaccttaccagtactgccttcagrggccagggaagtgggctggaggccaggaagccatcctgacccagagagagagaattatcaagcccctgaggactcgtatccttactcgtgaccagccttcattctctgttattttggcttaaaagtatcagtgcagtccttctcatctttgtcctcattttcatcattgttaaaggataatcctcctttgtgcattattacagtatagaccaacaatggtacacaataattaagagcccagcatatgcaagtgtttttctctcaatccagactagactagtgcagtgaactgtccaataattccaaaatttcccatgtgcggatattttggccaaaatggagattttgtaaacagagatttcaagtaaagtggtttgtgtaagaaattacttttgaactgcacatttaatttctgtaacacgacaaatattctgagttattccaagtactcctaggcatctctttatactaaacacattttttgttggcttcttgcaattggtaaattcttgtttttgcatctgaagcacaggctaagaaaaagtatctcttcaaataatctagaaaatgttaacagtgaaaaatatcaccagaaaccctttccatgagggccacattctatagaatcatggatattgaagtaacaggctatttcaggtatgtttgaggtttttttaaggtacggagggtggcgtggagagaaaaagaggaaataacagaagtcaggaactatacataattttgtgttattttaaaactattgaaaatccattgaataagtcacatagtagacatacaaaattctataaacacactcagaagaataagaagcagatgtgggtgaaaagagtagaaggtatttgcaacatttacaaacactttaataattaatcaaagagatgaagtattttagtctctgattcaatcactactagtgaacctagtcctgatattctgtataagcttgttttttatctgaaatatattactctttctttaatttactcaaaaaaatatttattgagcatccactacatcagacattgtgctgagtgctgggaataaacaggctcactggatagcatctgatcttgtggatttagtgccgtctgtgtactgatgatgcccaatcacagacctttagccttcgacctaactttaaaaggctgaagtctaaagcttacacttacattaaccacgtgtctattcagcatattcaaacttaactaagccaaactctggtggtttactctagagattggcttccccatttctataaatgaaaacttcatcttttcagtcccaaaccaaaaagttttgaatcttttgattcctctctttcataccccatgctcagtctatcaacaaatcctgtcaccttcaaaataaatccagtatctcatcacttgtcaccacctccactgctaccacctgagcccttgccaccatcttctgtcggtattactgcagtagtctcctcactggacttctcaattcccccttaatctctgtggtctcttctccttatagcagccaattgatatttttaaaatgtaagcgagattatgaaatactttgcttcaaactgccagtggcttccacatcactcagagtagaagccaaaccctaataatgacctacaagtccttcctgatctgcttccccactgctcttctgacctcatctaccactactcttttccatgttcactccttgaacaagccaaacccactcccacttcatgaccattgcacttgccatgcccctttccaggaaaatgcttcccccagagggtccacaatgcacactccctcacatccttcagatgtttgctcaaatgtcatcttggggctgggtgtggtggctcacatctgtaatctcagtactttgggaggctgaggcaggaagatcacttgaggccagaagttcgagaccagcctggccaacaggtttggtttagtagaaactctgtctctacttaaaaaaaaaaataggcatggtggcccatgcctgtaatcctagctactcaataggctgaggcacgagaatcaagaattgcctgagccctggactcagaggttgcagtgagccaagatagcgccattgcactccaacctgtgaaacagagcaagactgtctcaaaaaaaaaaaaaagtcaccttgtctgtcaggtctttcatgactgctctgcgtaagacagcatgcctcaaaacagtcacttcctatcctccttatactgcattattttgcttcctgtcataatacataacaactattactctgttatttatttgtttttctgtctcctcttcaaagtgacgaaaaggacagggatcttcactgttttgtctggaacagttcctgccacaaactggtccttaaaaaatgtttgttgaagaaatgaacaagtagatattatccccgtctttgaagaactcacaatgagaaataataggcatgtaaacagataattaacaatttagcattggtgcctcagtctataaccaaaatatgaacaaaatgctgttggaactcagaggatagagcaaagaactcaatgaagggaaatcaggaaggatttgcagagaagaggaaagttgatttagatcacaagaagatgtttaggagctttttccagcaaaagagaagggcatcaaatatgcagtgtgtgtgtgcgagtagatcagcctgcatgccagaatgtgggactgggtgaggaagatgaacctgaagaggtagtctggggacataattgggagaccctctgctcaccacactgattcttattcctttgtttcatctgagtcagaatcacagcctcccgacccccgacttctctcccctgtgccctggtcctggtctccctgcatccagcctctcttgtcacctcacaccatctcccaaactgccaccagagttgactttctaaaaatccaatctggtcacatcattcctgtgcttaaaaccttaattttactctttgtggtctgtggaactgtactcaaactccttaccttgcttgcacttaaagtctctttttataggttgaaaatgaagcaagaatttccacttttatttaagctttctttactttattaatccagaaaggtgatgttggaactcaaatttgaatgtgatacatatttcaattgcctccacctcgaacctctctcagtagatgagacttccaaggagacacgtctttaccatgtctcctcttttcccacattgctacagacataatcacataagggtaattacaagcaaaaaggagaattttgttttgtttttttcatagttttggtctgacctctcactgacaaataatcctctccaacaatggttcttaaatttaacatgcatcatagtcccctagagtgctttttaaaatacagattgcggcactttacccccaaagatcatgattagacagatctggggtaaggacaaagaatttccatttctacaaattgtaagatgctgccgctactgttgctgctatctgaggaccacactttgagagcaatctcatgggcaatgtagagatggtagataccagaccttcaggaccctgagacaaccaggtcagcaccctctttaggtgaggcaaagacctagagagagattcttccttggtcacagccagttctgcctgaggctggccctgcgctgggtaaaaaaacacctactctaacagcttctatacacacaacacctagctcacaccagtggatattcacaataaatacttatgcccaaataatcaagttccactgaacccaaatatgctggaggagttcagtgtaaatgcaaagcattttctgaacatgtctcttaccatatgcttatcctaaatctttgatggtttctatttgaaagaaacaatcattgcatgtgtgttataatttttgacatcagataatactctgtacaaaatctttcagaggtcagaaagttttaatatccttttatactcaggaaatgaaacagatatgttaagctgtctagcctacagctgcacactgaatcactaggcatggagattaaaatccaggaactcttaagggttatatcttgtgcctgaaacaacacagttgcccagtcacagtcccttcaattttcttgaaaaattaccaagagaaatgaagaaaattaagagcttgagaatagagaaattgtaagaatggaattgttctctgaaaccatgtaaacatagaaatgtctaacaattatttcatttccaagtacaatayaaaacacaaaggccaatgtcatcttctgaagaataagttatataataatgatgggatttaaaaatactaatagaaacctggagttaaaatctcaaactatcttaacacaagttgagatgaagagagactaactcatgctattaataaattctccaatttaaaagggggtacttgaaacatatcattcacttgtgactacactgtggtaattctgagacaccactgggagtgaggagtgcttctgagttggccctgattccactttctgcaaatttggtgtactctgtgttccaccacttgggcagttctgcattttcagttatctttcttggtcacacctgaaatgggtcttagggactctgctctcctcggtgactaagcagtttttcctgtgtacagtctatcttcacagatgtttggcagtccaatgtcatttttaatctcaaacaattacaatctattttagtctaggcagatggcttttttgtcagtacaactctgtcacaacttcagcttcttatctgtttggttccagactactccaagtaccaatagccatagccactgccctctctttacatgcttcctatagttactgcatttctttggcttctcacaactatgcttctccaccttgacacacacacacacacacacacacacacacatccctacctcttgtttttctacttctgtccctgaatcctgccttgaatcaattgcatgttctttggccttgtcagatattaatgggagagaacaccttgagttattttgctcaaccaaaaggatttcctggcatcactgccttggctagaccttggcaccttagtctactccaaggctttaacaatgagtaggttggctgtacccttaatttaattctgttcctaaggctaaattttaatcaaccattgccactcaaaggtcttcccagtttcatattttacttattgggttcagaagccattgcctcttccaatcctataagcccacaaagttttagattctctttatttcttttgttcttgcttgcaaactggccaactctcatctgtgcttatttctttcttatagtattgaaccaactaacagcaaccaacatacactgctcacattgttttccaacctctttctctagagtctagagcaagggttagcaaactttgtgtgcaaaggttgagatagcgaatatttttgttttgtgggttatatagtcgtgcagcaactactcaactctgccaatgtagcacaaaagcagccatagaccgtggtttgtttttaacaaacatggctgggttccagcacaaccttatttatgagcactgtaatttgaatttcatataatttgttcatgtcatgaaataacattattttgatttttttaagcattaacaaatttaaaaatcattctttgatgcagaattctttgaactccctgatgacgatgacacaagcatagcttacagaacacttctgaaaacttcaaccaataaaaccaaaaccaatacatacaactttgtaaatgccagataagaggtaagcaaagaaatccctgttcatttagctaaggaaaaatatggatacattaaaatatggaaactataaaacacaatgacagaaataaagcccaaacatcacttatgaaaataattgtaaatgagtaaagctctcgaattggttgaatacgacaaagtctatgtagaagaaaaaataaagtgacacaaatggttataccagagattggcaaactatagcccacagaccaaatccagcccagcctgttgcttgattctgtaaatcaagttttattggaccatggccatgcccatttgttcacagatatttttgtggccattttcaacctataacagcagactcgagcagttaagacaaa

SEQ ID NO: 93791 - DNA, 16822 bp, Homo sapiens
ggttcctgccctcagtgcgtatactgctccccactttcgttgatgtggtagtggtgatgactgagccaaccacctaatgtggaaatgagaggacagcaagattgtgggtatggaatggggcaaagcaataagggaaaattagtgtggcagggttcagtacagcagcctgggttcccatttccccccatattcaaatgctgacactctcttctcctcccaggtccagcctgtggtgtccacaatgccccaggcctctgagcaccgcctgggccgtacccgagagccacctgttaatatccagccccgagtgggatccaagctaccatttgcccccagggcccgcagcaaggagcgcagaaacccagcctctgggccaaaccccatgttacgacctctgcctccccggccaggtctgcctgatgaacggctcaagaaactggagctgggacggggacggacctcaggccctcgtcccagaggcccccttcgagcagatcatggggttcccctgyctggctcaccacccccaacagtggctttgcctctcccatctcggaccaacttagcccgttccaagtctgtgagcagtggggacttgcgtccaatggggattgccttgggagggcaccrtggcaccggagagcttggggctgcactgagccgcttggccctccggcctgagccacccactttgagacgtagcacttctctccgccgcctagggggctttcctggaccccctaccctgttcagcatacggacagagccccctgcttcccatggctccttccacatgatatccgcccggtcctctgagcctttctactctgatgacaagatggtgaggacttgccacacacatggccttcatgcccatgttcctctgtgctttcctgccatcctctgccttttctgtcccccatttccctgaagttcctttctcagcccttcattacagcagtttggacatgcctctcccttgcttaaatacccttgagcctcctagacccttttttgggttgttggtgactcttcagcatggtgtgccatttcggtccccaggggattaccccaactatttagaattcttctttgggtccccaggcccttcctttcccttgcttgcaccttctctactgggactctgcctaggcctaattaatctctggagctaaagagaggcaggcacagaacatcttagcaaacgtggttgcacattttctgagctaagtaagctaggctgattgcaattggagccagcaggagaagggcaagaaggggccacgggggcaggagggggttttgggggcagaaaggtgggagtggtgagcagctgggcaaccatgccggtgctgggggagttgccccaggagctgcaacgtcarctagctgagcagaggagtaagtgggcaacaggtgggacagccatggctgagtcygtggtacattcagctgtgatgggcttactgctcatgaccagtgaggtagggagactagaatacctagtgaggggaatagggtagagtttggggatgaaacatgcatgggatgggggaggcagtgggcagcatgctgttgaaaggttaaagtgccaggtaggatatataggaacttgccgattgtactctgaccttccaggctcatcacacactccttctgggctctggtcatgttggccttcgaaacctgggaaacacggtgagagctattctcctatctttcctctctaaaaggaatgtgaaatggtgctgggggtggggaaaacccacgagcttggggaaggcatgtggaaggagagctctgaagctcttctaaggcttcctgggcagtggtctggagagataacagcagtgtccctactgctccccagtgcttcctgaatgctgtgctgcagtgtctgagcagcactcgacctcttcgggacttctgtctgagaagggacttccggcaagaggtgcctggaggaggccgagcccaagagctcactgaaggtggggcaacaactcctgctccctctgttcaagtccctttttccccaaccacttgcaggtccatctgccactggtggtggcccccaacccttaaatctggcagttgtatctacttttcccagtgcctactttcctaaaggttattttctaccctctgagccaccttttgcttgcctcttccagacattaacctttgtttgccttccccactcccatcccaacagcctttgcagatgtgattggtgccctctggcaccctgactcctgcgaagctgtgaatcctactcgattccgagctgtcttccagaaatatgttccctccttctctggatacaggtgggagagctggaggctatgggatttctctctggccatgtctgggggtagggccaagcaagggccctggcagcattgttctgagccttgagatgttcttcatccaggaagtggggaccaatatctgggcagggaatagtgtctgtggactaggagaggagtcagttgcccatactctttgtctggctgtagccagcaggatgcccaagagttcctgaagctcctcatggagcggctacaccttgaaatcaaccgccgagrccgccgggctccaccgatacttgccaatggtccagttccctctmcaccccgccgaggaggggctctgctagaagaacctgagttaaggtaagggtcgttccctctacctcctttccccgtagtttatcagcatcattcacacttcatagaactaaactagtaaagattgaagatgtagggtccagggaaaccctttagtatagaaaatagtatgagaagcaacatagaagtagaaggaaggaaggaagagggggagtctaagggagcagatggaggcagaagatcatgctagggatgtcaccaaattgaagaaggggataattcatttacaggtagaggaagacagcatattcttcccttatgtacattcctttcttttcctctcacctcggatttccctagaaagttcattgaggcattattcttttgacttttccttgaaatttagggaaggagcaggggtgtggatggggagtagggctctgtaggttgtttcagtgggtgttgggggtgcccagtgttcctgctgtctcatgggtgctccccacttcctttgatctgtggtagtgatgatgaccgagccaacctaatgtggaaacgttacctggagcgagaggacagcaagattgtgggtatggaatggggcaaagcaatgagggaaaattagtgtgtgaggggggtacaggcttggggggaaaaatcgatactatcaaggggtatgggaacaagactggatgatgcaaatgtgaagctgtgtgaagagttgattaggagtgttggtagtgggaaaggaagggtcaagcaaaggggcaggaagagatggaaatccaagaaatcatctcataacatccaacaatgaccttttctcctgtccctgtgcttctgtctagacctgtttgtgggccagttgaaaagttgtctcaagtgccaggcctgtgggtatcgctccacgaccttcgaggttttttgtgacctgtccctgcccatccccaaggtgggattccagaggattccggggtggacaggacaggggctctgtgacccaagcctacccacccccagagtgtgggcgggaaccctgtgggtttctggagcagaactgaagcctggattgattgagaagagttggaaaaggaaattcagaacatgttgacctttcttccccttttcccccagaaaggatttgctgggggcaaggtgtctctgcgggattgtttcaaccttttcactaaggaagaagagctagagtcggagaatgccccagtatgtggaggttcacaagggatacagtaagggtgggagacctggggggactccatgtggataaaagggattgcatgatgtcttcatatggggaataatatttatgtatctgggtttgtgttggagtctcagatctgttctagtactcctagagcaaaggggagaagccaagaggatccagctgtaatgaagagcatactaaatttgtatgtggatcggggtgtcagaaaagccaattgaggttaggagcatattaacctaacactgtttgccatttattcaggtgtgtgaccgatgtcggcagaaaactcgaagtaccaaaaagttgacagtacaaagattccctcgaatcctcgtgctccatatcctaatcttcagattcttacttctcttaggatacctcccatacattctctttcctccatgtttccagagaattgaattttccttaggaaaagtctgccacccacttttccacaagatgctcccagtgtgtcgggagtggggagaggacagctttcaggatagaagaagttcccctcagaggcccactgcctcccaaatgctccttaaccagggcttagatctgaatcgattttctgcctcccgaggctccatcaaaaaaagttcagtaggtgtagactttccactgcagcgactgagcctaggggactttgccagtgacaaagccggtgagtctggtggggaaagtcctaaggagccaaaggagtgggggcacagctctgattatagaacttgatcatctccaaccccgcaggaagtcctgtataccagctgtatgccctttgcaaccactcaggcagcgtccactatggccactacacagccctgtgccggtgccagactggttggcatgtctacaatgactctcggtgagaatagcctcctatttacatcctgccccattcccactcagccctgacaccctccccttctatgaagctccaggagagcagagtgccaggtgaaaggagaggtggaggtcttgcctgatcatttcctggatgctctgaggttcggtcttgtagggagaagggagtaaacaggaatgaccacaaccctttcccgatctccttttttcctagtgtctcccctgtcagtgaaaaccaggtggcatccagcgagggctacgtgctgttctaccaactgatgcaggagccaccccggtgcctgtgacacctctaagctctggcacctgtgaagccctttaaacacccttaagccccaggctccccgtttacctcagagacgtctatttttgtgtctttttaatcggggaggggggagggggtggttgtagctccattattttttttattaaaaaatacccttccacctggaggctcccttgtctcccagccccatgtacaaagctcaccaagcccctgcccatgtacagcccccagaccctctgcaatatcactttttgtgaataaatttattaagaaaaaatgatgtgcttatttgtatttttgcttagggggtgatagagaactgggccaaattggagtcttcttgggacccaagttccctctctaacaggtgggggcgctctcagagccgagggggaaggtttcggggatggtgctggacccggacctgtgtcccccagcagtgaaggttatgtactgggaggaaaagaggaaaggcatacttgagtgaggctgcgtgcaggctctggggcgactggtttggtcggcgatgggggagtgccactgttgacaaacactgggtacgttgccgggcggccctagctcccgtaggcccggtctgttgctaacatcaaggagctgtttatggagccgcctccccgtggactggccttaagtgtccctatctattctccctacgaccaaagctcctgcggccttccctctagggttgtcaccctagctggacctggtaagcttgtgctggggaacgctaactccagcattaagcgctcgccgcctcggtcctgaggagggcagtgacgggtacggccgctcactcccagctcggcgctaacacggttaacctccagctcttacagctgccgtcgctccgcctctgccagttcaatgttttattggtgaacgtgatccggggccttccaagtcccgccaatccagatgtaggagaggtagggttaggcgcgtgccgcgagaacagagtggacggagmgtaggagagaccgaaaaggctgggggtgggagtagcggatttgaagcacttgttggcctacagaggtgtggcaagcagagcacctcagaactcaggcgtactgcccgccgcccgagccstgcgagggccgatagcgagggtgtggcccttatctgcacccagcagagcgccggcggggtacggtcttaggacctcgatctccttctccctcattttctctcatccctacctattgtgggtgagtcctggcccctggacggggacctcgctgttccaccagcccatccgtgcacacttagtttcccctaaagcagtgagtggccgggatagaactcaaaaccggcggggcttctggagcgcaggttgtccccggtctgcctgtccatatcgccccctttcccccaggtttccgcaysggccggaccgtggtcgtgctgggcggargcaycagcggcttsgccgccagttaccacctgagccgggccccctgcccccctaaggtgagtgctccacttgtgccagagggagcttcatttaatgctcttcccatttccatcaaaagctagatggatcctggccctctgaatatgcctcttcccctcccctcctgacctctcgscggcggctacaggcggtgctgcagtgtctctccctcttgtcgccaggtggtcctagtggagagcagtgagcgtctgggaggctggattcgctccgttcgaggccctaatggtgctatctttgagcttggacctyggggaattaggccagcgggagccctaggggcccggaccttgcycctggtgagaggcttgtgggatgtctaggagaggttgtggagggggcttccattggggaatagagtttaggggaggaagtatgtttggtgggtcagatcttcccttagtttctcctcttctgagggcatgtggagagcaggtttctgagcttggcttggattcagaagtgctgcctgtccggggagaccacccagctgcccagaacaggttcctctacgtgggcggtgccctgcmtgccctacccactggcctcaggtaacaccagcacctccgctccttttactgtgccctcatcctcatatgccttccatttctttcttcttttctttttttttttttttttttttttttttgagacggagtatcgctctcgcccaggatggagtgcaatggcgcgatcttggctcactgcaacttccrcctttcgggttcaagcrattctcctgcctcagcctcccgagtagctgggactacaggtgcctaccaccacgtctggctagtttttgtatttttagtagagatggggtttcaccatattggccaggctggtcttgaactcctgaccttgtgatccgcccgcctcggcctgccaaagtgctgggattacaggcgtgagccaccacgcccgacctgccttccatttcttcatctccctgtcagccttcccagcaaaaggaagccaaatgagtggaaatgaccccagygcctggagctggggaggtatgtcaggagcttccccctcactatgcctttctccatgcagggggctactccgcccttcaccccccttctccaaacctctgttttgggctgggctgaggkagctgaccaagccccsgggcaaagagcctgwtgagactgtgcacagttttgcccagygccgccytggacctgaggtgacacttgcccagaggccccaaacctcttccctcctaaaccagctgcagagctccctgttcaaatctaccacctaggggctcttctgtatcatttggggatgccctcttctcttcataccccaccccctcataattcccaaaactcattattgggagtgaaggccttcatttccatccgtcacagtgggaatgtcccccaayccaaaccctatccyaccctcattccctaccaaataggggctgtggaaatcagtcagtgtagattattttttcgctccttagtcctagtctcacccttaagrtggcgtctctagccatggacagtctctgccgtggagtgtttgyaggcaacagccgtgagstcagcatcaggtcctgctttcccagtctcttcyaagctkagcaaacccatcgttccatatkactgggcctgctgctgggggcaggtgaggggggattgattcagagggtgaaaatattaagtactgccaaagtgagggagtggggacaaggggtgctattcaatgattctttttttcttttttgagacggagtcttgctctgctgcctaggctggagtgcagtggtgcaatctcagatcggctcgctgcaacctccgcctcccagattcaagcaattctcctgcctcagcctcttaagtagctgggattacaaacatgtgccaccactcccagctaatctttgtatttttttgtagagatgcagtttcactatgttggccaggctggtctcaaactcctgacctcaagtgatccacccgcctcggcctcctaaagtgctgggattacaggtgtgagccactgcatccagcctcaatgattcttctttgcttcctctgcagggcggaccccacagccagactcagcactcattcgccaggccttggctgagcgctgragccagtggtcacttcgtggasgtctagagatgttgcctcaggcccttgaaacccacctgactagtaggggggtcagtgttctcagaggccagcsggtctgtgggctcagcctccaggcagaagggcgctrgaaggtaggggaacccctggagtgtaatgaacctgtcagtgtttccatctttatccaagtggcttaactaggccagggccgataggactggagttcctcattgtttttgtgccttagaagctacttagacatgggctaccccagaatcctaggccctatttgtgaaccttcctcaaagagcctatgcaagtctgtggatagaagtagtacttataagtggcttagagataggggaaagaacccagcttcactgaacatttcagaacagccacactggcctgtctggtccacttcctggagtacacagaggaatgattttttgtgaagtctacatagtcacccaatctcttcatcctgggtcagtacacagtctccccggccacatgggtgcctgggaaactgagagtgaggcaccagaagtctcttttcactcatcaaattctcattttctgggtctctcaaatgttttcatgctctcaggtatctctaagggacagcagtctggaggctgaccacgttattagtgccattccagcttcargtaatggaatagccaccttccccttccccaacccctaccagtgagaagcaaaagctataccttcctgggtcagcaggaccacaccatgcccctgaactggtcatctctatgggagtctaatcccaaagaggactgacaactgtaatgggaatgccttctgagtcaggcctctgcctgatctctagtgctcagtgagctgcyccctgctgaggctgcccctctggctcrtgccctgagtgccatcactgcagtgtctgtagctgtggtgaatctgcagtaccaaggagcccatctgcctgtccaggtatgataaagggacggagaggctgggcatggtggctcacacctgtaatcccagcattttgggaggccgaggtgggcagataacaaggtcaggagttcgagaccagcctggccaacatggtgaaaccccatctctaygaaaaatacaaaaattagccaggtgtggtggcttgcacctgtaatctcagctactcgggaggctaaggcaggagaatcgcttgaacccaggaggtggaggttgcagtgagctgagatctcgccattacactccagcctgggtgacagagtgagactctgtcccccccacccccccaaaaaaatgggaaggagagacagcctcagctagagccctttccttctgacgcatgaatgtccttctctccagggatttggacatttggkgccatcttcagaagatccaggagtcctgggaatcgtgtrtgmcycagttgctttccctgagcaggacgggagcccccctggcctcagagtgactgtgaggaggaggaaactttgcctagtggcatttccagagggctcctctgtgctccattgtaggcaaggccagactgatcagtgctatattccctccttaggtgatgctgggaggttcctgrttayagacactggaggctagtggctgtgtcttatctcaggagctgtttcaacagcgggcccaggaagcagctgctacacaattmggactgaaggagatgccgagccactgcttggtccatctacacaaggtaagttgggataaacttccctcagctctccactgaaggccttgaagacagagactggaacatttgtcactgtatgtcagccaaggcctaggacatcaataataaacttttccctgcatcctctcctctcttctcagaactgcattccccagtatacactaggtcactggcaaaaactaggtaagttgggaaaacagctgggctgaggagggccaaggacatcagacccccagctaaaacattcctttcatcctttccttccagagtcasctaggyaattcctgactgctcacaggttgccccygactctggctrgagccycctatgagrkagttgctgttaatgactgtatagagagtgggcgccaggcagcagtcagtgtcctgggcacagaacctaacagctgatccccaactctcattcatgaaaataaaaattgctggagcttggcttggtctggctgttctatcacctataggcataagaatgcggggcagcaaagaggcaaagtgtgcctgggatgcagaaagcaggagcagatgcgagacaaagtcctttattagaaaatatatcaaaatcccagccccctgagccaggaccagaagagggagctattccagcataggcagaaaatgcccagggaggggcttccttcaccaaacaacttcccgggaaccataaatagaataaatattcacagaggtccgaggagaagccagatcactcttctctccatggaagagggaggggcttggggtccagccctgctcctactctaggggcagggactcctaggaatcgtcacataaaatcatgacatcaaggattcacagtcataagccctacaggagaccctagagagagggacccctcaggtctacaggagcccagctccagtccagcagtgagggagaggcccctaccccctagcacggcaccagagttcagttccctcacatccctctgagaacagtgaggagctgagggtggggagaatacaaccccatgaattcggtttcatgattaaggtagacaggaaggaggagtcagtgtgaacctcggagggctgtgtggttggcagtagatagaggcccaggcctggctgggggccggcgttgcagcatctcttgacggaaggcttgggaggaaccaggtgggtaacgtggcccagaaggagcccgaggaccccgagggtcagtcccaatgtctgctgtgatgttggtataaagaggccccagctctcgagccagcaactggtatgtcagtgagttcatcccatcttgcgtccaggaattctgggtacggaccaggaggtcaaatctgagggttagaggttggagactaagacccagaaaggaacagccagaaatctagggacctttaggattttcctggctaggggtacagaaccctgaggatccagtaacaattcccaggcagtccttccttcttcctacctgtggggattttcctcattgcccttatctcctcggtgcttcaccatcttatagtgtcctacagatgtggggggccgagagatcttcatcccagccaggcgcaccctatgggaaaagtgagggtatcatgggggatccagagtagagaaaagcaaggaagggattaaatgtttctgtacacacaaaaaaacaactattacttagtaggcaaaagaaaaaaaaagcccaggacagaagtcaaacagaaagaaggaaatggctgaagagaatataaaagctggatgtatccaaatcctcagggcccagtgccagtcaccctagggcctttaaacagttggcaacctattcccttggcttcctaaagggctcctaggagctgcccttgcagtctaggaaggacgcagagagaggccattctgtcaaaagaataagagaagactgggagttgctgagaatcttagaatagtgactgagctaccccagcttctctcccacatcccccatgttaagaaaaaggtaggccaggtgcagtggctcacacctgcaatcctagcacttttggatgccaaggcagaaggatcacttgaggccaggagttcaagaccagcctgggaaaataatgggaccttgtctctagagaaaaagaaaaaaaaaaaaaacgaaagaaagaaaagaaaagggtagaaccaggtaatcaggaccttaaaagaaacaaactccacttctgacacacagaagcatggagtgcagatggcctgggaaggaactagaagaatacttatgtatatttacaattcactgggtatttcacacacatacagaggatgagaattcacagagatgtcatcacagaggacacagggggaatggaggcaattggtcctgcataccaagcccaaatattcataccacagacatgaaattgggtcagctgaggctgaaggtcagaatgtttcacatgctaaaaatgagttggccctgtgccaatggcacaggccttttacaaagcgattctgggaacatggagcagagcccctctctcctaaccccataggaagtggcctggctggaaccccagcagaaggcaagactaagctgtctctgggcccctttccagttctggaatccgacgatactatttcctattgatcttatgtcctctcccaagaacaaactaaccaggagactgaaggatgacacaatgggcagtagcatgcaagcctgacctgggtatcctaaaaagactaagggaaaggaatgggctcagtgcaggaccagggagctaaaggttagtgttgaagggctatggtcaaaggtggtcttagaggacagggatccagactggggtcaggagggaggaagtggcaggaagtctgacctggtagcaatgtcgtcatcctcaccaccccagccccagtattcattggggaagccattcatcttcaggtactggtcaggagtaagtgctgagactcctccgaagtactgggggtacgggaggctagggagagaaagatccttgcataccccgagtcttctggggacacatccccaaccacaatccgcttggctctcctccttccacaggatagtaggcttccctgtttcccagtacccttccatgccctctacctgtatccaaacttgttcatagcaacggcaacatggcggggtccccgggggtcacacacatacagattgtggtcattttctggcaagaggtccacatcgtgcaagaacaggcagtcccactcttcatcacgcagggcctctcgcaccccaacgttcaacagttttgccctgttaaatgttccatttccagcctggaagataatggaggggaaccagactatgtctgtaggtggcacggagaaaagggggctaaagaataaaagtgaaggccgggcgcggtggcttacgcctgtaatcccagtactttgggaggccaaggcaggcagatcacaaggtcaggagattgagaccaccctggctaacacggtaaaaccccatctctactaaaaatacaaaaaattagctgggcatggtggtacacgcctgtagtcccagctactcaggaggctgaggcaggagaatggcgtaaaacccgggaggtggagcttgcagtcagccgagatcgtgccactgcactccagcctgggggacagagtgagatctcaaaaaaaaaaaaaaagaaaaaaaagaataaaagtgaaaagagggaaatcaaagtggggtggagggcaaggagaatgaaaaagaaagactatctttttcatttttccacttagtcatttgacaaatcttgcttgtgtattggtatggacctgatacttaagatgctgctgtctaacatttaatcctgacaattggcaaccaacaatggtgtggtgtggaacagatggtatattagttatcttatgctctttcctcatgttagatgtttaagtatcttgctcagagtcatacatgtaacaagtgacggaactagaattttagccctattgtgtccaattccaactctgcacaagccattcaataaagaaaaaatcacaggagagtgtaggacagtgggaataacctaagcagattaaggaaaagtatgggactaacaaagttggaagagcagtgccgggtgcttctccacactctaacagtctggccttcttaaaattattctagggacccatttagatgaaagtgaagtggcatgtgcttgaggcttccttagaagaaagtcagtcaaaatgaggtggagattgggggtacctggtggatgacatagatgccataagcaagctgctggcgctgcaagaaggggtgcaggtggtagagcagcaggcgcaggtggtgctcccgggcacgatgaggcacaatgatggctgttcgggagcggggctcacaacctgcagggcggtaccggccccctggttctacccggggattccgctccacaatctctgccagtgatggcactgggctaaaggacaccgacacaggacccactgttgggaaggaatggcaagtagagggatcagaggggcaaagagaaaagaatcaaactagggtttgggaatacctctgacactggcagtctggttctggggcttagttctcagggctcactcagaaatctcgcatgccttggattacctatcactgggacagctctacaaaggctggaaggtgcaggatccttacctagccttctcttcttattttagggttgcctaactttctcctgtcttacagggttggaagctatagttgaaggctggagagacttgcaactaattaaaccagggctcatctacaaggaaaacaattcctagcctggggcaggaagagcccataaagggacaagcagtagaaagtggaaacccaatagtctaatctaaactcccaattcagagtctactctatctcaacctcagccctctatctcaacctcagcctacctgcagcctcagcctacctatcctcttctaagttccacttctgccactccatgcctccctatccccaagcctccctgtctccgcaccttgtccttcctttcaccacctccttcctcctgcacttacctaagagaggagatcgttctggacagtagggcagaccttgaggagctggaggaccccctggggccccaggcaggtgactgaggttactgtagacatcacgagggtgagaatagtcaaatgtcggtccctgatctcggccaaatagggcactgagacttcggaagccccccagtgacaggtacatcatgacagccagctgggagcccacaagcagggccagcgtgcaaggccgctccagcagcctccgcaacatcctgggggtgagatctagggagggagaggggaattctgggggtaggcaggaagagagcaagccagcagagaggtcagtaggtagggttgaaggtgatgccaggggtaaagaggaaaaagcagaaaacaaagtcacagaagggagcacacaggtgcacagtcacgcaaggaaacagaatgtaaccaccagtaaccctaccacctgtcacttcagcccaagtttcgctctcctctacctccccccaaaccactcccaccatctactgtcagtcctcacccccaaaaatgtttacatcattcaaatctcatgttcatttcagaaagtctctagagaaccccctcttccaattttagaagggaagagatagactcacctaggttcaagctgtcttcttagggatcatgggggctccagggggtcccggggggacagagatgtgaggcattatctaaaattggaaatgtcacagagggcagagaaaggctccatccagcactccagcagcgaatctgggaccagctggaacagaagtggtaaaggataactagctacctgcaccgccagagatcaggatcagggtgaagctggtttcccagcaggcgaagtgaaggaaagtggttggaaaggaagaggaggagcaggagatggtaggtccctcgcctatctcccgtgctaccctggaatgataagtgtcaggttcatacttaaccacccccgtacccccaccccaacaggacagattggggagtggggacaggacagctaatggaaacattgttttcccccagaccaagaaccagttgaagtggcgacagagtcatgacaggaccgtggagtggcctaaggagtacccagggcgaagtaggaaacaggctccttctattcttcatgtgcctgggtgccaactcctcaggtgcagggaccgtgaccacctgggggctgtaagcgaacagccccggagctcggcggagagtagggtgggggtggcgtcctctaccttttctacctttcccctcttctagcgggggtggggaggagggttactgctgaagagaaagggagagggagagcaggggcagagacagtcaggggtggctggaagggctcacctagaggggcgtggtccgcgctgtggagggggttaaaacccagctctttcgg

SEQ ID NO: 93792 - DNA, 18705 bp, Homo sapiens
ggaggaggtgcctgtctctccttctagaagtgagcagtaaggctgggcacagtgacccatacctgtagtcccagcactttgggaggccaaggtgggaggatcacttgaggccagaagttcaagaccagcctgggggacatgatgaaacctggtctctacaaaaaatacaaaaaaaggcagggtgcagtggctcatgcctgtaatcccagcactttgggaggccaaggcaggtggatcatgaggtcagagttcaagatcagcctggtttgagaatctggtctctggttcgagaccagaccaggagttcgagaccagcctagtagatagaagatgaaaccccatagctactaaaaatacaaaatttagccagcacggtggtgggcacctgtaatcccagctacttgggaggctgaggcagaagaattgcttgaacctgggagacagaggtggcagtgagccaagatcatgccactgcactctagcctgggcatcagagcaagactccatctcaaaaaaaaaaaaaaaaaaaaaaaaaaaaaaaaaattagccaggtgtgcttgtgcacgcctgtagtcctagctactcagggaatggggtgggggctgaggtgggaggatcacttaaactcaggaggtggaggctgcagtgagctgtgattgtgccactgcactccagcctgggtgacagaatgagaacttgtttccaaaaaaaaaaaagaaagctgtaagactgcagggaacccatggatggtgggagggtgtcaggggggcatgatttctgtttgctaggtcaggttcaggttcttctatgttatacaaaaccaaagtgaggtaaagaggtaaagagaacagaccagaaaaccagaaactggaggataatatggtaagagaaagagctgagtgggagagagatctggaacaacagtgtaggctgaggggagttggaagggatagttttgggaagaaataacatccaagtagaaaatgttgaatggaagagggagaggaatatttttttttttgcaacagagtctccctctgttttccaggctggagtgcagtggcgccatctccacctcccaggtttaagcaattctcttgtctcagcctcccgagtagctggaattacaagcgtgtgctgccacacccggctaatttttgtatttttagtagagacagggtttcaccatgttggtcaggctggtctcgaactcctgacctcaggtgatccacctgcctcggcctcccaaagcgctgggattacaggcatgagtctctgcgctcggccgagacagaggattttaaagacattgggctgtccattaaaatgtgctcctaatccactgcccctttcccctgtctctgatatttccttgagaaattaagtagagatttaaattagtttttgattactaaactgggtttcttctattgtgttatgtgccatgactgggccagtgtgggccccaggatttattcagaatattgaaagacaggatgttgtggtggaaaccagcatgttaaaatttaagttttcagaaacataacagttctaggtgatgactaagtccagggtgtggccagggtgagacagagcagaagggaaggttcttgaaaacagggagcttacaaattaatgtaaaggaatggccagaagatagtagataggcctttgtggtggctcacaggaggctcacttgaggccaggaattcaagaccagcctgggcaacagagtgagactccgtctccacaaaaaactaaattagctaggtacacacctgtagtcctagctacttgagaggttgaggcaggaggatcaccttaacccaggagttcaaggctgcagtgggctataatcatgccattgcactccagcctgggtgacagagtgagtctctgactctaaaaaagaagatggttagatacagaaggagacagaaagtgaaggctgggcgcggtggctcaagcctgtaatcccaccactttgggaggccgaggtgggcagatcacctgaggttagcagtttgagaccaccctgaccaacatggagaaaccccgtctctactaaaaatacaaaattagccgggcgtggtagcacatgcctgtaatcccagctacttgggaggctgaggcaggagagttacttgaacccaggaggcggaggttgcggtgagctgcagatcatgctgttgcactccagcctgggcaacaagagagaaactccatcccaaaaaaaaaaaagaaagtgagggtcagtcctgtaagacagaacgcgatggaggaacagaggctcaaaggaagggtcctctgggagaaccacattttctctctttctctctttctttcttctttgagacagaatctggctctatcactcaggctggagtagtgcagtggtgcaatcagctcactgcagccttgaactcctgggttcaagtgatcctcccacctcagccctgtgagtagctggaactacagctgtgagccaccatgcccagctaatttttgtatttttcttggaagggaattttgccatattgcccaggctgatcttaaactcctgaactcaactgatccacctaactgggcctcccaaagtgttgggattacaggcgtgagccatgatgccaggccaagaaccacatttcaatgatctgtttaagtctgtcttttccactacacagtgatattcttaaaaaatcaaggctttttgagttatactatatcagaagctaaaaataataataaaaaataataaaagtaaaacaaacaaaaaatcaagtttgggaggccatagcgggaggatcacttcaacccaggagtttgagaccagcctgggcaacatagtgagactgtctcttcaaaaaaaaaaaattataataaaaaaaatcaaggctttgtcttggcttctatttgtgctcaaaagttttccatagttctaatgatcacaaaaccccttaaggctagagttcattttacagatgaaatccagagtgtattgctcagtacacagccaatgggtttcaaagttggtattgtatttaaacccagcattatctcattttgagccttcacaggcacctcaaactcattatgtctaaagtttgtcatctctaccccttccccaaaatgtgcttcttcctaagttttgtttctcattaaatggcaccacccagtggtccaaattagaaatctgggtgtcctcttggagtccaattcyctaacttggcacatccagtcaatcttcaagtcctgtttgcctcctgaaagttcccaaagttactttcttccctccagtcccacgggtattacctattctgcatgagcttcatcttattcctggatttctgcagtaactttctaaatagtctccctgcctctggtcttgactacttcaattagtgctccacatttcctaaagttctgatcatagcactctctatttacagcactttaatgccttcttcttgccctctggataagacccaaactcttttagcatggtttgtggagtccttcattatttggcatttgcttacctctccagtctcatatctcaacattcccttcactctactgtccagccttgcgggcccagttttaatttcccaaactccctaatttcttcctcatttccagaattttgcacttatggtttcctctgcttggaacactattcatctgttaaaagttaattttctagctgggtgtggtggcgcatgcctgtaatcccagctactcgggaggctgaggcaggagaattggctgaacccaggaggcggaggttgcggtgagccaagatggtgccattgcactccagcctgggcaacaagagcaaaactctgtctcaaaaaaaaaaaaaaaaggtaattttcagaagaaggtaaaattatgacccttaaactgttgaagaaaaaattattctgacacttgttaaaacagtaaggaagactattgcaatagtcaatgagcagaatcagagtcagtggatggaaggaaaattacattaaggctaggaggattcttgctaaactgacctaacaggatctttcctgaaggcaggtgagggtgatcagatagatcagctatcaagggtggagaagcgggcagggaattatccctaaactgacttggcaggattcttgctataactggctaggcaggcccaagacagcgcataaggacaagacctagccaaaaagaggccttagaggagcctgttgaaagtctggttaaggagatggtctttgtcaataccaacataaaaatgaacacataggccgggtgcagtggctcatgcctataatcccagcactttgggaggctaaggtaggtggatcatgaggtcaggagttcaagaccagcctggccaagatggtgaaatcccgtctccactaaaatacaaaaattagccgggtttggtggcgggagcctgtaatcccaactactcggtaggctgaggcaggagaatcgcttgaatccgggaggcggaggttgcagtgagctcagatcgcaccactgcactctagcttgggtgacaaagcaagactccgactcaaaaaaaaaaaaattctccttgaagactgggtatttgggaaaaaaaaaaaggaaaggaaaggaaaaaaaagaaggaagggaagggaagggacgaagggagggagggaggaagaagggaaggaaggaaggaaggaaggaaggaaggaaggaaggaaggaaggaaggaaggaaaaagagaaataaaattaagaggcctgatgctgtggctgacgcctgtaatcccagcgctttgggaagccaaggtgggcagatagtttgagcccaggagttggagaccaacctggacaacatggtaaaactctgtgtcttcaaaaaatacaattagctggatgtgctgttgtcccagctactcagctactcacgggtctgaggtgggaggatcccttgagcctaggaggttgaggctgcagtgagctgtgatcttgccactgcactccagcctgggtgacagagtgagaccctgtcacaaatttttaaattaaaaaaaaaaaagtaaacaaaaaggccgggcgtggtggctcacacctgtaatcccagcactttgggaggccgaggcgggtggatcacctgaggtcgggagttccagaccagcctgaccaacacagagaaaccctgtctctactaaacatacaaaattagccgggtgtggtggcgcatgcctgtaatcccagctactgaggaaggctgaggcagaggtcgcggtgagccgagatagcgccattgcactccagcctgggcaacaggagggagactccctctcaaaaaaaaaaaaaaaaagtaaagaaaaaagaaattaagaaaagaatgaacacgtgtttattttacctaactcatgaagaaactagcagatgttataattaatacaagagaaaatctagagaacggacatatttatggatcaggaaaacagaaatgaatatgaaaatggacgccaaaactgctttttttccccacagtgtggggaacagcaggttaattgaacctctaccagacaggatagaatttgcatacagatcagttacctacatgaattgtaaaataactcccatgaaaacagaatctttaaagcagaaggatatgctatagacaagtccttcaggtttcccattagccatcacttctgggaagcctttctagaatctccacgtatgaatgagttgccacttctaggccagcatatttatcacgttatattgtttacatccctccctccatacaagatacacaagaccatgggctttttggggcagattctgtgagttattcaagtctctgattgcttcttcagcgtgaatatctgcttctaaggaacacaatatgctaggcggtagtgtttgtcgtaaggtaaacatattgcatgttaacggagcatccattttactctaatatctggggaaacatcatttgactttaaagaagacgctgtctttccctccaccttcaatgtttcattgttttattaactaatcgcyttttatttccaggcctgcgggatacaacgggaatacaaaaatgcgctagagcggtccgcaacgctgtagcctgcgtaaggaacaattgatactaagtggcactaggctgcagggggtgccactgacacactgggagagggctcagccaaccacaaggtgataacgaggtcagcggagcaccagaaaccggctcactagcctcctgatcagtctcggcccagaggaaaatgaagggcttgagcttctgcttttacaaatctgaggggcaggaaatgaaatcccactagcagtctgcgtagtggagttgaaccctagcacccgctccccagggggtcgcctacaacgcgttccaggtgggcaggctcaggcgctgctccctcacaagcccccggccacgcggtgtctgggaccgggtgcctagtcagcccgggtggctccgccccgaggccccgccccatgacgcgagaccccgcccccgcagcgcccgcttccaagatggcggcagcgatgcctgcccggctgttggggtggcggtgacgacaggcagcaaaagaccaggtatgtgcgctgggaatgcgtcgacacggaggcctgggataaaggtttgggcattcgagagagtgagaagttttgggtaacgcctggagacgagcctgagcagggacggggtcctaggtggaagtatggacgggggccgggcgggctcacgttgctagtaggtagggcaaaagcaagagactgggataggatgggcgtgctccgaaagagctgggttttaaccccctccacagcgcggaccacgcccctctaggtgagcccttccagccacccctgactgtctctgcccctgctctccctctccctttctcttcagcagtaaccctcctccccacccccgctagaagaggggaaaggtagaaaaggtagaggacgccacccccaccctactctccgccgagctccggggctgttcgcttacagcccccaggtggtcacggtccctgcacctgaggagttggcacccaggcacatgaagaatagaaggagcctgtttcctacttcgccctgggtactccttaggccactccacggtcctgtcatgactctgtcgccacttcaactggttcttggtctgggggaaaacaatgtttccattagctgtcctgtccccactccccaatctgtcctgttggggtgggggtacgggggtggttaagtatgaacctgacacttatcattccagggtagcacgggagataggcgagggacctaccatctcctgctcctcctcttcctttccaaccactttccttcacttcgcctgctgggaaaccagcttcaccctgatcctgatctctggcggtgcaggtagctagttatcctttaccacttctgttccagctggtcccagattcgctgctggagtgctggatggagcctttctctgccctctgtgacatttccaattttagataatgcctcacatctctgtccccccgggaccccctggagcccccatgatccctaagaagacagcttgaacctaggtgagtctatctcttcccttctaaaattggaagagggggttctctagagactttctgaaatgaacatgagatttgaatgatgtaaacatttttgggggtgaggactgacagtagatggtgggagtggtttggggggaggtagaggagagcgaaacttgggctgaagtgacaggtggtagggttactggtggttacattctgtttccttgcgtgactgtgcacctgtgtgctcccttctgtgactttgttttctgctttttcctctttacccctggcatcaccttcaaccctacctactgacctctctgctggcttgctctcttcctgcctacccccagaattcccctctccctccctagatctcacccccaggatgttgcggaggctgctggagcggccttgcacgctggccctgcttgtgggctcccagctggctgtcatgatgtacctgtcactggggggcttccgaagtctcagtgccctatttggccgagatcagggaccgacatttgactattctcaccctcgtgatgtctacagtaacctcagtcacctgcctggggccccagggggtcctccagctcctcaaggtctgccctactgtccagaacgatctcctctcttaggtaagtgcaggaggaaggaggtggtgaaaggaaggacaaggtgcggagacagggaggcttggggatagggaggcatggagtggcagaagtggaacttagaagaggataggtaggctgaggctgcaggtaggctgaggttgagatagagggctgaggttgagatagagtagactctgaattgggagtttagattagactattgggtttccactttctactgcttgtccctttatgggctcttcctgccccaggctaggaattgttttccttgtagatgagccctggtttaattagttgcaagtctctccagccttcaactatagcttccaaccctgtaagacaggagaaagttaggcaaccctaaaataagaagagaaggctaggtaaggatcctgcaccttccagcctttgtagagctgtcccagtgataggtaatccaaggcatgcgagatttctgagtgagccctgagaaytaagccccagaaccagactgccagtgtcagaggtattcccaaaccctagtttgattcttttctctttgcccctctgatccctctacttgccattccttcccaacagtgggtcctgtgtcrgtgtcctttagcccagtgccatcactggcagagattgtggagcggaatccccgggtagaaccagggggccggtaccgccctgcaggttgtgagccccgctcccgaacagccatcattgtgcctcatcgtgcccgggagcaccacctgcgcctgctgctctaccacctgcaccccttcttgcagcgccagcagcttgcttatggcatctatgtcatccaccaggtacccccaatctccacctcattttgactgactttcttctaaggaagcctcaagcacatgccacttcactttcatctaaatgggtccctagaataattttaagaaggccagactgttagagtgtggagaagcacccggcactgctcttccaactttgttagtcccatacttttccttaatctgcttaggttattcccactgtcctacactctcctgtgattttttctttattgaatggcttgtgcagagttggaattggacacaatagggctaaaattctagttccgtcacttgttacatgtatgactctgagcaagatacttaaacatctaacatgaggaaagagcataagataactaatataccatctgttccacaccacaccattgttggttgccaattgtcaggattaaatgttagacagcagcatcttaagtatcaggtccataccaatacacaagcaagatttgtcaaatgactaagtggaaaaatgaaaaagatagtctttctttttcattctccttgccctccaccccactttgatttccctcttttcacttttattcttttttttctttttttttttttttgagatctcactctgtcccccaggctggagtgcagtggcacgatctcggctgactgcaagctccacctcccgggttttacgccattctcctgcctcagcctcctgagtagctgggactacaggcgtgtaccaccatgcccagctaattttttgtatttttagtagagatggggttttaccgtgttagccagggtggtctcaatctcctgaccttgtgatctgccygccttggcctcccaaagtactgggattacaggcgtaagccaccgcgcccggccttcacttttattctttagcccccttttctccgtgccacctacagacatagtctggttcccctccattatcttccaggctggaaatggaacatttaacagggcaaaactgttgaaygttggggtgcgagaggccctgcgtgatgaagagtgggactgcctgttcttgcacgatgtggacctcttgccagaaaatgaccacaatctgtatgtgtgtgacccccggggaccccgccatgttgccgttgctatgaacaagtttggatacaggtagagggcatggaagggtactgggaaacaggraagcctactatcctgtggaaggaggagagccaagcggattgtggttggggatgtgtccccagaagactcggggtatgcaaggatctttctctccctagcctcccgtacccccagtacttcggaggagtctcagcacttactcctgaccagtacctgaagatgaatggcttccccaatgaatactggggctggggtggtgaggatgacgacattgctaccaggtcagacttcctgccacttcctccctcctgaccccagtctggatccctgtcctctaagaccacctttgaccatagcccttcarcactaacctttagctccctggtcctgcactgagcccattcctttcccttagtctttttaggayacccaggtcaggcttgcatgctactgcccattgtgtcatccttcagtctcctggttagtttgttcttgggagaggacataagatcaataggaaatagtatcgtcggattccagaactggaaaggggcccagagacagcttagtcttgccttctgctggggttccagccaggccacttcctatggggttaggagagaggggctctgctccatgttcccagaatcgctttgtaaaaggcctgtgccattggcacagggccaactcatttttagcatgtgaaacattctgaccttcagcctcagctgacccaatttcatgtctgtggtatgaatatttgggcttggtatgcaggaccaattgcctccattccccctgtgtcctctgtgatgacatctctgtgaattctcatcctctgtatgtgtgtgaaatacccagtgaattgtaaatatacataagtattcttctagttccttcccaggccatctgcactccatgcttctgtgtgtcagaagtggagtttgtttcttttaaggtcctgattacctggttctacccttttcttttctttctttcgttttttttttttttctttttctctagagacaaggtcccattattttcccaggctggtcttgaactcctggcctcaagtgatccttctgccttggcatccaaaagtgctaggattgcaggtgtgagccactgcacctggcctacctttttcttaacatgggggatgtgggagagaagctggggtagctcagtcactatthtaagattctcagcaactcccagtcttctcttattcttttgacagaatggcctctctctgcgtccttcctagactgcaagggcagctcctaggagccctttaggaagccaagggaataggttgccaactgtttaaaggccctagggtgactggcactgggccctgaggatttggatacatccagcttttatattctcttcagccatttccttctttctgtttgacttctgtcctgggctttttttttcttttgcctactaagtaatagttgtttttttgtgtgtacagaaacatttaatcccttccttgcttttctctactctggatcccccatgataccctcacttttcccatagggtgcgcctggctgggatgaagatctctcggccccccacatctgtaggacactataagatggtgaagcaccgaggagataagggcaatgaggaaaatccccacaggtaggaagaaggaaggactgcctgggaattgttactggatcctcasggttctgtacccctagccaggaaaatcctaaaggtccctagatttctggctgttcctttctgggtcttagtctccaacctctaaccctcagatttgacctcctggtccgtacccagaattcctggacgcaagatgggatgaactcactgacataccagttgctggctcgagagctggggcctctttataccaacatcacagcagacattgggactgaccctcggggtcctcgggctccttctgggccacgttacccacctggttcctcccaagccttccgtcaagagatgctgcaacgccggcccccagccaggcctgggcctctatctactgccaaccacacagccctccgaggttcacactgactcctccttcctgtctaccttaatcatgaaaccgaattcatggggttgtattctccccaccctcagctcctcactgttctcagagggatgtgagggaactgaactctggtgccgtgctagggggtaggggcctctccctcactgctggactggagctgggctcctgtagacctsaggggtccctctctctagggtctcctgtagggcttatgactgygaatccttgatgtcatgattttatgtgacgattcctaggagtccctgcccctagagtaggagcagggctggaccccaagcccctccctcttccatggagagaagagtgatctggcttctcctcggacctctgtgaatatttattctatttatggttcccgggaagttgtttggtgaaggaagcccctccctgggcattttctgcctatgctggaatagctccctcttctggtcctggctcagggggctgggattttgatatattttctaataaaggactttgtctcgcatctgctcctgcttyctgcatcccaggcacactttgcctctttgctgccccgcattcttatgcctataggtgatagaacagccagaccaagccaagctccagcaatttttattttcatgaatgagagttggggatcagctgttaggttctgtgcccaggacactgactgctgcctggcgcccactctctatacagtcattaacagcaactmyctcataggrggctcyagccagagtcrggggcaacctgtgagcagtcaggaattrcctagstgactctggaaggaaaggatgaaaggaatgttttagctgggggtctgatgtccttggccctcctcagcccagctgttttcccaacttacctagtttttgccagtgacctagtgtatactggggaatgcagttctgagaagagaggagaggatgcagggaaaagtttattattgatgtcctaggccttggctgacatacagtgacaaatgttccagtctctgtcttcaaggccttcagtggagagctgagggaagtttatcccaacttaccttgtgtagatggaccaagcagtggctcggcatctccttcagtcckaattgtgtagcagctgcttcctgggcccgctgttgaaacagctcctgagataagacacagccactagcctccagtgtctrtaaycaggaacctcccagcatcacctaaggagggaatatagcactgatcagtctggccttgcctacaatggagcacagaggagccctctggaaatgccactaggcaaagtttcctcctcctcacagtcactctgaggccaggggggctcccgtcctgctcagggaaagcaactgrgkcayacacgattcccaggactcctggatcttctgaagatggcmccaaatgtccaaatccctggagagaaggacattcatgcgtcagaaggaaagggctctagctgaggctgtctctccttcccatttttttgggggggtgggggggacagagtctcactctgtcacccaggctggagtgtaatggcgagatctcagctcactgcaacctccacctcctgggttcaagcgattctcctgccttagcctcccgagtagctgagattacaggtgcaagccaccacacctggctaatttttgtatttttcgtagagatggggtttcaccatgttggccaggctggtctcgaactcctgaccttgttatctgcccacctcggcctcccaaaatgctgggattacaggtgtgagccaccatgcccagcctctccgtccctttatcatacctggacaggcagatgggctccttggtactgcagattcaccacagctacagacactgcagtgatggcactcagggcaygagccagaggggcagcctcagcagggrgcagctcactgagcactagagatcaggcagaggcctgactcagaaggcattcccattacagttgtcagtcctctttgggattagactcccatagagatgaccagttcaggggcatggtgtggtcctgctgacccaggaaggtatagcttttgcttctcactggtaggggttggggaaggggaaggtggctattccattacytgaagctggaatggcactaataacgtggtcagcctccagactgctgtcccttagagatacctgagagcatgaaaacatttgagagacccagaaaatgagaatttgatgagtgaaaagagacttctggtgcctcactctcagtttcccaggcacccatgtggccggggagactgtgtactgacccaggatgaagagattgggtgactatgtagacttcacaaaaaatcattcctctgtgtactccaggaagtggaccagacaggccagtgtggctgttctgaaatgttcagtgaagctgggttctttcccctatctctaagccacttataagtactacttctatccacagacttgcataggctctttgaggaaggttcacaaatagggcctaggattctggggtagcccatgtctaagtagcttctaaggcacaaaaacaatgaggaactccagtcctatcggccctggcctagttaagccacttggataaagatggaaacactgacaggttcattacactccaggggttcccctaccttcyagcgcccttctgcctggaggctgagcccacagaccsgctggcctctgagaacactgacccccctactagtcaggtgggtttcaagggcctgaggcaacatctctagacstccacgaagtgaccactggctycagcgctcagccaaggcctggcgaatgagtgctgagtctggctgtggggtccgccctgcagaggaagcaaagaagaatcattgaggctggatgcagtggctcacacctgtaatcccagcactttaggaggccgaggcgggtggatcacttgaggtcaggagtttgagaccagcctggccaacatagtgaaactgcatctctacaaaaaaatacaaagattagctgggagtggtggcacatgtttgtaatcccagctacttaagaggctgaggcaggagaattgcttgaatctgggaggcggaggttgcagcgagccgatctgagattgcaccactgcactccagcctaggcagcagagcaagactccgtctcaaaaaagaaaaaaagaatcattgaatagcaccccttgtccccactccctcactttggcagtacttaatattttcaccctctgaatcaatcccccctcacctgcccccagcagcaggcccagtmatatggaacgatgggtttgctmagcttrgaagagactgggaaagcaggacctgatgctgasctcacggctgttgcctrcaaacactccacggcagagactgtccatggctagagacgccaycttaagggtgagactaggactaaggagcgaaaaaataatctacactgactgatttccacagcccctatttggtagggaatgagggtrggatagggtttggrttgggggacattcccactgtgacggatggaaatgaaggccttcactcccaataatgagttttgggaattatgagggggtggggtatgaagagaagagggcatccccaaatgatacagaagagcccctaggtggtagatttgaacagggagctctgcagctggtttaggagggaagaggtttggggcctctgggcaagtgtcacctcaggtccarggcggcrctgggcaaaactgtgcacagtctcawcaggctctttgcccsggggcttggtcagctmcctcagcccagcccaaaacagaggtttggagaaggggggtgaagggcggagtagccccctgcatggagaaaggcatagtgagggggaagctcctgacatacctccccagctccaggcgctggggtcatttccactcatttggcttccttttgctgggaaggctgacagggagatgaagaaatggaaggcaggtcgggcgtggtggctcacgcctgtaatcccagcactttggcaggccgaggcgggcggatcacaaggtcaggagttcaagaccagcctggccaatatggtgaaaccccatctctactaaaaatacaaaaactagccagacgtggtggtaggcacctgtagtcccagctactcgggaggctgaggcaggagaatcgcttgaacccgaaaggcggaagttgcagtgagccaagatcgcgccattgcactccatcctgggcgagagcgatactccgtctcaaaaaaaaaaaaaaaaaaaaaaaaaaagaaaagaagaaagaaatggaaggcatatgaggatgagggcacagtaaaaggagcggaggtgctggtgttacctgaggccagtgggtagggcakgcagggcaccgcccacgtagaggaacctgttctgggcagctgggtggtctccccggacaggcagcacttctgaatccaagccaagctcagaaacctgctctccacatgccctcagaagaggagaaactaagggaagatctgacccaccaaacatacttcctcccctaaactctattccccaatggaagccccctccacaacctctcctagacatcccacaagcctctcaccaggrgcaaggtccgggcccctagggctcccgctggcctaattccccraggtccaagctcaaagatagcaccattagggcctcgaacggagcgaatccagcctcccagacgctcactgctctccactaggaccacctggcgacaagagggagagacactgcagcaccgcctgtagccgccggcgagaggtcaggaggggaggggaagaggcatattcagagggccaggatccatctagcttttgatggaaatgggaagagcattaaatgaagctccctctggcacaagtggagcactcaccttaggggggcagggggcccggctcaggtggtaactggcggcsaagccgctgrtgcytccgcccagcacgaccacggtccggccsrtgcggaaacctgggggaaagggggcgatatggacaggcagaccggggacaacctgcgctccagaagccccgccggttttgagttctatcccggccactcactgctttaggggaaactaagtgtgcacggatgggctggtggaacagcgaggtccccgtccaggggccaggactcacccacaataggtagggatgagagaaaatgagggagaaggagatcgaggtcctaagaccgtaccccgccggcgctctgctgggtgcagataagggccacaccctcgctatcggccctcgcagggctcgggcggcgggcagtacgcctgagttctgaggtgctctgcttgccacacctctgtaggccaacaagtgcttcaaatccgctactcccacccccagccttttcggtctctcctactctccgtccactctgttctcgcggcacgcgcctaaccctacctctcctacatctggattggcgggacttggaaggccccggatcacgttcaccaataaaacattgaactggcagaggcggagcgacggcagctgtaagagctggaggttaaccgtgttagcgccgagctgggagtgagcggccgtacccgtcactgccctcctcaggaccgaggcggcgagcgcttaatgctggagttagcgttccccagcacaagcttaccaggtccagctagggtgacaaccctagagggaaggccgcaggagctttggtcgtagggagaatagatagggacacttaaggccagtccacggggaggcggctccataaacagctccttgatgttagcaacagaccgggcctacgggagctagggccgcccggcaacgtacccrgtgtttgtcaacagtggcactcccccatcgccgaccaaaccagtcgccccagagcctgcacgcagcctcactcaagtatgcctttcctcttttcctcccagtacataaccttcactgctgggggacacaggtccgggtccagcaccatccccgaaaccttccccctcggctctgagagcgcccccacctgttagagagggaacttgggtcccaagaagactccaatttggcccagttctctatcaccccctaagcaaaaatacaaataagcacatcattttttcttaataaatttattcacaaaaagtgatattgcagagggtctgggggctgtacatgggcaggggcttggtgagctttgtacatgggrctgggagacaagggagcctccaggtggaagggtattttttaataaaaaaaataatggagctacaaccaccccytcccccctccccgattaaaaagacacaaaaatagacgtctctgaggtaaacggggagcctggggcttaagggtgtttaaagggcttcacaggtgccagagcttaraggtgtcacaggcaccggggtggctcctgcatcarttggtagaacagcacgtagccctcgctggatgccacctggttttcactgacaggggagacactaggaaaaaaggagatcgggaaagggttgtggtcattcctgtttactccc

SEQ ID NO: 93793 - DNA, 35609 bp, Homo sapiens
agccaaagcaatcttgagcaaaaagaacaaagctggaatcatcagactacctgatttcaaaatatattacaaagctatagtattcaaaacagtaatgtactggcaccaaaacagacacagaccaatgaaacagtatagagagccamgtaattacccacacatatacaaccaactaatctttgacaaaagtgccaaggacacacaatgagaaaaggatagtttcttcaataaatggtgttggaaaaaattggatatccacatgcaaaagaatgaaattggacccttagctcacacaatatgcaaaaattaactcaaaatatattaaagacttaaactgtaagtataacatgtatataaatcatgaaactgtaaaactactgaaaataaaaacatagagacaaagctttttgagatttgtctgggcaatgattttttcagatataaccccaaaaccataggcaacaaaagcaaaaagagacaaatgtgactgcttcaaaataaaaggcttctatacaggaaaggaaacaacatagtgaagagacaacctatagaatgacagaaaagatttgcaaaccatgcatgtgatacggggttaatatcaaaatatataagaaacgtaaacatgtcaacagcaagaaaacaaataaccggattttaaaatgggtaaaggacctgaataaacatctaaaaaaaaaatggccatatgaaaaaatgcccaacatcactaatcatcaggaaaatgctaatcaaaacaacaagatatcacctcacacctattaggatggctattatcaaaaagatgaaagataacaagtgttggtgaggatgtggagtaaagggaatccttgaatgctgttgatgggaatgtaaattagaatagccattatgggaaacagtatgaaggttcctcaaaaaagtagaatagaactaccatatgattctgcaatcctacctctgggtatatatccacaggacatgaaatcagtaagtcaaagacatgtctgcactcccatgttcactgcaaaattattcacaatgaccaaaatatagaatcaacctaagcatttatcaacaaatggataaagaaaatgtggcacttaactacagtggaatattattcaggcttaaaaatggaaaacatcttgttgcaacaatatggatgaacctgacagacattttgctatgtgaaattaacctaggcccagaaagacaaatactgatcattctcacttacgtgcagaatctacaaaagataaactcacagaagcaaagagtagtagggtgatttccaggggcttgagggtgggggaaattgagtaatcttggtcaaatggtacaaagtttcagtcatgcaggatgaatatgttctggagatgtaatgtacaatatggtgactatggttaaaatactgtattgtatgcttcaaatttgctaaaagagtagatcttaaatgttctcactcaaaaataatggtaactatgtgaggtgataagtatgttaaatagcttatcatttcacaatggggagatatatatatataccatgttttgtgccttaaatatacgcagtttttatttgtcatacaccttacctcatggtttgcattctgcactctgcccaactttccgtgtgcactctcttgggtatgtgctcttgctcccatggtccctgtagctgacaacactttccacccatttcaaaccacacatttttcttcattcttcaaagtcctttctcaaacactgatgaaaatgcaaatcttcctccagtcccctcccacagagtaaatttctcacccttctaggtttaaatagccccttttaagactctgttactatgtgaatcatggtcaaaactgtagcatagttaacaatgtatgtgtcttcctctcatctatctggcctaatgctgtgactgatacctattaaatatttggtacataataattccttttcttttccttttcttttctttctcttaaggggaggcagcacatcttcacagtcctgccacatcttagttgtataattgtgccaggttaacctgctaagccccagtctttcttcagaaaaatggccacagtaatacttgccttataargtacttttgaaaacaaataacataatgtgtctaaagtgcttagtttagtgcctggcacccagtgaatgcacattctaaagtgattatttttagtggtattttcccccatcatttcctgactgtgaggcagtctgaagcattttacataccatgtcccagagtctgcactagaacttagcttcctaggagacggtactctgtccttttttgttgccactgtatctgtaacattgcaaacaatgcctggcatgcagtaaatgctcgattaatacttgttgaataaccctctgaaggttccatactctctaaagtaagagtatcttcttcatactctctaaagtatgtcttctcactattcccatttatagggtattggaaaaaacatagcatcaagtcatcaatttttgctggcttagcaaatttgaacagttcagtttttcattagtatattgagaataataatacctgcctcacaaggttaatggaagaaaataaatgaaaagcactttgaaatacgtgtcagcattctgaagatgttcattaatctcagtctattcttaatcctgttcttggagtggctagtgtgaaccattaggggctgcaagcctcagtggtatgacctatagagccctgagctttaagagaaaagcatggaactttaagtacaaggagacatggaaaggccacagagaggtagattcccagctgagggggaggtagagaagctctggaaatgatcacctttatccctggccttaacatatctcttcctcctgggtcctccatagtactcagggtcagcctgaagatggttcaccagtagagaactgctggcgctgaagaagaagaagacactgtggacaatgttctccccttgtttcatgatcttgctcactttggcctatcaaataactccagggacttcatcttttagttgattaagtacctgggataccaccttcttatagctctaaagacactgccaagctatgagaatgcagggggaggcaggagatccacaaggtctgattttcctgatcatttttgagtaacaggactttctgtgatctcattaaatcacaaatgcagtctcaatccggaaaatagatcccatcatatgtgataatcaaaaccttggactttactttcagctgtaatcttttcagtattaccttcagctgaacctgcagctaggagaagcctgaggtcctggaaggcaagcatgaggcttttctcctatatcgccttatgcttccactcctcctccccatgatgctgatggaaaagtttccaaccctttcagaaaattatattttctgtctttgaaaagctgacattttacaaatctcttaatttcttaatacactgaggtgtatgcaggaaattaagagatttgtaaaatgttgaagggatattagtaattacttaatccaatttgcttatcttacaggggaaggatctaaattcctgcaagaattatcccaaaatatayagccaaagagatgaatcactgagtttttaactataatattagataacagtatgaatatttttaaaatttataagaagacagaactggctttcatttaatatcatacgtattacaagaattggaaagctaaaaaaccacatttctaagactctcttgcagttagggattggatgcaattagttttgccagtgagacagacatctaggctcagaaggcaaagggaagcaaaagctaaattttcgtgacaatgctgatgggcaaatgtattccaacaggtgtgcttatatcagctgaactccatgttccaccttttagccccccaatttgtatgttgcaggcatctgtggtgattgaagcagtttcctgccctctggatagtagctctagtggtgtgacctctccagtcctgcagcaacctcctagttcctgctctttcagctctttgaccttttgcaagcacctaattccctgtagtatatacctttcttcatgatatatagtgttttttatctcctgcactaaatcatgagcatatgcatataaatcataatatgaaatcttaaaaacagaagtacttttgctgaggcattaagcatataatcagtcagcaggtccccaaacatctaattcctgaatatctcatatatcctgtctccattatccattcctctaatgctactctaatttaagtcctcagtctctctggcctagattgttgaaataacatcctgggtttttggtctccttgattctagtcaccatcctctctagcctccaggtgaatctgatcttgtctgatgttgtcacttccttgttcaaaattctcgaatggacaaccgtaatccagaaggtagtatccaaacctgtgattgtggcacttcagtatccttcataacctatgtcctgcatgtttaacccatattttgctattcccatcacttatggtccagcaaaactgaactaattgtagttcccccatcacgtgttcttacttttctatgcattttcacatatttttctctctgccttttttctatttcttgtcccttatctgtctggaaaacatctattcttccttcaagactcagctgtcttctcacactccttgaagcctctctttcctcctccaagtggacctagatttttcttcctacatgctagcactacactgaaccatacttccactgtgacatttatcatctccctcaacactagacttcatggttccagatggaaagcactgtgtcttctcacctttgaatcccccaaaagactattataatgcatgacatatagtaggctgtcagtacagtgaaaggaatggccagaggaaggaaaggagggaaacagaagcagaaaggacaggtatagaagccggagggagccagagacaaggttcagagaccacaattctgtcttttgagttcactagttttacaagctcatctataagcgttagttcagcaactcagatcaggccctaagtttccagaaatttgagctacttttcactgttggcacaacaaaacgtttcattatagtccaggtgcatagcctttgtttatatattctatatttccaaagcaaacataaatgaaagaatcattgttcccctaatctcccaggagtttcaccttacagctccagtggccatggcagtcactgttttatattttttgtaacaagaaccaaagacttcattcttgcctttttcctacccctttctttttacttcacccatgcctcccctgttcttctcttatccttaccacactcagtccttctctttcagattttactatggctctataccattaaaaatacaagaaaaaaaaggaattttactttaagaataactcctcccccttccccagttttcacatcaaaagacattgttaaatgccattctcttccacatttcgagaactgctgattctctggggagagaaaggtgattgcttaagaggtgaagtcccttagagcattcaaaatgaggagtgattctgtacagaggatatcatgcagcaggctggatgtctagttccaattcctttatttgttacctctgagaccttgaagaagtagtttctagtctcagcataccaaagcgtcatctgcaattgagagcattggattgatgatcttcaaggtccttcctgctctagcattcactgaatctgctatttttgacatattgaataatcagaagcagccagttttagaatcttattatagcaaaagtggtaaaaataatgagcatatactatcaatgtgcatctatgtcttcttatgtttgagtgaggatcctgatacataaaccttggctgataatttctactgaaaaaaatcgtaagtattaaagacactcttctgaagatgttctctccagactctgctacaggcaatcatgagcaagagggttggcatcatcggagctggagtcagtggcttggctgccatatggtgctgtctggaggaggggctggagcccacttgctttgaaaggagcgatgatgttggaggcctgtggaaattctcagtgagtggcacatcattagaacaccagtggaaggagatggattccaatgcaaatcaaatctgatcagttctaattcagatttagaaggcagatcacaaaagctccaaatctggaaagtaaaatcttacctctccaatcatactaatgcccaaaaaaactatttcataccagcaaaatttgtcctgaaaaggacattttcagctcattaaacatcatcacctgcatggtgaaatccagatctccaagctgtaaagggcactaatgttggtaattagtcaaaaatataccatgggcttcccaggtaagtgaaacaattctattctttattgctcttaaatgccaggaacacgactagaaaagagacaaacaaacctggactgagatcctgaggtcagaagtcctgagttctaatttcaacttgtaggttttctaggcagataagatttcagtccagttgcttttgtttccctggacctcaaatgctcatttgtcaaatgcagaggatatgattctataattaacttatgtctattgggcagatagaaattattatagatgatgattgtgtgtgcggctgttgaatagcctatcagctccaaatccagagggaaaaattatggtctttgccatttgggctcattgtagaaataatataattaggaaatagtccttgtaaacacatttttttttttaatttcaaagccaagtttggagaaacttctagttcttctgtcctggatttcccagccattgtaatcagttgtcgatgatacatatttggcttgaaaacatattcacatcattcatattgtaactacttcctgtcctggtctcagttactgctctgcctgcgccaatagcctcctccaatagagtatatcagtgctaacttagaacacatttttattcttctccaagctttttttaaaaaaawttgtggttttgtaaccctgaaagcactccatgagatataaggtcattaatttttatttcccagtagggggtaatcaagagttaatatttttcaagaatttaattttccctatttacatttgctcagggaaatgtggacagcttagagtaaatcataaaatggctttctaccatctccctagtaacaattaaatgatgcttgagcatctattctggtagtttgtgctaagtactgggatgacaaatatggaatataatcactccttgtaaatggttccatttcatttgattaagcaagccataatataattccgtaatcctttgatagcaaatgggcaaaaactcatttgatagccgaacctcttctgaaatcgtaaggttaaataccgtgaattggatcaacatgaagctaagtctcacyttctgttgcacggcagaaattttattgcatttgacagattgctgccccagatctcactaggagtattatggagcaaaatccaaaaatgtacacattccaaaatatatctggccctaagacttttaaaataagagattatataactacaacaacaagatagaccttgtcaccatcaattcaatggacgagtgcctcgagcrtttagaagagggtggactacggaaatcttagtaggtcaaagaaaacctcccacagggatgacacttagccttgaaggataaccccagacaagcaaaatagaggaccacctgtgacacaactcctagagagtgcatttcccaataaagtctgcgaatggcactccataggcctatgcagtcattggcagtgtgccagcaccaggttaagagagaccaacaatccatgaaaggcacagaaaaggcaatgaacatggtgtgtgcagagagggatccatgagttatccaatatagccagatcagaaagtttacttaaggaagcaataatatgatacaaagatcagtaagattcaaagttggattctgagttatccacaagaggaaattcttcttttccataaggtcatgtctataagcaaaattctactcaaagtcctggtgaggatatggacccatacaaatactcaaaactttagcctcctccacataccccagcccttccttcttttcttagaaaagttgcttggcacaatatataatcagagagggattttttttatgtgttacataagactttatcttgtaagccttttttagaaggtgttctagcagacagaaacgtggtaattctgaacttttcactatttgctttttctgagaaatgaaaaccaaatgggatttaaatactagcaggctgaatgtgtgttttaagtttcatccactcctaaatagggcctcgtgtcctcaaaagatttcattactgctgtaataagaagttgctcaacagccaggtgcggtggctcatgcctataatcccagcactttgggaggccaaagcgggtggatcacgagaggtcaggagttcaagatcagcctggccaacacagaaaaaccccatctctactaaaaacacaaaaattagccaggtgtggtggtgggtgcctgtaatcccagctactcaggaggctgaggcaggagaatctcttgaacccaggaggcagaggttgcagtgacctcagatyatgccactgcactccagcctgggcaatagagaaagactccattaaaaaaaaaaaaaatgcttaccaataggttagtagcattttgattgcaaaagctgaagccaggactatttgaactttttcccactcatttattcctttgttcattcaatgaatacatactgtgtactttatgtgtagggtactatattaagcataagctgcagataagaggccagccagcactttaaaagccgtgagaaaacaagtatyagaataactataagtgactatataattagggcaataaggataatgggaccttagtaaaactaaagatgatttggcagtagctgagagggaaggtaaagaaagccatgacaaagttgaaggcaacttttgagcatatttcaagggcatatttagacaaggagatatgggactcataagcagagctggaataggaaagaagatcaaggtaaactgcttagatgcatgtacaacattctgaaattaacctctgactttgccctcaagttacttatgttctcgtgggaaagatgagagatgaacacggttatcatccaagacagatggtgcccacagctgcttagatctctggttccagggtaaagctccctcagctagaggcagagtcaaagttgaatttcctccttactggctcaaaccacacctcatattgaaataataaaaatgcatgctccctggagcaactgacttgttatctaatacatttgcttttttgtgtttgtttggagaacagtcttttcggaaaaattccaaggagctgtagtgtacatactcttctctcctkgtgttataattggctgaggtcaaggggcaaaaaagcagagattcattcaagatggaaatattccaaggccttagcatctgtttcccagaacagagtcttacattctttaaccaggctccatcccacagttcagccctgcctcctttcaacaggcagctgaaaaaacctccttcccacctctccttcttctcacaaccatcagtagaaggcgctagctgtgggtgaaagggaagcactcagcctgccaaactgctggacatgagccttcaccctttttctgacctccacaaaaattttaaaaagtttaaattcctgtgcttccacgcttatgagaaatacagcaaccatgaatagaggaagattatgttttcaacttgagaaaaaatactgaggctttgggcagccccccacttccccacggggacacaatcctctcaaccctttccagcactttttgtttccctcttccagaggtcatctgrtgtgagagggagakacacatcttgaatccagcagcaacgtgacattccatctctttccccccattgcacaagagtcccttccggacctcgggaagcagaagctgccagctctgaaatgtattttsaaggcagcacattgtgtgcacttttaccctaccctcacaactgagaggaaatgtttattttcaatttagcttttgactgcttctaaaaaataagccacttttcaattacacagaggctttaaaatgaagtgccaagatttaacacatgttctaagggctctggtttcctgtgtttctttggtgaggagtgaagtccagcaactggtgagccaaagaataggattcatttacaacagagcagtggttctcaaagtgtggttcctaaaccagccacatcagcatcaccaggaasttgatagaaatgcaaaycaccccagactccaccccagacagattgaatccgaaattctaagaatagggcccaagaatctacggtctagggagcttccaggcgattctcattacgccaaagctgggaaaccactgcaatattgggttgttgccagtgaagagtttgctaaactccaaaagcaaataaataggctagaagtcagagcctcttctagacagttttgttttttgttttttttttaacctgagtataagatcagaaccagtggtggcacaggagaaagcaaaaaccactaagtggctataaagacagagctaacactgagggtaattacagtaagaggattcacatggaaagagctccagttctgtgccaggtgctacgcgaagggctttccattccttatcttactgagagcttttaatttttgtttacgcttttaaacatgaaaagggttttagtcaaccaagaattgaaccactgtgttcactgaagggaacacaattcttggctttctctttaagctttcttattctccctaggaccacacagaagaaggcagagccagcatttaccagtctgtattcacaaactcttccaaagaaatgatgtgctttccagacttcccttatccggatgattacccaaactatatacaccacagcaagctccaggaatatataaagacatatgctcaaaagaaggatcttttaagatacatayagtttgaggtaggggtctcataacttgtactgttgaaattaagatatgtgtgggttagagaaaaaggaggcagcaaactattataaaaattagagccaaatgtttgggcacctcagtaatcaaatgttggstctgattataaagcattcatgcattgattttttctctcctagacttactagttcactagtctctgagagctttcagactaccttagaaaatggaggcagctagcccatcattgtccactttccaccctcatgctctgatgttttggaaataatccaaaatgctttagtatatattaggaattttgtcagttcaatgccaatgagttgtggttcaaaaaaccagagcatttggtagggtttctcccattacattatgaaaaggttaacaacttaaatgggaaatatagtcattgcccccatctttacccactcagttcattagtttttttattaaaaaggtgagatttcagcattgtttctgcgagaataatgttttacatttatttgggactctttattgagcatttctgtctgtatgtttggaactcttaacctcaattaactgctgctaaatgcagaacacttgcatatagtgggaaaaacaatcagcaaaattatgaaccatggtgatatttacatcattattttacctggagtagccccaaatgtatagttaaaataaaattttccaatagtcattttattccattcattcattacattcatttgcttccattatggtgttaatatcaacaaacattaatgaagttcctattgtgtgcttgcattgtgctatgtgttatatgtaaaagaaaaagaggtctaagacttagctctcaagaagttatttcaaaataaatatgtaaagagtaagtaaaaagattccagtaacaatttcaatcaaagagaaaattttttaaagctctttatgatttgtttataaataaaacaatgctatggagatcatgaagcaagaggcaacactttgggggaaggtattttctagaggaggtaaaatttagttgtatttagtaggtgttttagataaatgagtggcatgagtaaaattagagaggtgggaaaatgccctgctcatttggagaacagtgggcaaaccaagttggttaggagggagatatatatgctaggatgagatatggccacatatatcagtaaactagtgtgtactgtgactttgaaaaatagaggattattttgcaaccatgtaaaagaagtccaaagaagggacatccagagcttatgtgatggcaccaaagttatcaaagattcagcttcacccatcttagcacgtggcctacatcatgacgtttgccttgtggtgcaaaacagttgctgaagcttgagccgtcacatctgccttctaggcaaaaaaaaaaaaaaaagtaaagaatgaagggcaaagggatgttctctcagctgaatcagctccycttttacaaattctcctgaaaaaactgtccaacattgcttatatctcacaggccaccctagttgcacaggaacctggaaaatgcatcccttttctgtgtatgttgtcgctccaaacaaaatcagggttctgttagtaagaatgaagggagaatggacattagggaagcaatttgcagaatatgttccagaaaagtctgtgggaataacagaaaataaaactaaaagagtaaattggaacaaaattgtatggacttaatagtaatcgcattcaaaatgtagaataagttttagaggctgtgaagtaacagaaattgagcagtgaattgagcagagaaattgagaaatgaatatagtccttcaggaagattaatctgacaagcaggacaaaggatggcttgtaggaaatgggaggctgaagacaggctaggtataggttcttgccgtagtccatgcaagggagtgataaggacttgaatgaaggcagtgttagcaatcatggaaagaaagcgtgagattgggagataaatactgtttaaacatgaggcaaggatggagaaataacaaggaaaacaagtcatggatttgaagcataagtggctgggagtttcatgtcatcattcaaagaaataagaaagtcagaagccagtttcaaaggaaatttaagtaggtcaatcaaaacctgctacatatgaggaagtattaggtggccctccagatggaaaggtcaagctaaactggatagaagagagaccaaggatagatgtatttgtatattcataccacaaaacttgctaattttttttttttttttttgagacggagtctcgctctgtcgcccaggctggagtgcagtggcgcaatctcggctcactgcaacctccgcctcccgggttcacaccattctcctgcctcagcctcctgagtagctgggactacaggcgcccgccaccacgcccggctaattttttgtatttttagtagagacggggtttcaccatgctagccaggatggtcttgatctcctgacctcgtcatccacccgcctcggcctcccaaagtgctgggattacaggcataagccaccgcgcctggccgtaaagttgctatatttctaagataagagtatttatgcagagcaaaagagatgccaacgatcaaaccttgagatattcccatacttattgagtagatggaagatgaggtcagaaaaggaggaagccatgtcagtagagggtagccataagaaaataacacagatttgttatmtgacatcattcacaaaaatattcagtgtgatttacccctaaatcaactaacttgatgtcaaaaagtaaatgtactccagtgagtaatttttcttgtgagattcaaagactcactgaagattcactgtgactccaattttactatctttctatacatttctgaatgaccaagagagctcgtaacaattatttcctccacagaaacaaggcaagaaggaaaaaaactttcacatgtagaattataaatggaaaaataaattttctrgttttcttaaagaccctggtttccggtataaagaaatgtcccagcttcttagtcacgggccaatgggttrttgttactgaaaargatgggaaacaggaatctactatttttgatgctgtaatgatttgttcaggacatcacgtataccccaatctgccaackgattcctttcctggtaagtttggaaaatatataataatctagggacttatatgcaaacatcaagagttagaaacatatctttctataggtattacataatgattattcttagatttcaaaagaaaaaaattaagtttaatgataggatatagtaataaatagcctcataagtccttatgttaaaataatcaaggactgcaagccagagatcagacaaacacaagttcctgttttacagacagtaactcaaatataagttctaacagcacacggggtctccgagcacagttacattaaaaaaaagtagagtccaactgccaaatggtttaaagaaagacacgtttacttatgttatttataggagactcctaggtttctaatttcatcttcatccacaatttgcaaataaactttagaaatctcagtgatttgtgtgtgggtacacacatgggtgtgtgtatagcagcatacttcattaccatccgaaagtggcaaacctcaaataaatacaatatacatggaggcttccttccatttttccttccttccttgccacaggaacacaatctactcaaagatattagagtttccatgtctaggtatgatgtccataggccgaggaaaattaaagagtgaaggttcaggaggaatataagattaaaactcttaatgttaacgggcagcatatttaatgtttatgagcatgggatcagaacacctggcctcaacttactattccactagttccttaccacttamcttctttgtctcaatttcctcttcttttaaaatagggacaatagcccaccatgcagggatgttatcaagattaaatagttaaaacgtgtaaagcatttatcagaggatctagcccacagagttaacttaataaatattaaccattattattatcgaaacatacattctcatgccttaagattttttaaggaactaaaagtaagttttagggggcttaatgtcaaaaaatgctaaatggataaatgcacttcaactagggaattttttaattacaactgataataggtttaaaaagacacaaagaaaacatcttcataatttctgaaaatcagttcaaacaacttgccatgttccayttaggcctggaccagtttcgaggcaactacctccatagccgggattataagaatccagaagccttcaaggggaagagggtcctcgtgattggtctggggaattcgggatctgacattgctgttgagctcagccgtctggctacacaggtacatgacgtaaaggttttgggaaataaacctaaggtagggctgtgctactaaatcagtagccaaggcacagaggatggtacttctatgtcacaccacaagagatccacctcttctatgtggcccttcaaatcaaggaggacttgagacatcctccatgtgaagccaggtaatgtggcccgtgctagtaaggaagtacattccactgaatccagaagtaagtgcatgagtgcgtgtatgtacagatgagtgtgtatgtgtgtatttcttgttttcattttatattctgatcacctccaaatagactagttcctggtcaggcttaatctttatttatttaacagtatttattataacgtatcatgcaaaaagcactgtgtttaccactctgaagttctgaaagatatgcatgacttggtatttactaacattaattcaatcaacagcagatgctcaacaaatattgggcacttactatgcttactatgtgtcagaactatgataaactaaaaataaatgcataaataagttagactagttcctgacttcaagaaagagtcaatggatggagatggagttgacaggtacacacagactatcaccagaggagatggtgagtcttccagtagaattaggtgtggcaatagcaacacagggaaaagagaatctaacttagcctggatgaggtcaaggaagacttcccagaggactccaagctaaatcatgtatcatcgatagaccctaaagaaacaacatatttttaagaaaacaggttctcaataaataaattcttaaatggatgtaaataaaacctaaattttttaaactaaaaattcccttcagttatcacaaagttaaagtctattttgcaaagacggtaaaatagataagcagccagactcatctcagggctgaggcggttgccatggtttgggttgctcaggagaagtccttggggtatgtgtatagggagaactggaaaaggcaaccagagacagagaacagaattaaatccttgacatctcgtcagcctaatttcagctagagatttagctacacttttcccacacctagtccactatcaccagccacaaccactggggctcactggatcatctggtccctaccagacttgccatcttagtctatgagtatgtgaagattaaaccatcacagttgaacacagagccctgttgttcctagaggtatgattctaatcctttcaacaactacacaccagccctcaggggcagtgaaagaatcctgtctctactagtttaaattttagactttaaaaaaawttttttttattttaagttctgggatacatgtacagaacatgcataggtctgcacatgccatggtggtttgctgcacctatcaacccttcatctagattttaagccccacatgcattaggtatttgtcttaatgctctccctcccctagccctccatccccccgacaggccttggtgtgtgttgttccccttcctgtgtccatgtgttctcatgattcaactcctgcttatgagtgagaacatgcagtgttcggttttctgttcctgtgttagtttgctgaggatgatggtttccagcttcatccatgtccctgcaaaggacatgaactcattcttttttatggctgctagacaacttatttagactcgccttttaaaagtgttcctacttggatattgaggaaaatgcacggaagtgcccaaagaagtgtgttgtgtttgcttatttcttacagagtaatgctgaaatctgtgttgcttttccccaccaggtcattatcagtaccagaagtgcttcctgggtcatgagtcgggtctgggatgatggctatccttgggatatgatgtatgttacccgctttgcatcctttctccggaatgtccttccttcattcatctctgactggttatatrtccagaagatgaacacgtggtttaagcatgagaactatggcctgatgcctttaaatgggtacttaaaaatggaaatttyttttattcaaaaaaggggggcactcatttaatgaatttattctytctagaacttacttttgttgtctcattgagcctagaaacattaaactcaaggtttcayaggtgacggaatatgcccagagaccaygtatggcttgraaaacttattgaaattagtccagtacagaaagggtrtggaaaaatctgaaatggagatgacgcaggcagataaatcaccctgacatgcatgatgcatttgtggtggctacaagctatagcatagaactttgaggactgaasaaactcaaattggtttttggaagaatatcttgtccgtgcttatgggtgtatgaagacatcaataataatacttgcttctcaagatggttgtggtattcaataatataaaaatataaaaattgctttctaaatgataaagctttaaaaaaattggttcttcttagtctcaatttttctaatgtgcttcaaaggagcaaataacaaaatagtgttaatcaacatgtctcagcaagtaggaagtctcaaaacaaaagtgcacacttcctccacccctgaaatgttgacatttttgcagaaccatcaggaggcatggaacacataaagtaatggagagtcacaactaacgtggcctgtaagattagtcagattcatttatttacttctttatagagacagggcccaacatttactaattaggaagtcattccaggtagaagaatcagcatatcaatagaaaaaaagaatatttaagttggtaagaaaagaaagaattgagaaattttatctcctggcccatgctagccaaaaagtttcattgtgtttagagaaagatggtaagaaaaaggaggaactgtaaatcaaaagagcaaatgccagatttaggagctaaactgtcagtccaaagcacttatactaccaagtcttgcaggctgctataaccctttaaaatatgttgattttatgcatttaaaattatgtttaacactggggcttgcttgacagtagagggtgggaggaggaagagaatcagaaaaaaatacttatcaggtactatgcttattacccaggcgacaaaattatctatacaccaaacccctgtgacacacaatttacttatataacaaaccatggacccccaaacctaaaataaaagtttttaaaaattatgtttaatatagtaagtcccatagcttgagctggttaagattttttatcttgtaagagtaactataaattatattttggccttgccatttagacaattaaaacatagttttagaaattcattcattctgaaaactaagcttccttttggaaagggttccaattaccctaagtttctggagggagaaagggggaggaaaaacaggtttcattgtggtctatgttttgctaccttgtaaggtaaaagaagaggttgcaggattagataaacagaaaatgatgtggaagtatagagacaaatttcaggatttacaaggtttctttgtgtctgagatacttgcaggaaattccggaatctcaaaggaaacttaaatcaaaatgaaatatattgtcctgaaaaatattattcctagaattttggcaactaaaatgcaatatcaaagttgttacacttttttgtggacacagctgatgaaagaaaaccaaacatggcaataaaacttcccaccactgcaagtctgatttctccatgtaagacaagacgttaaagttatgataatagtgcacttataacaacagtgcttgcatgtgccaggaactgttttaagtgctttaaggataattgatcatttaattttcacaacaacctatgaggaagattccatcatcatccccattttacacataaagaaacaaatacagaaaagtaacaactagtaagagatggagctaggttatgaacctgggccatctgcttccagagttggcgttcttaaccactttagtatgtctataaattagttttagtctcatttaggaaaggaattgccatgagagaagagagtcagtggcactcatgctgatgtttaactgcttgatgttatttcaatgttatgggctgttgcaggtatttcttggaaatgagctatttacagcaagggtgtttgcctctcattgctgtagttccctgagaaaagagcctgtgttcaatgatgagctcccatcccgcatcctgtgtggcactctgtccatcaagcccagtgtgaaggagttcacggaaacctcagctgtgtttgaggatgggaccrtgtttgaggctatcgactctgtcatctttgcawcaggctatgattattcctaccccttccttgatgagaccatcatgaaaagcagaaacaatgargttaccttgtttaaaggcatcttccccccactaatggagaagccaaccttggctgtgattggcttggttcagtcccttggagctgccatccccacagcagacctgcaagcctggtgggctgctaaagtatttgcaagtaggtgggccattctktctttcattcattttatcaatgaacatttactgaacacctgctatatgcaaagcactgtgctagggatacaatgagaacaagacaaacatgttccttgacctctcaaggcttaaaatggggtgtgggggatgccataataggggaaatttgggggggttctagtgaggggagttggactgttgcacagagcaaacagtatacaggaagtcataaaggtgagggaaagcatgaaatgtgtaaggacccagaaacattttggtggaagggaatataaagcagaggcagggagtggcaagaaatataggtttataagccacgttaaagagcttaaacttctcatagggattaaggacttcgcaagattttaagcaagaaaaaaatagcagaggataactgcaatgtcaggctacattataaagattggaagggccctggtgagggttggaggtgtgccagaaacctcactggtgtcaacttctgtcagaataacaaagtcaggccactctgattctcatgacaatcttcttcttctctccctctactctagacctcatggtctccaggggctacaagtatgcttatgtgaggaaatcaagaatatgaggattacatggagaaaggcaatgtctcaaatatattaatttactccagtcatactgaatattatcattattattgaaaagtgttcttttattcaggtattctccaaaatattgaccaatataggtataacttacctaacataactaatccataaaaacttacactattggtaattaacaaaccattacaatcatggaatatatgtatatatattgtctaaaactttgtagataaataaatttctatttcaaatacaccatgaaagatcatyatttaaataaaccccatcatgaaatcttttgtaaaggtgctccctgcaaaatacttctattgcctttttccttcgaaaggcacaacaatgccaagagcctggggtattatgagaagactggatatagttcataaacctaagaaatttacatgaagcaaatggtatcatttatttattcagcaaatacttactgaacacctactatgtgtcaggctctaacctggcacttaggacacaacaacaaacgaagcagaacaaaattctggcctcttactttctagcagggtgtccagccaatatcaatcatagggtactaccaggttgacataagacactaacgatgactgggaaatattcatgcactgcaaattttagagtaactttcttccactgttacaaaggcaaataagctaccatcaccagttaaaagaagttgcattgatgtagtgaaattcacaaaaagctaaaacttgtctgctgccccttaaaacaccttgcatagttgcagaagatgtttaaaatcctatgcttccttccattacctcatttaaaatggcagaaaccttaaagggaactgttttaccagattctttcttcagagaagttttaggaaaaggatacagaaaaaaaaggaagaaattattaagctattatatgcatgaagtgtactgagcacatatgttgaggattaggtcctctataatgttaccgaaataagagactgagtgatttgaagctacaaatgtctctgctgtcactatctcactacaggccagctttgccattcccaaaggttcattaacttttcagatctttgtttctatgaactggtattttgctaaagatatcaaagacatctccagctcctcttaatacaaaagttttcaggaatacagtttataaaaaccaaatgatttccatcatatgtcattatatatttctgatttgtgtttttcaatatttttctcttcatttcttttctagactcatgtaccctgccaaccacgaatgaaatgatggatgacactgatgagaaaatggggaaaaaactcaagtggtaagcagctaactgtacttgctaatagagcaagtcctaaaatgtgcctttatgtgtagaaaaacattaatatgctttaatattgtcattagtcagagtttacattttctgaacacttgcaataatcaaaaaatgtttagatagtaaacagtcatcacacttctcttgtgtaactcaagaatagaggttttctatcagggataattttgccctccaggtgacatatggcaaaatctggagacacttttggtcattgtgagtggagagggcatgctatcagcatcttatgagtagagaacagggattctgctaaccatccaacaatgcagagcacagttcaccaaaacaattatctggctcaaaatgtcaatagtgctgaggttaagaaacaactctataaatgactacagttgacctttgaacaacacaggtttgaattatatgggtccacttatacatggattttttcaattaacataatgcagattgggcatggtggctcacgcctgtaatcccagcactttgtgaggctgaggcgggcggattacctgaggtcaggagttcgagaccagtctggccaacatggtaaaaccctgtctctactaaaaatacaaaaaaaattagtcgagtgtggtggtgtgcacctgtaatcccagctactcgggaggctgaggcaggggaattgcttgaatcagggaggtggaggttgcagtgagccaagatcgcgccactgcactctagcctaggtgacagagtgagactccatctcacaaaaaaaaaaaaaaaaaaatgcaattttttggagatttgcagcaatttaaaaactcaaggccaggcgcggtggctcacgcctgtaatcccagcacttcgagaggccgaggcgggtggatcatgagttcaggagatcaagaccatcctggctaacatggtgaaaccccgtctctactaaaaatacaccaaaattagccgggcgtggtggcgggtgcctgyagtcccagctactcgggacgctgaggcaggagaatggcgtgaacccaggaggcggagcttgcagtgagcccagattgtgccactgcactccagtctgggcaacagagtgagactccgtctcaaaaaaaaaaaaacctcaaagatgaattgtgtagcctagaaatattttaaaaaattaagaaaaagatgccatgtataaaatatttgtagatactagtctattttatcatttactaccataaaatatacacaaatctattattaaaaattaaaatttatcaaaactaaatgcatacaaactcttagactatacatggcaccattcatagtcaacagaaatgtaaacaaacataaagatgcaatattgtcataactgcataaaatatagcacataatgtgctagtataataattttgcagtcacctcttgttggtattgcagtgagctcaagtgttttgagtatctacttaaaatgctgtgtgacattagtcattttcacctgagcagttcatatctccagtaaattctgcctcacagtaaaaagtgatctctcaaggttctcacatatttttatcatgtttagtgcaataccttaagcctttaataacaccatgggctccatatgaagtgtcattaatgatgttggaagtgctcccaagaagcagagaaaagttatgacattataataaaaaaattgagttgcttaatgtatactatacattgaggtctgcagctatagttgcccaccatttcaagataaatgaatccagtgcaactatgccagcaggcatgaaatcttgcactttttgtaaaatatctttttattttggattgaaaatgcagctttttatgtgggtgcaggattgctataagaaagtatacatatagactctaatataatttgagaaaaagtgaagttattatatgacaaagcaaaaggaaggtgaaggatctagagctggaaaagttaatgccagcaaaggatgatttgattacatcagaaagagtttggcttcaaaaatgtcaagataacaggagacacgcatgctgccaaccaagaagaaggagatgaattcccagatgtcattatgaaaatcattgaggagaaaggatttctgcctgaacagatttttaacacagacaaaagtgccctattctggaaaaaaaaaaaaaaaaaaaagccacaaaggccatttattaataaggagcagaagtgagcaccaagattaggcaggaaagaataagctaactactgttttgtgcaaatgcagtcagatttatgatcaggatggcccctacctatgaagctaccccctcaaaccttgaagggaaaagatgaatatcagcttcctatcttttggttatacaagaccctttttctggattagctctgtcaatgctttgtccctgaagtcagaaagtccttgccaataagagactgccttttaaagtttttttgatatagacaatgcccctgaccacccagaaccccatgagttcaacatggaaggcatcgaagtagtctaatttcccccaaacacaacattctaattcagcctttatatcagggagtcataaggacctttaaggctcatcacataccatactctatggaaaagatagtcaatgctgtggaagataacccaatagagagaacatcatgaaagtctggaaggattataccattgaagatgccctaattgttayagaaaaagccatgaaagccatcaatcctaaaacaacatatttctcctggagaaaactatgtccagatgttatatatgacttcagaggatttacaacagaccagtcacagaaatcatgaaaaagattatggatatggcaaaataaaaaggtgagggtgaagggtttcaagatatggatcatggagaaattcaacagctaatagacaccactaatagacacttttaattccacactagaggaactaaaagatgayttgatggagatgagtccttccaaagcagtgccagatgagaacgaagacatagaaaaagccatgccagaaataaattgacattagatcatctggcagacagkttccagttatttaagacttcttttgacttcttttatataacatggacccttctatgatacaggcactgaaactaaagcaaatgatagaggaaggattactactatatagaaaatttttaragaaataaaaaagcaaagtcagacagaaattataatatatttccataattacaccaatgggcctgcctctcctgcccccaattctacctcctccatctcttccgcttctgccacccctgaaacagcaagaccaaccccttctgtttctcctcctcctcctcagcctactcaacataaagatgataaggatgaagacatttatgataaaccacttccacttaatgaatagtaaacatattttttcttcctcataattttcttaataacattttcttttctccatattrctttattgtaagaatagtatttaatacgtatgacatataaaatatgtgttaatcaactgtttgcattattggtaaggcttccagtcaacaggttattaagagttaagtatttggggagtcaaaagttatacatggatttttgactgcaagagggctcaatgcccctaacccctcagttcttccaaagtcaactgatataggaagtttctttactttttcaagcatttaacattgcattgatatgtcaacctaaaggaaaacactgaggcaaatttaatataaaaagagaattgatttgggccaagtttgaggactgcaacccaggagcacagagtcaaattgccctgaatatgcactccgttggcagcagttacaagtaggttttttaaaggaaatacaaaagagtcaacttctaagttgtttaccaagaacttacattaaaattatataagctattgattggctatatactgttcttcgtatcacaaattctacgaacatgaagatgatgagtgagacagctagtcaggaataaaaatgccttttaacaattgccgccaggcattggtagagggcagcatgacaagtcccatacacgtggctctctcagcttgataaattttgcatacctcacatagtgcaaactactctgagctatttttcttctctcacattgaatgccacaatgtagtcacccattcagggcctagagaagaaaagaaatggaaccctcagattcaacaaaacctctcctgcacaacttcagccagttgacgaacaacttgcagagttgggcacttttatgtgctaacaattcatgcagcttgataccctttcctttagagcccagtagaaataaaaatgaggaaatagagaggttaaaatgttcatcttattgcttaaatgataagctgctcttcagagtttcaaaaagcaaattacaccatattccaactaaaagaactatagaggcggaaaggaggtgatctcttttctctctgtcataaaaggtaatggccaacacccctataacaaaagacaggttaacaagagaaaacgtgacagatttattacgtgcacatgtgtgcatgagagccttacaaaacatgaactcaaaggagggccagatcattcatgtttaaatattctcttcactggggttaggggagatggaagtgtaaaagtaaatgatttttcagaggaaattaataagtccaaagaacacagattagaccaagtttctctgggctttgggggaggtgtaatcacccaacagattcatcttgctcactgcccagaaaagctgatgccctgagaacagcaggtttttccaatagagagagtttaataaacacacagctgtcagaggcatttgaaccagagtgactccatcttgaataggggctgggtaaaatgaggctgagacccactaggctgcattcccaggaggttaggcattcttagtcacaggatgagaaaagaggccagcacaagattcaggtcacaaagacctggctgataaaacaggattcagtaacgaagctggccaaaacccaccaaaaccaagatgatgaaaaaagtgacctctggtcgtcctcactactcattatatgctgattataatgaattagcatgctagaagacactcccaccagcactgtgatagtttacaaatgccatggcaatatcaggaagttaccctatatagtctaaaaaggggaggaaccctcagttctgggaactgcccatttctttcctgtaaaacttatgaataatccaccccttgtttaacatgtaatcaagaagtaactataagtatactcagttgagcagcccatgccactgctctgcctatgaagtagccattcttttattcctttactttcttaataaactcgctttcactttatggactggccctgaattctttcttgtgagaggtccaagaaccctcttttggggtctggccagctaaacggaaggacaggagtttattactactcaaatcagcctccatgaaaattcagaggctagatttttttaaggatagtttggtagtcaggggctagggaatggggaatgctgattggttgggtcagggatgaaaccatagggagtcaaagcttgtcttctggtcttcctgggaggagaccacatgacaagatgaaccagtttaccagtctgggtagtgccagccggcccatcagaatgcagggtctgaaaaatatcttgagcaccaatggtaggttttataatggtgatgttatccataggagcaattggggacttctgactgcatgactcctgagccctaatttcttatcttgtggctaatttgttagttctacaaaagcagtctgatctccaagcaaggagggggtttgttttgggaaagggctgttaccatctttgtttcaaagttaaactgtaaactaaatgtctcccatagttagcttggcctatgctcaggaatgaataatggcagcttggagattagaagaaagatggagtaattacattttttttttcacatttttttcactgtcacaatttttttaaaggtgatttcagaggtaacatcacaggacatgggagactaaagggaggaaagyatgtcaaacaaaggctgtcctgttctgcagacgaaacctcacagaaagcaactctcagagtcagtagcctatgatgaaagtttctctgtcagacattcagcagtgcctgactctcagtctctctctcctgcaagttaatctttcctagagtgggcaagggaggcctccgagaaagcctagtttccatcttctgtttacttccttttattttctccacagataaaaatctccttcacaaaaggcagcttttcagggctgtttctgtctgcaggccctctgaatagccatctcaaaatctgtcaacgaagtgtatattttgcagtaaaatattttttgttttctttagtatgaaacaatttatattattagattacaggagtattaaaaccatccatgatctcacttttaaacaaaccaatctgaaagtctaacattggggcagattctaagcaatgtcttataaagaataattatgtgttaatgagtaaactaagttaattagtctccttaaaccagagggtcagtttactccaggccacatggtcaaaggcaaaagtccaacattacatcaaactcaaatagagattaggaaggaggagaaaagcagctcacttagctaaagaaaaaacaataaattcaattttgtggaaaaggagggcataaatggaggtgctatctaaaatgttatttttctgaaagaaaaaataagaaattaatgctcctatttgcaactgtaacacttattccagtatgttctcttctttcttcatgtttggccagagccagactttgcagacagattacatcacatatgtggatgagctgggctctttcataggggccaagcctaacataccatggctcttcctgacagatccccgcctggccctggaggtgtactttggcccttgcagcccataccagtttcgactgatgggaccagggaagtgggatggggccagaaatgccatcctgacccagtggaaccggacagtgaagccaaccaggacaagagttgtcagtgaagttcagcgaccccatcccttttacaatttgcttaaaatgctttcattcccattactccttctggctgttacacttacattttattaatgagaaagtctttgaggtctcaaaattcagcatagaagtgtaatcacacaatacaacacacacacacacacacatacacacacacaatcacaacatagttcctctctcctttcctgaagatatgaaaatcagtcttggcccatttgaattaaagtataagtaaaatggaaaatactcagcctctctctctctgttgggaatctgttctctaaaaggcttttcacatgctgaattggcaaatttggggatgcttaagataagacaggaagttgaataagcatgagcacagattttcaggctgaacaaagtttaacaaaatgtaaaggcattttattttgtccattatagtatattaaccaatgtatttttcatattaactgaagttattgacattaaatcaacatagagagataagtttataccaatacaacaacgaagataaaatgaacacattgcttgaaagatacatactgccaaagctctcccaagaagaagcatataacctgaatagacctaaatctattaaagtacttgaatttgtagtttaaaaactcttccacaaagaacaggccaagaaccaggtcttcactggttaattctgtcaaacatttgagaaagcaatataccaactatatgcaaaattttccagaagattaaagaggacagaataatcctcagctcatcatagccctgacacctaaacaagacaaacacattctaaaaaaataaaatatagatcaatatccttcatgaagatatatgcaaaaattcttaacaaatgttaatataatcaaacagtttataaaatgaatagcataaccaagtaagaattattctggaaaagcaatgttggtttaatagtcaatgtaattcaccacatttgtaaactaaaaatgaaaaaccataggatcatctcaatagatgcataaaaagcatctgacaaaagccaacatccattcctgaagaaaactctcaacaaagtgatagaaggaaacttcctcaacatgaaaaagggcatctatgaaaaacctacagctaatatcatactgaatggtggaaaactaaacgctgtatttctaagagcaggaacaatataaaggccttggttctcaccacttctagtcaacatcctactggggtttctagccagtgcaataaggaaaaaaaaagaggaataaaagatatcaaaagtggaatgggagaagtagaactttctttattcttagacaacataattgtctatacagaaattattttgaaatctacataaaaattacagaacaaataattatatttctatatactaacagtaaacagtagaaaattagaaaattgtaaactattatttataacatccaaaaatatgaaatatttaggataagccagcataagaaaggtaaaaaccatacactgaaagctaaaaaacatagctgagagtaattaaaggtctaaataaatggagagatacactatatcctgggttgaaccaccgatattgtggtgatgtcaattatcctcaagttgatccataatttcaatgcaatactaatcaaccccctaacatgcttttttatagaaattgaaaactgattctaaaatgtataaggtatttaaaggacctagaattgttaaaaaataactttgaaaaggccgggcacaaaggctcacgccagtaatcccagtatttcgggaagctgaggcaggcggatcacctgaggtcaggagttcgagaccagcctggccaacatggagaaaccccatctctactaaaaatacaaaattagccagacgtggtggtgcatgcctgtaatcccagctactcgggaggctgagacaggagaatcgcttgaggcggaggttgcagtgagccgagattgtgccattgcactccagtctgggcaacaagagccaaactccatttcaaaagaaaaaacaaatgtggagcattaacactacctgacttctgatttcagaatttcttattttatgaagctacagtaatcaagtcagtatgttatggtgtgaagataaacaataggtcaataaaaaagaatggaatgtctggaaatagaaccacacaatatggacaaaggtgaaaattcagtaaagacaggagagtcttttcaacaaatgatgttggaaccattggatatcatgcaatatggaaaaaaaaaaacttcagtcaatactttgtactatatacaaaaagtaactgaaagaggattatagaactaaaaccctaaaacttctagcagaaaatgaaaaagaaaatctttgggttaggcaaaaatgtcttagatacaatactaaatgcacaatattcatttttaaaattgtgtaaattgaacttcatcaaaattaagaacagttctagcatattctcactcacaggtgggaattgaacaatgagatcacatggacacaggaaggggaatatcacactctggggactgttgtggggtagggggaggggggagggatagcattgggagatatacctaatgctaaatgacgagttagtgggtgcagcgcaccagcatgacacatgtatacatatgtaactaacctgcacaatgtgcacatgtaccctaaaacttaaagtataataaaaaaaaagaacagttctaatattcctttaggaaagaatacagtaagtacattgatacttatgacatccacattatttgtatctaataaaagcaggatgaatattctaactcaatttgtctaattggagagatggataagtcatagtagaaaaagttcagacttgaaaagaaaaatgtataccaaactatctcaatttgtttttagaatatgtataatttatcctagtaatcaaaattggttcaaaccagatgtgtctccaaagtattcttgtgtacatgtgtatgtgtacacacatgctagtgttgtgttgtgtttagtatgatgctagattgtgtaacagaaagagtctgtaagaattataagctgattttccaaatatcctatgcacatatttctgagtcctctgttcaatctggggactaccaatgaagactaatctggaatcttggagagagacacttgggaagaacaagaaaaataatattttgagtgggggtctcttttctggaacatgtttcagggtgtgagaatctcattccctcctcagacctagtactagagggatgttctcctcaacaaagactgtagtgaaagttggctaaatggactgctgagcccttcagacttagtttatttgagccaactagaaacttttttgtaattcagacttcttgatattttattcaatcatatggataatattaatttgcactaaattaaacttgatggaatgttgcttataacctctgtgtatttggtcctgtgtagtaagtagacataagtgtggtccttcccatcatctttaccaaccatgcaaaataaagtgagaacaaagagccgttaaggagtgacaaaaggcgagggagcatgctaactcaaagctaactcatgcacctcattctactgattgggtagcctgctcatctgtgaaatctatgtttgtgtgtatatacaatctgtaattgaatctagtgtaaggactataccagacaaattcattaataaactaactaaataaaacccttttaccagttgattcccaaagacaatcagcttttcagtcagattaatagcaaatctcacagttaagaaactactatgttttgcatcatcagacacagaagaaaccatatttttaatgttttactttgcctctaaaatcctagcataaattagcatatttttaaaaaagggttaagagtagtagtttatgcctggaatcccagcattttaggaggcccaggcacaaagattgcttaagcacaggagtttgagaccagcctaagcaacatagcaaaaccttgtcctacaaaaaaattaaaattaaaaaattagccaggtgctatgactcagatgtgtgtcccctccaaatctcatgttgaaatgtgatccccagtgttggaagtggggccttgtgggaagtgattctctcataaatggcttggtgccctccccagggtaatgagtgagttctcactctattagttcacgagagctattatagttgtttaaaagagactggcacctcctctcctctctcttgcttcaattctcgtgctccctttcacaccatgtgacatgcctgctcccccttcaccttctgccatgattgcaagcatcttgaggcctcaccagaagcagatgtcggcaccatgcttcttgtactgtctgcagaatgatgaaccaaaataaacctcttttctttataaattacccagtctcaggtatttctttatagcaacacaaaatgtgtaactggcaaaagggtcctgctgcttgccacttttagaaagatgccaacataacaagagcgagatgtgacagagaaagagtgagttttatcatctgtgttagcaaggaaaagagtgggcagaattctttcccaaaatttccactcttcaatttgtgggaggaacacagggttttttttttaagagacaggggtttggaatgcaggagaggaaaagggcagctacacagatcaaaaggcaggcccttagacatggcaccttgctctgtatataccagtctctttaaggatataaaccacaatctggtttatacattatgttgatgattataatacattgataattaacaactgtatatctggatgcagtgtcataatatggctttttagtaaaaagtacttgaaggtaaaatgaataattagattaaaaaatgaagccacaaggaaatgatagctgaaatttaagccacaaggaaatgatagctgaaatttctatgcatatctttaaaatttacatcttacattgaactgcagtgatctaggtgccttcaactgccctgtccttagatttaataaggtgtagatagcttcacagattaccttttcttataataaaagaagtataaccagagcctttatgactacatttgttaatttctcctctctgaaataagacaatgtaatcttcaggtatttggtttactaatatatcacagattcatcaccaccccacccaactaatcatcaaatgagtttcgcagctaagaactgactcatattctatacctgccttcttaatgtattaagaaaatccttaagctccattaggctttggccaatatgagacatccaaatccagatacttttgagactagactgaaaaaataagtgagtaaagcagatagattgcatattaatcattctgttggcacattaaacaaagagaaatcatcctttacttccgcaaaaatatttgcaggcccaggacaaccagattttctaaactttttagagaagccttgtattgatatttccatctgttattttctggatttttaatgtttagcaacaacttttaaaaaaagatttgtaggtcttagatgggctggagaaaactcagtaagggcagatttcagccgaagaacctccacttctccttaccttctctggaaacaatatgtattgccatcttccagccaccattctcagggttcagagggagtttaaagatctcctaatttaacccttggttgatacttgtgttctttctacaatatccagcctcctctttaacacctctttggacacaaaattcattcattaccctctggagcagccttcagataactgactgcctctggcatttacccagtacagccaccattcattcacagtggcgaacaccagccctgtgagatagaaagaggttcaaatgggggagtcacagctacctgctcaaaaactcaaagcaaaacactgaactgattccaaacaggagtcttcataacttattagaatatttaaaaaggaataattatttgtaggaatctgttatatggatatttttgcattaaagcacaaagatggatgaacaaggaaaatcattgcagtctcgtttataatcatgaaaacctggaaacaattcaaatatctataatagtataaaataacatacagtaaaatataggagatcaacgtatatatactgacatggaactcttttcaaaatatattgtttaatgaaaaaagcaagtaacaaagtaaacaatatttcttcatttatgtaaagtctagtatctgtgtatataaatgttatttttacacagaaggaaatgtctgaaagccaattgtcatcagtagttttctctgaagattagactggggctggaaatgggaggaaggagtaggaaccgcacttttgtttctacatactttcgcattgtttgagttttttcattgaagacattttcatacatgactagttttatatgtaagaaaataattttttaaataggtaccatttagtctagaaagcacctacaagatgcctgattggtgaacct

SEQ ID NO: 93794 - DNA, 14723 bp, Homo sapiens
tagcacaggcattcatgagtacagaaaccgctctagcaaaggctccaaagggtgggtgtgtgtggttaactgcaatggcttaaggattggcccaggggagatgagtggttagatataaaataggacttggtttgaggcatttaaaagtgaacttaaagtgcattttaaagatctatggcatgatatgccagtggttcccaaatgttgatgcatattataatcacctagaaagcttgtttgaaaacagatttctagtattcacactagaccttctaaatcaaaacctctggggtgaggcctaaaaacatttacttttagcaagataccctggtgaatcttatgttatttgttggtaaatgcagggtggacaggtggaggggagaagttttgaagtcagaaagcaagttggtggttactaaaatattctaggaggcagaaggcagggtctgtggagtgacaggagccattagacagaaagataggaagataaaatatatgatgaggagcatgcttgtaatcccagctacctgggaggctgctgcaggtggatcacttgaactcaggagttcaaggccagcctgggcagcccatcatatatattatatatatatatatggtgaggaggtagttgataggacttggagactgaatgttaacttaaatgaatcatgcagttttcaaaaatgtaattcattattgattcaaacccatcttgtacttttccatgtgctctcctatactttggaggaagtgtatcaacaagggagttccattgcctgtaaacaggctcaaaatatgttcactccaagtgctatatagtaaggtgaacagtagatggcacttttgtactatgctgaatttccaaatttgaaggccaaggaagaaccagtgctaaaataaaaataactctttataatgctcaagtaagtacattcaatttctgttttagggggaactgtataagaagggctaattagaggtcagtttgtcctagctagtacccggcctccagtaaaaccttgtaggtttttaaatactgatcctgcttgtggctcccacccacataaatgattaggttgcagtccagagaggtctaaataatcattgtagcaagtggaattaggcttgaggttagaaaaaacttccccaactttgaccacatttccaattgtctacctctgagcttttgctatttgcaaaggtgaagaaaagccgaaaagaacaaaatcaaatactatggaaaagaacaatgggaagggcagtttagagtaataaatgaggacagtggaatgaaaataaaggagatattactttcattttgtaaaacttattattataaaccttggcaagaatgcaatgttttatacatttacataacacttgcaatcacacaaaagtcatgacagtgattaagagagtggattctgggccaggtgaggtggctcacacctgtaatcccagcactttgggaggccgagacaggcggatcacgaggttaggatattgagaccatcctggctaacacggtgaaaaccagtctctattaaaaaaaaaatacaaaaaaaattagccgggcttggtggcgggcgcctgtagtcccagctgctcgggaggctgaggcaggggaatggcgtgaacctgggaggcggagcagcttgcagtgagccgagatcgcgccactgcattccagtctgggcgacagagtgagactccgtctcaaaaaaaaaaaaaaaaaagagagagtggattctggaggcagactgcgagtgtctaaaaatctcaactctgccacttcctagttagcagtgtgccttgggcaagtaacttaatgtctttgcatatcaatttactcatctataaaacggaaatggtaataatagcacatctctaataagatcgttatgatcactaaatgtcaaaatttgtaaggtacttagaaaagtcctggcatgtagtgaaaacataggtaggtatattagtccgttctcacattgctatgaagaactacctgcgactgggtaatttacaaaaaaagcgggtttaattggctcatggttctgcaggctgtacaggaagtatggctggggaggccacaggaaacttacaaacatggtggaaggcaaaggggaagagagcatggctgctccatggctggagcaggaggaagagagcaaagggggaagtgctacacacttttaaacaaccagatctcgtgataactcactcagaacagcaagggagaaatccacccccatgatccaatcacctcccaccagccccctcctccaacactggggattacaattctacatgacagttgggtggggacacaaatccaaaccatatcagtaggtgacaaattttttaagatcaactttaggtaataggattaatatgtagtttccctcccatcttttaaatttaaaacatgtgtttcttgataattgagaaaaaaagtaaaagctaaacttttactaaaacacttaaataaaaatctatattttttcttcttgtgagctagtttctaaatctccaacttcttcccttttctgcttctcctgtgcccaatattagacgtaacatacctatgagtaatcctgaggtcctgattactcttcagcttctggcattattattttattattggggtgaaatacctgtaatgaaatttaccattttacccattttttaggtgtacaattcactggcattaagtacattcacaatgttgtgcaaacatcaccactatctatttccagaacttcatcatcccaaacagaaactctgcacccattaaacagtaactccccagtctcccttacccccagccctagtaacctctattctactttctgtccttatgaattcacctattctaggtacctcatatgaatggaatcatacaatatatgctcatttgtgtttggcttattcacttagcaaaatgttttcaaggttcatccatgttatagcttgtatcacaatttcatttctttttatggcaggataatatttccttatatgtatatatcacatacattttgtttatccattcatctgttggatactaggattgtatccactttttggctattgtaaataatgcttgctttgaacactggcatctgttggagtctctgctttcaatacttatgggatatacctagcagtgaaattgctggattataaggtaattgtatgtttaactttttaggaactgacaaactttttcacagagctacatcattttacattcccaccagtatccagcattagttttaaacatggcaggcttttaaaataaatcaagcctaaactggtaatatgtagcaaaactaagagtcctgcaacagtttgctgacaagttgctgatatcaacactcttaacatatcatctcctagactaatgcagtgtttctcaacatagacagctgagactcccatagtaatcatctatggagcttgttacatcagaagggccctggatcccaccttgtatatgttgattcagcatctctggaaatggagcccccaaatcaacattacaaatgctaaagcatgagactcaccaaccctagattgctgagttcttgaaggtaggggaaatatcttagtcatcattgtgtccctcaaggccaaacatacaacagatatttaacaagtgtatacttaaattaactaatactgtaatctaaagcctacctgtttagttgttaagtaccatattcaataaaattaaactcaatcactagacaactagggaatctgtaattaaggtgtgtagcatacctttcatttgcataaaacacatgtcttaccagctgtgttctatcatgccctttgatgttgctaaggatctttacactatatgtaattttcagctcagaacatcacgctttgaggcagggttaaaaaaaaaaaaaggatatggacttggaattagaagaactgtctctgtgtgacctctaagaccaatatctaggaatcaagtttataacttggaaacattgaaaacattttgtaattctaccaacttcattgtttggctgaagcacaaatgatactatgtgtaacaaagcctgctgtagaaacgtggtctcacaaaaaacaaacaaaaaaaaccatgtttccaagtcttcctaaagactttaagtatccagctgtgtaagtttagtgctctaaggtatacgcaaatgagcagatgagaatggaaacatatcgcagaaaattattaagtgcatgcacaacatttattcattcattcactcattcattcatcacgcacatccagcaactatatcaatatcctgcagggcactgtgtggaaaacagtggttaaataaattcaaatctgccctcaggggatttagttccttttagtatattaataactagcaagctgcccctcttcatgtcaaagctttacgtcaacaaaataagcggtaggggatcaccttaaacgtcacgggtgctgtctctttaaaacgtaatagaactctgatcgcatcgatcacaggctcacaacgcccttccattcatcgctcttattccagtcctggttactaccccacttcctgacatcaaaccagggagaacgcgagtgttagttaacatggcttggtgtgtggccacagctgacccggcgcatacctcccgtcctctctttacagggctggcggtgtctcggggctcggctggccatgcctggagcgcggggtttgactgggccgccgttgttgtagtgaccgggaggcgctgccgctctgggcagacggttccgggagccgcacggtcccctctccttccccatcctctcccctcccctctccgggttcccccacccacaggagccttgggccgaccactcccccgatggcctcagccacggtaaggacgggttggaggtggggggggtccctccctggagcctgtcccgcgggctgcggggccaggtccgggccgaagccgcacctggagggagatggaggcaggtgtccgtagccgggtcctgagcccctcgtcccggggcgtccgtatctcactctctgccatcggggcggacggagtgcggaacccagacccggctcccggacgctcttccccgagttccggagctccggactgagctgggcggccccacggcccccagaattctcggagggtttccgtggagcgcctgcgtcagaatcacctaggaagtattaaaaaaaaaaaaagtaccaaagccgaggcgcatcctcgcacctgcctgccttgggccagcgggcggggcccgggaacgtgcatttcaaaggggccgcggttcctgcgatgcgctggactctgggaagcgcgaacagagcgttttgcgggctctgcggggagagctggcgccggcgtctccctgtagcaggactgggcgccgcgcccgtgggtgggctgctgcccggccccgccgcccagccaagccgccgcctgggtggccattcccaagccggactccggggaagtggcagcgtggatcccagccgccagaattcgaggtctgcggcggctttcaaaacttgacaactttcctttccaggaggaccccgttctggagcgttatttcaaaggccacaaagctgcgatcacctccttggacctcagccccaacggcaagcaacttggtaagtcttattcttgttttgcttttgtaatgagactaaactccatgggccggaaacctttcctcctgtccgggcagggtccctaggagaacggctaagggcctgtatgagggttgagagcacccggagacgagggcccagcgcggcggggcgcagctagggccccctctgccatcccggcccccagcccccggcccggccaagagcctcctatccagcggtctgggcctggcggacgactttcgcaaactaaccaccaggaggagtgagtgggaaggggaggggtttctcctcggcccggggagggtggggtgttggctggagagtttgtgaaaagttgtgagccgagcaggaggaagtagggagagaggagttgggctgtgccggaggccgaggaccgagagggctcaggtgacccctggaaagcctgggtggctggaaaggagcctagcgcctgcatgaaaggaagaacctgctgggaagtacctgagctcgagctgtgggttccgccgcccttcccctgcgtggtggcttggtggccgcgtctgcgcctcagccctgagaatccggatggcggtgaggtggacttgggcaggcaagagctgcctgctgctggcgtttttaacagtggcctatatcttcgtggagctcttggtctctacttttcatgcctccgcaggagccggccgtgccagggagctggggtcaagaaggctctcagacctccagaaaaatacggaggatttgtctcgaccgctttataagaagccccctgcagattcccgtgcacttggggagtgggggaaagccagcaaactccagctcaacgaggatgaactgaagcagcaagaagaactcattgagagatacgccatcaatatttacctcagtgacaggatttccctgcatcgacacatagaggataaaagaatgtatgagtgtaagtcccagaagttcaactataggacacttcctaccacctctgttatcattgctttctataacgaagcctggtcgactttgctccgtaccattcacagtgttttagaaacttctcctgcagttcttttgaaagagatcatcttggtggatgacttgagtgacagagtttatttgaagacacaacttgaaacttacatcagcaatcttgatagagtacgcttgattaggaccaataagcgagaggggctggttagggcccgtctgattggggccactttcgccactggggacgtcctcactttcctggattgtcactgtgagtgtaattccggttggctggaaccgcttttggaaaggattgggagagatgaaacagcagttgtgtgtcctgttatagacacaattgattggaatacttttgaattctatatgcagayaggggagcccatgattggtgggtttgactggcgtttaacatttcagtggcattctgtccccaaacaggaaagggacaggcggatatcaagaattgaccccatcagatcacctaccatggctggaggactgtttgctgtcagcaagaaatattttcagtaccttggaacgtatgacacaggaatggaagtgtggggaggtgaaaaccttgagctgtcttttagggtgtggcagtgtggtggcaaattggagatccacccgtgttcccacgtgggccatgtgttccccaagcgggcaccatatgctcgccccaatttcctacagaatactgctcgggcagcagaagtttggatggatgaatacaaagagcacttctacaatagaaaccctccagcaagaaaagaagcttatggtgatatttctgaaagaaaattactacgagagcggttgagatgcaagagctttgactggtatttgaaaaaygtttttcctaatttacatgttccagaggatagaccaggctggcatggggctattcgcagtagagggatctcgtctgaatgtttagattataattctcctgacaacaaccccacaggtgctaacctttcactgtttggatgccatggtcaaggaggcaatcaattctttgaatatacttcaaacaaagaaataaggtttaattctgtgacagagttatgtgcagagrtacctgagcaaaaaaattatgtgggaatgcaaaattgtcccaaagatgggttccctgtaccagcaaacattatttggcattttaaagaagatggaactatttttcacccacactcaggactgtgtcttagtgcttatcggacaccrgagggccgacctgatgtacaaatgagaacttgtgatgctctagataaaaatcaaatttggagttttgagaaatagagcacaacagcactttcgtcatgagctgacagtagtgtcaagaaagtcaaagagccttaagagcctcagtgaagattgtattttattttatcaaaagccacctagcagtcatctgtggagcactggaaagctggggttcattttggtatatcacactgaaactgggtacccagagtgctgctgtttaatatttcacaatgccttacttattggttgttttatataagagttttgtcaatatggtctcttcttaaaagaagttgactatgaattgaaacacacaaaacatttaagtgccagacttaatattaaagaatgtaaaggtccaagtaaaatgaggtatgatttatgttgatgtgtaagttcaccgcacatcccactttttaacaaaactcatgaatgtgcagtttgagccattgctattttgattacatagaatttgtatttcttttttagccagcacattaaattttagattttattttttaatctaatttttttctaatcaaaaagaaaattgagcttaaggcaaaaggcctggttttagagatatgtgtaattggaagagggcatttgtttgagtgtgagtttggaggcctttttaacatgcagacatacccatatttaaatgaaatggggagatatttacattccgtacttygtaaacttgagctattggacttcactgatgtatatattaatacctcagattcctctgattttgtaagctgtcttctctgtgaacgtgtttgtgtgtgtagggcattttctgattgcacttccttaagttatgaatgtactagaaagggactcatccagaatactatgcctccctttgttaatgcttaatcatttaaagtaaacacaattgaagcctctctgaagttaaacccaactatgtttattaaaatgtgtgaaactgaaagtgggctaggttctaccaaggctgtggaactctcctacgagttctgctgatcaggaaatttaagaatttatcttaaaaatgcaaggaaaaaagactgccttggcaattgtgaatggtgctttcaatctcctagcaccgagcctggcacttaggcagctttcagtaagtgggtgaatgaatgactgaatgaatgaatgaatggctcagctgaggaatgtaactttggtcaagttattatgatgtgtttgggcttagttttctcattggtaaaatgtgggtgctggattggatcttaaagatcccttccagctctgaaatgctgattgtacagtatattcttcccagattgactcactgtgcaatctttacaatactttttatcttttcacttttgacataggtaatgttgttgagcagttgagcaatgttcagtccagttgtgaagctggagaagagaaatgggttttaaaaattaagtgaggggaggccgggtgcggtggctcacgcatgtaatcccagcactttgggaggccaaggcaggtggatcacgaggtcaggagatccagaccatcctggctaacatggtgaaacctcgtctctactaaaaatacaaaaaattagccagctgtggtggcgggcgcctgtagtcccagctactcaggaggctgaggcaggagaatggcgtgaacctgtgaggcagagcttacagtgagccgagatcgtgccactgcactccagcctgggcgacagagcaagactctgtctcaaaaaaaaaaaataataataaaataagtgagctgaactcacctgaagtggtttacttctgtgggttaagaagttctagtcagtgttcatagtcgtttcgttttgataattgttgaaccaattttgtttttaaaacctttagactctgaaagtaatattttgactaagaatgtaaatatttccaaactaaattactcgggaagtaaacgctttttttaaaagtatttttactggttttataccaatattatatgcagaaatcacaggatgaatttagaattaaatctcaattagttcactttggcctagatttatgaaaaatgcatgcctcgtaaagagtccactgtattcacgagtaaagttgcttttagtgttcacttgatgacttggagagtaggaattttgcaaaatctgaatttaaggaaattctttaggataaccatttcaaaaaataaaattgctatgcaatcttgaatattttctcttttgcctcgtaaaatgaaaatgcattcacagtttctgtaaattatttagcagccttaaagtttatcaaaaaattgtccagattccacgtgcagcatgcttggccctgcatttaatttaagaaggattaataataatgctctgaatttttcgaaagggattctcctaaacccacccacttctcttgcccaggctgctttttaaaaatatttttttattttttacttatttttaaattttctctttttatttatttttggttttcttgttagccacctgttatatgggagaacgaaaattgttatattttgaaagtacttattacattatttttattttagtatcttgatgctcctgtcaaaagggaaatgaggcttttaaaaataaagtaccttaattctttattgactttttgccctaaattgctaggtgtgacccagcaatcttttaggaagagattttacagtggtgctttatttatatcaataatccagtatagttaggctgttcattcctcataatagagtacataacagaaaagtgggactttcacattttcatatttaggcacgttccaatttaattccaaaaatactctgtaattctacatctaaaaaaaccgattccctaattcgaatttattggtaccaaagctctctttggctatagacaattaagagttgaccttttaagttaatgtatatgcttaaaaacagttttaggaaaatatttggtagacaaagagtttcaactttaaatgttcactatgtcatttagtgtccarctttacggataggttgactatctaaataggcatttttagtcattaaaaaaaatctagtcaccaggaggatccctataactcaaaataacttgtttgtaaaagaaaatttgtttacttacccattagtaagttcctgcatattcattataagatggcaaatcaaacttttctaggatgaagacagcttatttttaagttgtatagtcttagttgrtttagggtctcaattttaattaataaaatacttggtttttatttgcttgtccttttgaattcctgttttaataattttaaaatgagcacaaagaacgttgaagttcagattaatctcttctgaatgatgtttttttcctctgtgatgagttgtttctgacttttttccttttgtatttgtaatgttgattaagatgtaaaataaaaagtgtgcctgattatttttgcaaatagattgtgattattttagcctatgggaacatactcctatgtatacatttataatggcaatggaagtaagttcagcttgcagttcttttacttatttgaaaattcagacagtggatatttaaaaagtcaaaattcccatattattttacaacgtgtcattaatcagcaagtattctgaaggggtgttagtaccattattttattaactactcatgagcaaactagaaatgatctgggatctctggggcccacttggaccactataaaaggaagcaatgggcacctggacatattagcaccaatttcactaccctgggtggaaaacaaaaatgtctgtcctctaaaccacatatcctcatatttccccggtccataaatgaaattcccttccaccagtggcctgtctcttcctctttagtgattcctaaatccctatacccctgtctctccttggccagacacactgcctgagaatgactcttctaaggactctaacaaaatcagatggtcttatagctgcatttagcatatatataggtgacctaaacatattttcactaatttttatacacttaaaagttcctgtaaatacttgtattctaaccttactctctaagtgacttgcagctctgtgtaaatcacttcatctctctgtgtttcagtttcacgagtataaaaaagactggaaaatccatagagacagtacattagtgtttgccagggtctgggaaagggaggaatagagaacgctaacagagatgaatttttggcaggtggcagggggtaggggattatgagaatgttctggaatttgtgataaaagttgtgcaaatgggcaaaacactggtgtactttaaaagactaaatgttatggtatttaaataatatctcagtttttaaaaatacctcaggaaaaaaagcaggctggagaatttcaggtgtctcagaaaagatttctctttgcatgctagacctctttgcatgcctctgtgcatgctagactttagaacaggctagtagtatttagtattaataatacttgaatcattgtgtaatttgcagaattaagaaagttacacacatatatatgaatgaatcagtctgcttagtattaggtggggcttggaaatcagtttatattggagtttttcctaaaatttcagagaaacttcaatcaatccttttggacaggaggtggagattactgtaaaaggtgaaatgagctcctgagttgtatagttgtccacagcagaaatgaaaattagagggcacatgtcctcaggacctcctgatgctgtgtcatgtttaaaaaaaaaaaaaaaggaaaattagagcagtccttctaacttaataattattggggtactactttttcattcgtgccaagctttatcaatcttccaggctgggctgggagtgatatctactgcaggccagcagtgtcttcgggtgtctggtcaccattctaacctgtctatttgcatttatctaatcctgttcaaaaggggaagaggaggcactctatttatttactactcccttatttagttaaggctactgtgtgccagatgccattttatgctctgggtatacatacagaggggaagaaagcagatgtgcttcataagatggtatgaagagttcatggtccagtggtggagacaaataattaacaagtaaacacgaatccatttgttggaacaacatgatgaaacaaaggaaaatagtcaaagctgtgaaggaaaggaatagaatgcttttttcttttttttttttgagaccaagtctcactctgttgcccaggctggagtgcagtggtgtgatcttggctcactgcaacctccatctcccaagttcaagcgattctcatgcctcagcctcccaagtagctgggactataggtgcatgccataatgcctggctaatttttgtatttttagtagagatggggtttcaccatgttggccagggtggtctggaactcctgacctcaagtgatccacccacctcagtctcccaaagtgctgggattacagttgtgagccactgcacccagccatagagtgctttttaaagggaggataacagtggagacatccttatatttatggggtcaaggaatacttccctgtgaaagttagatttaactgaagaccagaaggagaagttagctaggtaaggactaaaaggagagtagcataggcaaagatcatgggtgagaaagagctgtcctagatcaagaaagtataagaatgccagaatgggtagaacctggtaaacagagatgaagctgtagggggaggtagagatagcttaggcagggccttgaagctatagtgggtttaaatggtggccctccaaaacatgtgtccatgtcgtagtccttggaacctgtgatgtgaccttatttgggaggaaaaagtctttgtagatgtaagtctacaaaggatcttaatgattatgagatcatcctgaattatctgggtgggccctaaatccagcgatgtgtccttgtaaaaaacatacagaggacataagaggaggccacgtgaagccagaggcagagattggagtgacacagccacaagccagtgagtgcctagagacatcaggacctgggagaggtggggaatgagatatcccctagagcctttggagagagtgtggcccggccaacaccatgatttcaggcttctggtttctggaactgtgagataataaatttctgttgttttatgcctccaggtttatggtaatttgttacagcagctacaggaaacttgacatgttttaggattttgttctgagagtggtggaaattgttggagggattagtaagggaataacatgatttgatttgtacctcaaaaagaccactctggctactatatggagattgtactattagtagggaaatcacttagggggattatagtaataccagcagatgatgttggttcaaactaggataatggtcttcaaattagtgtgatggtctgggcaagatggaaatttgggaattattagcatataaatggtatttagtgtcatgggaatgaatgagatcacctgggaagaatgtagagcaatgagaacaaataccccatgtctgaatattgaagatatccaacctgtagatcagaagaggagatagcaaaataacctaagaaagaataatcagaaagataggagggaaagccgttatagtagggtatcatgaaagccaagggttaggagtggggtagaaatgttgaagatagagacaatattaaatagtcattagagagagtggaggaagaaactaatagagaatcatgcaccactttggagtatataagacccatgtgaacttagttatcaaatttat

SEQ ID NO: 93795 - DNA, 62075 bp, Homo sapiens
  misc_feature (1)...(62075): n = A,T,C or G
tttgacaattcaatgagcataaaatgatgcattgttattttactttttatttccctgatgaatccatttgtatctgagtaactcatccttttcctgcttatcttttatgccatctttgtcatcttctgagtgtctacatatgcccaaatgttagtccaggcttttctggcccatttttctgtgtatctattcctgtcctggtgctccactgttttattaccatattttatacaaagtcttgttatctggtatattaattctcacaccaccatacccttcttcaaaattgttgtggccattcttggccatttactcatcatatgaattttcagatgagcctatcgggtctcctaaaaaattgtgttgggagctagattgaatttatgttttaatgccagaagttacatctttataatattgtgcctcctaatcttgaacatggtatatcatttcctttacattgggcttcaataaaactttacattattctttataaatgtttgcatatgttttattagattcatccctaggtaccctctcattacaacctccacctcccgtgtttaagtgattctcctgcctcagcctcccgagtagctaggattacaggcccacaccaccacacccagctaattttggcatttttagtagagacgaggttttgccatgttgtgcaggttggtctcaaattcctgacctcaggtgatccgccggcctcggcctcccaaagtgctgagattacaggcgtgagccaccatgcccagtcccactgatgttttaatactgatcttgcattctgtaaccttactgaactctaattaacattcttataatttgtaggttttcttggattttcaatttttacaacggtatcaccacaagctaacaacactgtttcttcttttccagtctttatacctcttatgtctctttcttgatctattttattgggcttccaggacagtgttaaatagaaacgtgttatgggcatcctttcttcttcctgactttagtgagaatgctatgaaaagttcactattacatataaggcatcatgtaggtgttgtagaggggaaaggaaagctgccattttgccctccgagggttcactaaaagtcactgacaaaagttgaattaataggagaaaaggcatacaaatttatttgattatagttttatgtgacatgggagccttcagaatgaagacccaaagatacagaggaaactgtccatttttatgcttagtttcaacaaagtacggacagccttgtaggaaaatgattggacctaatgccgacagactgagtgagaaaacctagcaaggcctgtctgtctagatttttcttagcctctctgtgtaggaatgcctctcaccattccttccttctgggtatggggcaggaccctctctggaaagggggtcttatgacctacagtcaaacaagataggtcaggttatctacagtcagtttttacacagaaagtctggtgtaaagttatagtaatatttttagactgtaaagctgactttggggcaagagggttccagtttccatgacctgccttggggaagtgagattccagtttctatggccaggctctggagagaatgagggaccagacaggagggcagcaggtcaaagagaactgctgctgggcccctacaatttttcagatacccttagttatgtgaaagatatgcctttatatttctagtttgctaacaattttttatcttaactgattttaaaacttctcaaatttttttctacatctattgatatgttcacatggcttttctctgttaattaatgtgtaacttattacagaaaattattttagagagtatattttaaggttaaagtacccttgcattcttgagatgaacctcacttatacatgaagtatttttgcaaacattattaggttcaatttgctaaacttttatttaggatttttgcattaatgaggttcatcttttttgctgcttaagatatcgtttttggaggtgatttataagtaagttaaaatcttctaggattaagtaagtttctatttattataattctatcagtttttgctttatatattttgaagctgtattattgggcgtatatagatttaaatgttcaatcctccaaataaattattcttttcattgttacatacaatcccctttatttataatggtcacgtttgtcttaaaacctattttttctgatactgatattgctaatttggattttcctgggagtggtaattctctggtaagtttcttttcattcctttacttcctaattgttctgtgtcattatgttttaggtgtgtcttttaaaaacagcataagctagattttgttttcttctggttgagaatattttccttttggtggctaaacagttctctccttctcatttgatgcacccttccttcatttttcttttgcaatttgaattatttaaatcagccaattctgtaataatcactatagtaacaggatataattaaaggtccttgtaattaaagatccttgtgagataattcactgtaactgagagccctaagcttgggaatagctcttcccccatacaggaacaatcccagtcatagtgaaccagactctaaggattctcatctcactgtgattgaaaacaataattaagccttgattgtaaagttcaagagaatgaacaactagaaaatcccaactgctgagagaagggcctatgctcaaaaagattttgccatacattttaccaaaaagagattgagttgtattttcaggatctcccatttaaacacaaatcttccccacataaattatctgtcaatcattctaccacatacattattgaataatacttgaacactgtatgccaggcactgtgccaggtatgcagttagcagtacggatgtgctctccagcctcttggggattacagtctagtgggaaggctaaggtaatccatgtgtccctagctttctccagaatgttacttcctaaaacacggtaagtccaataattccgatgagacatgttcaaagagtcctaataaataaacaaaaggactttgaccttgcattatttttcaagaaaatcagttttccatgaaattctaagggttacagtatctgagccgcatctttaagcagttattctcttcttacacatctgctaatctctgcacctcagtctgaacactctgcacacagcattcttcataatccattaactgtgaaatggaacacctgtaatatgaagtttcatgtaaattgtataaatttatctgaaatccttccaaaacaattttcctttccttcaatttcacaactcctaaattagttaagagagggaaagaattactttggaaaagctgttaattatcttcagagccttactggactctattattgacagaggcctggggcagagcaaagttcagttacactcaggacttaactgataaatcactggtgaacctgtgtgcaaaaatcctccccgataattactaacatgacaacagaatttccaagtttccccatttgtgaagtatttttttcaaggagaaatttctatattttcctacttgatgaaaggcttctcccctgctatttaccatttgtgcaaactgagatagttcttcatcttctctagtcttatgtaaaatggagaatattatacctgatctgctcaaaggagagagaagagagactcagcaggtgtcacttataactcagaaataatatctgtttaattggagttttatctgtgaaggtagggtaggatcttggattgatattccaaatgactcctaggctgagaatgaagttctagaggcagtctaagtttcctcttcatcccagttttcagattttgtggacatcacgtaattcctcagagttcaaaagaacaaacatcttagaatatagttttgtccggccgggcgcagtggctcatgcctgtaatcccagcactttgggaggccaaggcgggcggatcacctgaggtcaggagttcgagaccagcctcaacatggagaaaccccgtctctattaaaaatacaaaattagctgggcatggagtagctgtaatcccagctacttgggaggctgaggcaggagaattgcttgaacctgggaggcggaggttgcggtgagccaagatcatgccattgcactccagcctgggcaacaagtgcgaaactctgtctcaaaaaaaaaaaaaaaaaaaaagaatgtagtttcgtgcaatgttagtttagttgaattataaattgatgtcatcttactgagatgcatttaaaatgtacacacattttgacctaggaatccttcttcaaggaacttatctgaagaaaaaaataattagtcaagtacagaaaattctctgtcctaggatgctagagaaaatacagctatccatcaaaaggaacttattaaacaaaaaatatgaagactttcagtttctgaaacagcatgtgtatacacagatagacacatgtagagaaagatttctgaaaggaaatttactgaaatataatggtcaggtttgttgtgatctttttctttcttctttatgcaattctaggcttgagtttgtttaacagaagtacatattatgttatggtaatccgaataatttattttctttttaaataaaagaggtataacctcccactttccctctagaagttattcagaatgtactgtttttcttccccactccaggtgaccccttgatgttgggtgcctctcattacaaaaatctcaaatcttacagaccaagaaaaatctcaagtcaaggaagacttgcggtgttcacaaaggcaacattgaccacagtccagtagagctgaagagcatataccagaattcaggaactcaacattttctcccctctgtccaaccacaggacagactgtgcaccccagggagatgctgtgtgtccactggcctcactgacttggattactcctgcagcacgtgaccagccagctcatatgatcactccctactgcccccaaagcagaattgactgggagctggaaacccacacaaaaagggacaattatattgaatgtaacatactccctctgcttacctagtgccttcacctcctatgggcatttggagtaaaaggttgttatgcaggtgtttgtgaaggatgtggccaagtcagttgtctcccttacagggtgacccaagattaatgatatctacccatccccagtccctcgaccccctagttgcaatcagctttgtcactgtcccccttaggcactgccatgtaaagcacgtggtcccccattctgaagcagtgggaaacctagaagagatgtactcttcgcaacctggttggatcttaaaaacatggttctaactgaaaagaaaaaagacatattacacatatttacataaattaaaactgcattcaccctaaacaatacacattttacaagaatgcgttccaacaaaaggatatatataagcatgctaaatacttgcttatggggattgaaggtaaggggaggctggagtgggataaataggaatttaagaaataatgaaaataaggcacactaactccttagctctcaaccttttgccttcctcagacacataagatgatccacagctgtccagaaccttacctagctatttggtactctcagcttttctttggaatggctccttccccattgttttctcctctctttctctaagacccccaaaaccaatttatttgttcattcacttcatgcatatcttcctttttcctctcttagtcacatacctcgtttcacaatctccgaccccttcaaccatgtcctgatccttctcccacacccagcaccaccctcctgcagagaaaagtgtacccggatgaaactccgatggaatattaaactaacagaacttgtcagatgacctttgctttatctgcctgctttctttcctcttcccttctgttctcttcttttcctttcttttctctcctcttctctctctccttcctattttcattctatctcttttcctcactctctttttctcccccttgaaggcactgttactagaaatagagagctctggggcttgcctgaagccatgggcagtcaccactccaggattccccttttagcgcctcctccccatcttaatctcaaagtccagcaggatagtgagcagttagagcccggcctccaatctgcttccatgggggttggctttctgagtgggagaaatgactctaatctggagacatttgctgagacccttgtgcctggtcacttccgctcccaggatccttgagatgcatcctttcctgagccgtaagtggaaaccagggggacgtgggtcagtagaggatcagcgagagggtaagacttgagctccraaggctgctgcctgggattctggaatgttagacctgggtgaggtcttagagatgaggcatgtttttgacacacaggttctcaccctgagtcaatgcccattttcatagccaatattttgtaatgctcctttttgttttgaaatgaaattcgtggataatgaaacccgactatacacaatttcaacatgacatgctatctcagcttcaatatttttaaaaaccaaaggaaagcaatcaaaatagagtgtgacttcaatttacagatgcccaaggatgatttctattttttcttttttgagacagggtctccctctgtcacctaggttggagtacagtggtgtgatcatggttcactgcagccttgacctccaaggctcaaataattctcccacctcagcctcctgagtagctggaactataggcacatgccaccatgcctagctatttttcttttttaacttttgtagacatggggttttactatgttgctcaagttggtctcgaactcccgggctcaagcaatcctctcacttcagtctttcaaagtgctcggattgcaggcctaagccattgcaccaggctaggatgactattttaaaagatgtaaagcatctgcatgaattttcatcatgyctctaggaagtgagaccacgctctcaattgccaacaagtgctgtgattcacccagagtcatccaagccagggcttgaccccaggccctccccatctactcagactctcctctctgcagcaagaacagaaaatatgaggagatgtggggtaaccagacattggtggctttatgagtaatatcctatatgcttgtgattttcacatggatcttgtttcacgagagcctcacctcctcctcagcaaattccctcatgcaaacatgagattaagcaactgtctgtacatttatgtgcctgtgcttcacgggccgtaaacaggtacaggggaccattttacattccccattgtgaccaactttgccttcattttctcctcatatttccctttyaccctccttccttcctctcctcttcrctttcttacccctgaaaattgcagttttttgaaacttgacacatgcatgatgatttaaatgcattatctccttttatcttcaaccaaacttgttagtgagtactattatctcattccacaaatgaggagacaagagaataaggaatatctaagaaatgtggtcaaaggcagaaacatgtatgtgataacttgggattcaaagccaggtctatctgactccgaactcgaagagattctaccaggccctgtctatcctcccctagtcttccaatcctgtttggactgctcttttcccttggtcatgagtttcttttgccagaacatcacctaactccaacattttctcagaagcaggtaaaattataaccagtcttatgctcagtgaggaggaaattatgctgaaagtaccagctgttgacctagcaagagaaatgccctagactgccccctccccttccctaccccaacctctgaacattgtggagttgcacagtggagcagcaggtaacctagagagggcaggtgaggcctagtacctagagatcttgagcaactcgttggcgacgccttaccataggcccagcaaggacactacagggaagcagtcttggaaaaccacaccactggccgggtgcggtggctcacacctctaatcccagcactttgtgaggctgaggcgggcggatcacgaggtcaggagatcragaccatcctggctaacacggggaaaccctgtctgtactaaaagtacaaaaaattagtcgggcatggtggcgaacgcctgtagttccagctactcaggaggctgaggcaggagaatggcttgaacccgggagtcggagcttgcagtgagcggagattgcgccactgcactccagcctgggcgacagagtgagactccttctcaaaaaaaaaaaaaaaaaaaaagaaaaaagaaaaagaaaaaaaccacactacctagactgaatgcyatcctcatcacctggccttgcaaaaacctttgggacttttatgtctactttcttacctactctacctaggtctgtgcctgyttgtgcttgctcatccaaacacacactcactarcatacatttattgagcacctgccatgtgcaatatatacattcaggcaaaatatttgagcatctattatgcaccagtgctgcagacttagccacaataagcaagaaaaagctcctgccctctattccaggaaggagatagacataaatgaataagtaaatatgtaaaaatatatatgtgkgtgaatatgtatgtatttatgtatgtatccaatagagamacatgccatgaataaaaccaaatctggaaagggaatagaaaaatataatgggggtgaggggaggggctgtgatagggaggtcaccacgttttaagtgttgttttatatgcaaaaataaataagtcacaattcttgtatagtatctacatagttactgtacaatattcatatgcataaaatgttcagctttgtttacactttgatatgcacaatcactttgggctaactgtgtatacaaagttatggaagcaatttgttttcagtacaaaagtgtggagaaatatctcagtggggcattctttcctacaattagctaatgactgaaatatataacatttgcaggtggctggggtatgtgctcccatgyaccaatttcctaatatatgcctgctctcccacaaaggaaggagggcacaaaaagtcatctatttccagctgagatgtttctccattcctgccaagcctattttaagaaaacatttaaaatttgccctaaaggggggcctcccatctacacccctccaggcagccttgccacagtcagaactgatttaacacatgccaagggccaggaagggtgatcacagagaatgcctactcccgaacgtgcggaagaagacccacccacctcagaatcaggaatcgaggagtgctcttgcttgtggacagccacaactgcccctgtgtggcttcagcaaaagggcatatactggaaggttatgaaggaatggagggaaggagggagggcagctgaaataatcaacaggaggctgaggasgtggacaggaccccacacgcaaagaagccaaggaaggccaggcaggagtagagtaacttctggtaggaaccgcctcttagcagctttgctyagcggatgcaggcacctggcattcactgccatcatccttgcacccagagcacgcatgggacagaggggacctccacagagaaggctgtgagagatcatgtccggagcggatgataccgaacagcaatggtgagggtcctcagcagcgtgctgcagactgcggccccatgtgtgaagagaaaacgaccactctggagtctccaagctggcagctccagcacagagaagcagaggagaaaaatttctctaccgaccagacactgtccctcaggcgtccaaaccccaacacagcttcagcaggcctccatgggaggcagtgtctcaaacstcaatatcagtgagggacttcaaaactgccaaggcctcgaattccatctgtcactgatgtcctctaaggtggatggaggatgaaatcttcctttcctaactcgttggcaatcccaagtatcaaatgagattgcaaatgtgacaaggtttttttcaagttacctaagatgctatacagaaatgagatacaattggcattttgggccaggcttagtggttcacgcctgtaatcacaacacttccagaggccaaggcagrcagatggcttgatctcacaagtttgagatcagcctgggcaatctggagaaacccgatctctactaaaaatacaaaacactagccgggtgtggtggcatgcccctatggtcccagctactaaggaggctgagatagaaggatcgcttgagcctgagaggtagaggttgcaatgagcagagattccaccactgcactccatgtaagaccccatgtctattaaaagtaggaaaagaaaaatagctgggcatggtggctggtgcctatggttccagctactcaagaggctgaggtgggagaattgtttgagcctgggaggccgaggctacagtaagccatgctcacaccactgtactccagcctgggtgacagaaggagatcctgtctcaaaaaagaaaaaaagaaagaaatcatccctgggcatctgtaaattaaagccataatttattttgaaagcttttctttgatttttaaaattattgcagctgagatagcatgtcattattttcacacattatatgagcattgggcaacagagccagacctgtctcagtaataataataattarcattttaataaatcacactgtgtccactgcatattttcaaatattttagaatctttttttcattttaaagggtgaggaagcccttaataaatactccctctgggctgaaaactggttgtgaatactgaaaaactcgttatcattacaaagagaattttccctagagtttccaaatgccaaaaaaatttgatttttctcatttactttgcccaacagtttttgtcattcgatattatgattttggggaaagaaaataaagttgcagtgaactgtctgctatagaactctgtgagaattaggcagcttggaaatgaaagctcactagttacccacttggcatttattatgcaaaagcgatgctgttctccaaattgaattccatctttcaatgtctcaagttgctcatgtgaattgaagtgaaaactggtgaattggatgaaaatcattagctgtcrtctggttagcctaaaaaggcactatccgattagttaaaacaataagacaaaacaaaacaaatacctattcagaaatagaccttggatatagttttattaatcctaatctcattcattccttcccctccacctccatctcttacacacacacacacacacacacacacacacacacaggtatgcatatgcatatatacacatacacactttccaggagcccccaaaaaagctttatgaaccctcaactcttacatcatcctcaaaacacaggctattttgaataaaaattgcatgcaattatctagatagattttcattttttttctggcaaataataaaaaccaaagtagttttgtttctttctgtccatcaaatatcaacattattactattatttttgagttttagttatttattaagaggagtgatatgacagtcaatagatttggaggtattatccaggtttatttcacttactgactcctattattctttctcctacttgctcattactgtctctatttcttccttcctctttcttctttctttcctccttctttcctttcttcctcttctttcttccttgcagaatttcacgtatttcatttgaagccctcactccaccatcatgtgcttatgacttttgtgaataaatgaatgaataaaactgccttgactgtttaaaattcaagcttttctttgtcaagtatttctctccaactcccttccccctccagcctactttcataaatcctataaccttggagtcaagacagcttacaacctcctcaatgggcaactccaattttgcagayagaaaaatgagactgaagaaacgaaaggatttttgaattcttagrgacactcagaattttttttccatctcagaagcacaacgaatgcagagagacacaatgaaaagctttttaaaaggtgaaattctcagaaaactaaagctatcaatttttttggtcctttctatgcatggataaccaaaagtcacttgcttttcaagtaaaagcaaattaatgacattagtgattatatatctctttgaaatatatatctctttgaatatatctctttgaaagaagatatattcagaactgttactttccatcttcatttaaaaacacaattgttcattatgtttctcaggactgtgacttcatagccacacaaagcactaacacttctttcatgcattcaaaccttcatgctgagaaagagacataatttccttagctctctccacctataaaattatcttaatgttgaccttcagtcttcaaaattaggagcatctttcctaggagtacttataaggtctctagacaactcttccagctctgacgttctgattccattattccatcccactgctgcaggggggccaaagtctgtgctggcagggaagggtggaaatggttgaggaatgagcaaaacagactactgggctaggagtcagaggagttttgttcccgttcttcacctaactagcttgataaccttaaacagattaatttaccactttacgctggtttccttatctataaagtatgcattttgacacacacacacacacaaatgtaaggtccctcctagctccaaatatttaatgaatctggttcagcttatccctgtttcatcacagtcttatgttggcagcctttttttttttttttttttttttggcgggggraggttttgtcttctgggtctatttgcatgtatttattagtctagtatattgtctaacacctgcctctcctcattccctacaagaatagtcaacagtcattaatgccgtgtgtattgagagctaaccaggtaccaggcactggctacacactagaattcaggcactaggcagcttgaagcctaaaaagcacctctattaacaggggatggactccaacaacgcattgcactagcagaagttttgcctactgatgagagaatcgacacggtgagggtaacatggagagtttgcctaaactgagcctcccaagtttgtgagggactgccgtagattttttttccagactatatttgagaagaactatttttttcctccagaaaactcattattgagatactyagattttaaatccaaactaaaagctgattagcatgattttttaactaagaaataaaattatctaagcagttttatttggataactataggtgactttcacaaacagacctatgtcatgcttagttgaggattctaactcacttcactttcagtaggtacttcccggacatcagtaaccaagctcagtcttcatacaaagcccagaatgcctccatgtgacttcatgcctgaaagataccaggtgagattcagggctttaagaaaactcaaagaggtagtttctctggggaggtctcaaatgattgtttccttaagaatgacacaaaaatagccctgcttgccactaaactacctcattccagatattgtacctytaagtcattggaagcatctgaaaccctcttaatcccttaatgctagtgtataaattggtgtccatgtgtgagagatagagacacagacagaggcaaagaaagtacaagaagcacactacacatgataattaatatatgtactgcagggagatatacacacatcacaaatgtgatggcacacataggctttaaagtaaatgttgctcctgttttaactgactcatgtggccatctgaccttcctgggtactccagcaaaaattatagttatatttttgttctcaggctaataaaaattcagctggcattttctctctyactttctctctctttctttctttctctctctttctttctccctctctctctctctctctctgttatgcatgcacaygtgcatgcacacacacacggcaactcctttattcgacatggtacttacaggttagaaattgtagaatcaataggtatttatgagggatccacaaagaagagaartacaggagagatattttataaataaagatacaaacacgactagcacttcattgtattttaattttttaaaacactaccacaacaaaaatgacttattagttcagactaattgcttattagttcagacatttacttccgaagtctatttttttcatagttaaaatcaactcagagccaaggcttttcattgctaggtagaaattccagcccttttctgaaaagagatcgaaaggctacaaataataattcacctccttaagagaaaaggctttaatttcttgcagggacgatattgggtaagtacacgcacttctgagcctctacaggccagcagccctcttctctgtccactagagagcctgggctctgttactcatagattgactgctattgatcttgtaagaagtgtgtgggtttaaatcttgtttatctacagtcccttggctacaaccgtgtcctggaaatccacaaggaacatctttctcctgtggtgacggcatatttccagaaacccctgctgctccaccaggggcacatggagtggctctttgatgctgaaggaarcagatacctggatttcttttccgggattgttactgtcagtgttggccaytgccacccgtgagtatccttaaaatctggagatttttattccaaaagaatgcatggaaaacaattatgttagtgactctgaactcttgatttgcttatcttggtttaaaaatatctatgacagattgtggctgacatactccctgctatttcctgagtacaaaatcttgacacccttacttttcctttcttgacaatgcaagattttgttattctcatggcacatgtagtgtggcatgtaccatgtgactggagtcttgctgtgtgtgtttctcattagcaacagctttccaaagagaggggtgcattcagggaaaggaagagaaaggcaggcggctctcagagaaacacatgacaggcttgtcaggcgagggatgatgagagatgagaaataacttctagcctagagaatcttcttcatggcctctgagagatggaagaggaaaagaagaatgataagagacagatgcaatcctagctggaaatttacctggaaatgtatggatcaattaatctagagattgtctgcagtgttgacggtatactcgcccacacagatacccttggagcgttcttggtttccatgcagtgctctcatttcatgtctgttctctcttttctttaataatctgaccaatgcaacctcacactaagttaggggaaagcaataaagcagcaagtctaaaataaactgaatagatgtgggcccttccatcaaagcaggaggcaaagagtcccccccctcaggcagctgtcaggaggtaaggagtgagtgtgcctcaggggcccagccctcatcttttcctccccttcacttctcctaccctcttccatcatcaggagaccttagtcccakgcaaagtcacaagaagtatccaaaacaaatttcagatgcaatttcaaacgtaggacaaacatacatgaaagaagtagagaaaatggaatagaaaatgagttcaaacattctcactgaatcttcccagtaacattgacagtcttccctggaaatgggargccatcttttctacccctcctgtgactctcatatattttgctaaacaatgtttttgtcaaatgtctcttcttttcaaggatttactgatactccacaattttctaaagtgagtttcatggaacactgatcacaggagtttccgtggaaaagggtcccatgagaaaataagtttgggaaacactttaaactatatctcccttctgaagagaaacagcgtacactagtctattataggtactaaaatrtctgtagtaaagaaatctgtataatctggtatttctcaaaatatttacccactaaattgatttttttytgatgtgaaagatattaacagcaaataaaattggcctgtaacaaactgtagcaattaatgtcctttacagcaagttcagacaacttggtttgtgttttcaaagccaagtcaggttccacaaatctgtcatccttagcccctattatctctcagtatgaaccttctaatcctgtaaggttggcccaatctttcaaagaatgtggctttatagttacaaaatattcatccacactaaccactgttcagactcagatattagaatctccctgcagaaaaactgttcatcttagtcagacgtggtagcatgcacctatagtcccagctactcaggaggctgagacaggaggatctcttgagcccaggaattgaggctgcagtgcactatgattgtgcctgtgaatagccactgccctccagcctaggcaacayagtgagaacccatcccttaagaaagaaagaaggaggggaggaagggaggaaggggggaagggagggagggagggaagaactactgatctggcatacatgtgcttgatgaatctcttcttctttagaaaaataaaatggaaagaactcaggcttacaactagtcatctctttttccaaactcttcaaaagatggttaataagaaagcatagctagaagaaattctaagcccaaacttcctcctaaactaggcatttcttttctaaaatcccttgtaatcaatgagtctccttttgaaccctgctcttggagaggaattcattaccttttaagtcaacacatcccatttctggacacctctagtggttaaaggagtttattctcatgtgtaaataaaatctgcctcttgaaactctttgagaaaaaacagtatatttgggtccaatgaccagkgtgtgtgcaggagggacgtggcacgcagtgcaggtaactctgctgtactgcttatccagaaaggtgaatgcagtggcacaaaagcagctcsgccrcctgtggcatacaagcaccrtcttcttccaccctccaatgcatgaatatgcagagaagcttgccgcacttcttcctgagcctcttaaggtacaatgctcttcctgcaggaggtgaatgttatggggganaaaaaaagntatgatgctcccagctcaaagagacaggagtcttatgattctaggggagcgtccctaggaagcagggacatgggcagggaatttagcctgtgcactgaacatctgtwgtggtgatctgatagctacatctgaaagcaatcagacagaagaagggaatttatgaattgctggcgaaacaaaccaatgttcccttgtgtcacctctgagcctctgcctctctttggttgctctcttcaccatatcttagcagaaatcacttcccaggagccgtaggcctcttgatgttctcatctatgtcctcaagaggtttttatctcatcgctccttagcctttctgcaaagttatttgcatttcttttacaaacagtgaaaccatttttaataagtgccatttggttcatttggtccaaattacacttagatatttttttctacatgagctgtttttctgcatctgaaatgactgatcttttaaattgaactaagatgttaaaatgttggccaagatttccatttagacattaaacgagttaatacatgtgaagaacctagaacaatgctcagtcccgagtgttatctattattattttaccatgttytctacattacctagaatagataaagaaacatggwagagctgcaacctcagttcagycccagatgttcacagaagagcagaagcagagagtcagcagagtcatgaacacatgccttccagtccctgagtctggagggcacagttctctttcattctccccattcttttgtccaggctgagctgcattttttgtttmcttgctttttttttttctttttgagacggagtctcactctgtcacccaggctgcagtgcaatggcgcaatctcggctcactgcaatctctgcctcctgggttcaagcgattctcctgcctcagcctcccaagtagctgggattacaggtgcccaccaccacacctggttaatttttgtatctttagtagagatggggtttcaccatgatggccaggctgatctcaaactcctgacctcaagtgatccgcccgcctcaacctcccaaagtgctgggattacaggcgtgagccaccgcacccggcttgtttacttgttttttcaacattcacacacacagcayagtcaggctgggacaacccctggagttgcagagtcagakgtcctgtcttgttccaagcctttagaatcmggtgactgggttagagttaggagccmagaaacccaacctttggatctatcagctactcaccactgcgtgcccctcagcaagtctcctcccttggcattttgcagaccatcaaataaagccattaaaagccmggaatgttgcacagctgagacaatctcttagccatttttgtatgtctngcacttagyggctactggaggaagggctatggaattcanactgtggttaaatgatggaactgctgggtaacccgagctggtctgaagggaactctccttratactcaggggctggacacctgcccttcagcaattttaagtgaatgggtaataaggaaataaattatgaggccacgtgtcttcctttcctctccaggtcattttcttggtgaacagtggctcagaagccaatgagctggccatgctgatggccagggcgcactcaaacaacatagacatcatttctttcaggtaatcacaacttggaatattcaactttaggaacactgacttacccccattctaaatgtgtagctttacattgtagcatggagtgggagagaggttttctcagggatatttttctagttgttaagttttaaggaaggataggtcaattgaattttatgacaggataacaccattcaagttggcctgatacaagagagggggccccaactggtcacgaccagcttgaagtcctcattatgtcatagatcctcctgtggacattaagagaaacccacatgacagttttttaactttgaagatgtggcggggaccacaccatataccaagtggtaaatgactgttccccaccttagaagatcaaggctctaccaaaaaataccggcctattttaatttctgcttatgataaggagctgtccactgatttcatagtgccagctgcacccattttttaccttttattctccttaagttcagaggatgaacatataaccctstatatttctgcttctttcagtgacttttgagcactgataatagattcattaataaacccttaatggctacattagcactaaaaataatagaaaactatgcattttgcttacagttgcctcccttggrtaaytgtatacagcatatttaaacagactcctgtaaagttaatgtaaaagacaggagtggcttatggtaaaagttgatggaatgaataaacagttgcatttttaagctgtctggttataatttctgtgtgaattcaaaagaagattttatttaatccttatgacagcacattcaatactgcacattccatatcaaatgagcatgcwgttattacaggaataagaaatatgrcaataaagaattgtgattgatgtattacctaaatgacattccagaatatgtgtgtcgaggtaagtattaagtagtcatggtactaccagggttcaacacacattttgtctcctttttcaagatacattaggtcggtgcaaaagtaattgagatttctgccattaaaagtaatggcaaaaaccacaattacttttgcaccaacctaatacaaccattcttttgaatagtcttaacggtcctaaatccttgtttaaaggtgattttgatatgggaaattgttcgaactcatttgaagcttacactgatgattaggagcatttatactaaatatgactgtttcacrttcaaaagaaacaaaacctgtgtttcttagatggakaataaggtgatttataaggtgtgtaagtccctaaagatattgaacaacaggtatatcataggaaaaaatatttggcttcccaaagygactacttcgaagactggtattcattgaacatacaatttctggtatgttgttgctaaaagatgagtctcattactatggaataatagagtagggaaggtcctaagattggagttcttggacaaatgttctccaaaattcctttcacagtttcaaatctatgttttctaacaacagttagaaaagactattaagtacattgatccgacataagcttagatgcgttcttagaaatcagaggtgaatgcgaatgatgttctatttcatcttcatagccttcctgggttttctcttttgtcctactcngtggaccaggaacttgaccccatcctcctgttgtttcttctctgcagaggagcctaccatggatgcagtccttacacacttggcttgacaaacgtagggayctacaagatggaactccctggtgggacaggttgccaaccagtgagtttggagatttttctcttgtttctttaaagactnctgggtatgtgaagtagttgatcaggttttcctggtataaggattagaaactaatataaagcctgtcattaatcaggggctcaatttgacctaattgaattggagaccacttgaggacaccattagaaaggccttccgagtctgagtaataattaatgacagagttttaaaatgtattttgcttttaaataaaatcaagtaaactgcaaggctctgagaatcttgaatgcacaaaacttctatgcagtcatcactgtactcaccttctgttcccacttactgwacccacattttcagcatytgaatcagatacctaattattcttattctttcagatgcccttacccactgcacccttgagcaagctgtttccaggctaacattgaaatcagtttcctttgtagagggcccacatagctgatttctaagaaaaaattatctcttcaaagcagatccttcaattttcatcttaagtgggrgaagaatgagggaggaaaactaagaagccctcttgtcttgatggcagccatatgctaccctaacttggctgtcttgtgttcatgctttgccacactccttcttttgtcatttgcagacaatgtgtccagatgtttttcgtggcccttggggaggaagccactgtcgagattctccagtgcaaacaatcaggaagtgcagctgtgcaccaggtccgactgggcaaggggggtgccagtggagtgttggaagttggaagggacacgaataaaggcagacycatccctgagggaacaattgaatttgaaaacatggaaaagggaaaagccagaggaagcaaaactggaaagtaaccaagttattcctcattgaatcaacgcttatgtctgctatcacttcactctcagaccatctgtctggccatgtaggaaaagcatctcacgctatcagagccaagctcaaaaaaacgactatcagctggtacttgattcaaggcattctattagytctattataatagcaatagctctggtgtcaattttaaaagacaacaagctgggcgtggtggcatgcctgtagtcccagytactcgggaggctgaggtgggaggattscttgagctgaggaagtcgaggctgcagtgattcatgattatgccactgcactccagcctgcatgaaagagcaaggcccggcggggcatgrtggctgacagctataatcccagcactttgggaggttgaggcgggcagatcacctgaggtcgggagtttgagaccagctggccaacatggtgaaatggtgtctctattaaaaatacaaaaattagctaggcatggtagtgtgcacctataatcccagctactcgggaggctgaggctcaagaatcacttgaacctgggaggcagaggttgcagtgaactgagataacgccactgcactccaacctgggcaacagaacaagactccatctcaaaaaaaaaaaataaataaaaaaaagcaagatcccatctctaaaatgaaaaaactaaacaacaaccaaaaaaaaaaaaaaaacaagaaatcaagatgggtgggattattaacccataccagtggaaagagggaaaataatgcttttggcaatctcaaaactccagtcaaaaagttctccagggactgccagccaaaatgagagcatccgtcaaacaaaacacaaggctgcccttcctacaggctgctgacaaccctggcaaaagttttaaaggctttctcacaaggagaacttccatttaccaatcacatttttattcgcattctttacctacgcttaacaggagggagaggaggcaggaaacatcatctgttccttgctaatcaacaagccctgcctctgatttgtcatcacaaccttttkaatagccgctccttagtacttctgaaggaaataactaaatgcttcagcccagtgatttttaatggaatagtatgaatcactgggttgagaggaaaaatacaaaacagaagtcttaaaaaccagctctgaaaggaaaaaaattcaccatcgtcttaaaattcagatgacataatagcaaaatggaggtaagagaatgaaagagtaagtagtgaaagaagacaagatgtcacgctcatggaatttaaaaccagaaggaaatgtaaagctataaatcaaactctccactttaaacatcaggaaagccagtttcacayggaggagactggagagctaagatttkaccccaggtcttctgactccaaagccagtgctcccaattcctatagccatcctcatccacactgatgtgccgtcaagataaacccaagctgaaaaagcattcctattccacaggccaggactgaggagctgcatgaagtcaagagatggattccactctcagccctggcatggttcagctatgagcaaaagcttcaccttttgcttcagttttctcatttgtaaaacagagacagcaatatctggctgctgccaacaccatcayggcacttcatgagatgaggcacggagaacttttgtagagaaaaacagaccatagcaatgcctggtaaagccrtatttgaatattscatctgtaaggcatcaagaactaaaatcagtttgatgcacttcccagaccctggtctgactgcaaaaccaccagcacagagcctagtagacggaagcactaaaaggtggtcatttccttcttttcctgctatrtgttcctctttccacatagaagagacacaagcctactataaggccttctataggactacttaaggcaatttgacaataccagaaatccatggtcatctctctagtggcatctagaggctaaatgatagtgacaggcgtacatttctgctctgaactgttgcctttggcatatctgaagtcagttgttttcttttttatttatgtattttttttttggagacaaagtctcactcttgtcccccagactggagtgcaatggcgcgatctcggctcactgcaacctccgcctcccgggttcaagcgattctcctgcctcagcttcccgagtagcggggattacaggtgcctgccaccacgcccagctaatttttgtatttttagtagagaccgggtttcaccatgttggccaggctggtctcgaactcctgacttcaggtgatccgctcgccttggcctcccaaagtgctgggatyacatgcgtgagccaccgtgcctggccagctgttttcttaactcacctcttcaagggacaagactatttatggaatctttgaacaggattggaatacaaaagaaagaccccrgtctccttcactgcctttaggacctgggaagggtttggtctttgctgtaaaactggaatattcatatatgtttacaaaagcatccaaacatgtacagttctttgactatagatgttgcctgttctcaattcctcttaacctattgataggaataccttaagaggaattgaggcaccaaccatggtagagatttttctcatctcagaaatatgtcatccctcccaacagaggcagggggccattttgtgagtctaatctagatgtttatrtggtatatttatttgtcctactccatctacctcccaggattttttccccaggggttcattccaggccctgagtttcargtgtaatccatgacgagattcactcctcatcacctaytgcccccacaatgttccaaacctcgtactgatcatgtcattcttcttcttttgaaaggcaagttttgtttttcttaaaaattgtagttctttcttggctcctcactcagcttaactctttctgtaccactagctggaataaattcttccttcgtcatcctgttgtagtatccaacagaacatcctgtctccacccscttggggttttcytcctgccaagcctctgcagaagtggcctaacctagggttacatcaatgagtcaatgcagctagtgcgaaataaagtaaaaagctcatcacagtcaatgactctctcatcgctgagcatgtgggcagagagggaaaaaagtcatgaaaggtctagcataggttcaggcaaaaccttttggtttggttctgcccaaatttaagctccactctttgatttctccagttacaaatgggcttgttaaatttccaaattacttctcttgaacataggtctgatccatcttttagggtcatctgaagctgttttctcttcctttcccaataaaaacgggaaatttctgtctctagaggcatagatttatttgtctactatattcttctcatcaaaacaacacaagygatgccaaaaacatattttcagggtttsatatacttgtcatttcttcctttctcacacccttaacctccaacctccagctaaccaaagatatcaggtacctctgtcaatcaaacttttccgaatatcacatgtaatctaaaaatatgtttggggccagctagtatttcctcacttttaatgaagagctgaggtataaaattcggttttgatggtgattgcagaaggtttctgttccttctgtctagcaccgtggagacagcactgcatccatgcctctaagcaagcactgggatggtaggtggggagccctgtcccacactgctttcactgtcactcgggttgaggctttccatcccttccacatctttctctgcaytcctttggtcatctatggatataaatttaagttcagagactgcatggtactgtttagaaccaaataacaggtgtggataaaaattctgaagattcagtcatgtatggatacagttgacctgggacctttgttattccagagtagaagaayttctctctctctctctctctctctctctctctctctctcacctttcctgcttccttggtgattcccacttccaattctgacacacagatgaaggcttctggagcttgggcaagtctgctgggcaatcttcccactcatctctagtcctctcccatccacaggatttcatgcctgtgtgtctgtgtggtgaggcttgcagctagtgaagcatggcagaaatgtttctagtatctttaagcaggattagaaagtagacatggttagtgctaagaaaactgagctggatggacagctagtactggtaacatgatagcctgggttttctccagtggaaaacaactaaaaaatcctggataaaatgaaatgcattcccttcaaagcatggatacaagaaagcacgaattctcagaaacgcaaatagatcattacgrcactgcagccmsctttgaccctgagagaatttcttgaacctggtaaccttgagcttccatgttgatggctctgtggagtgcagggaagagatgacgaagtccagggcccagccaaagtaagggatcttataggaaaccctcccctgccacaaagctggagcccccaagaggccacatcttcatccatgggtcaactagaattaaatacaccaccaagaacatattacccctcacagrccaaagggcctgcaaggattctggtgctgaatggaagtggagggactgggaggagccaccactgaaagtttcacctgcagactggccctccaaggctttgcattgtgaacgctcacttcctcargctcataatttaaaggactcttagactctaatgccctacgcacttggaagctgcaaactcagataggctctggagggatctacctcattctgggcctcaaagaattctcacaaatgaaattccaaggaaaataaactgccccttgtcaaaaataaayatacaatacacaaaactccgcaatcaagaaaaagatcagcaaggatttcaaataacagaattatcagataggctataaaatgaatatgtttaatacatttaaagaaaatcaaatataagcttgaaaatatgcgaaagggataggacactgtgaagaataagaaagcaagttttaaaagcaaatatgccttctagtaatataaaagtgattattgaaatttaaaactcagcatgtgggtttatcagcagtaagatgcagccaaaaggagaagtaatgaattaaagacagatcacttcaacaaggacactttactgcttttccccattagaaagatctccaaaaagaaagaaagaaagaaaggccttcaagcaaaattgctcaatgtctcactccagccatgatttctactatttgttaatattttcttcttaatgcgttaaacatttactgagcaccacctacagtgtaccaaacagcttgcctggccacagagattttagaaatgaacaaagtatagtccctgcccacaaaaacctcctgattaatcggagaaagtcctgttaaaaacaagcacaggaccaastgccaagggctgcgatggatggaagccacctagctctcgaacatttctctttagactgaattctaattgttctacaagcatatttactaactctaaagacaaagacactttgtagctttaaaacggtacatcagattaaatggcaatgaaaggtaaatagagttattttcaaataaattaaatcgctctaattacatttgaattagatccacctgtttgagaggacgggcatccttaggtgaaacagctatctataccagctcaatgacactttgggacgtttcttccccagatggaaagaactgaagtggtttgtttatgcctttatggctatcttaatctccctccttgaaccaaagtacaagttgttcagagagaacattcccccttcagaaatgcatatcctcaccccagtttaccgtattctgaagtccctgattaacttaccctgtctggttgttttttttttttcctgtttttccccatgnttctaaatatcaggctcacattttcaaatgctgtggtttgttttgttttgttgtttgctttttgcagactgctgccaagctaaagatcagtatattgagcaattcaaagatacgctgagcacatctgtggccaagtcaattgctggatttttcgcagaacctattcaagtgggtatatgaaccttagacattaatggagctgaatcttcaattrtcagaaagttttaactcatatattctagagaattccaaatgaattaagtgctcactgtgtccctctctaaattcattctcttggtctccttgaaaaaagaagacgctgactttcaaatgaccttttaaaaaccctctcctccattctcaccagacagatgaaactaccgaactcctaaaattcttaagaagaggaaaccctggccatttttagctgcttaataacatccrcnttgtccaaagaactctttctttagtctcaccaatttcttttattctactgttttctaatctcagaaaataatcaatgtttgcatcttttttccagaagtcatggtatagagyaataagtcctcttttcacccacagtggaaactgttctacagactgttgttaaaattgctagtgttactgtcatgataatgatgataatgatgatctaacttttttatatacwttgaaagggctgatgctattattataggtcttcttggtctggtcttttgcagggtgtgaatggagttgtccagtacccaaaggggtttctaaaggaagcctttgagctggtgcgagcaaggggaggcgtgtgcattgcagatgaagtaagtggcatgtaagggtgccattgagtgcagtgggaacaggagatgcacagacagaaacctcctaaacttcctctgtgttccaggcagaaagcctytgctctgtgaattccaaagtttgcctacaaatgaatgaaatttgtgctagtgggctggttgatttgttagyacattcgctgatcagtttaacaagtataacagaacttaaatctccaaattgatgtctatcaaataagttgctaacagccatatgtgatgttattagaccgtgactcaatatatttttttaattcctttctagggattgtttcaggggctgacaaacatcataggaaatttaatctcatagccaaggtttttgttgtttttatttgtttggttattttgagacaaagtctcgctctgtcatccaggctgaagtacagtggtacaatctcgactcacygcaacctccgcctcctggggttcaagggattcttctgccacagcctccygagtagctgggaccacaggcatgtgccaccaagcctgactaatttttgtatttttagtaaagacagggtttcaccatgttgrccaggctgatcttgaattcctgacctcaagtgatccgcccgccttggcctcccaaagtactggcattagagacgtgagccaccgtgccaggcctgatagccaagtttttaatctttatttttgcaaaaatagtatttaccaacctggcagcatatacctttctgacaaaacttgcctggaaataatgtgggtttttttgtttgtttgtttctttttgagacagaatttctttcttgttgcccaggctggagtgcagtggtgcaatctcagctcaccacagcctctgcctcccaggttcaagtgattctcctgcctcagcctcccragtagctgggattacaggcatccgccaccacayccggctagttttgtattttttagtagagactggggtttctccgtgttggtcaggctggtctcgaactcctgacctcaggtgatctgcccaccttggcstcccaaagtgctgggtttacaggcatgagccaccgcgcctggccgaaataatgtttttaaaataataataataatccagcctctaaattagaggagtaccaccaactgcaggtactgcatttgaaaatagttccccaaaaattgtaaaataggttgaattaaagcagcattaaagcattaaagcacactactcccaagggcattactttaatgggaakaaaattcgttggctatgtgagctctagcctgtgtgttttcaaaagggattaatttacttataatcacacctcatattagagtgtatcaaataaagcagtcctctgtctactgagagtagctatggagattaaaagaccagaggatgatcactagggccaccgaagccatgtctcactgctgggtgactatcatgattggactaacaggtggttagaccagccaaggacaggtggagaacctgtaagtatgtttcacacctatttctgtccagccatcattgctggaatagacwtcctcaactaaaaatttcctacagctaggttgggcgcagtggctcacatctgtcatcccagcacttkgggatgctgaggcaggccggtcacttgaggtcaggagttcaaaaccagcccagccaacatggtgaaacaccatctgtactaaaaatacaaaaagtagctgggtgtggtagtgcatgcctgtaatcccagctgctcargacgctgacgcaggagaatgtttgaacccaggaggtggaggttgcaatgagccaagatcatgccattgcactccagcctgggcaacggagcaaaactccatctcaaaataaataaataaataaataaataaataaataaataaatattccctacagctgacactgagctgtcacatcagcagaaattttgcaatttctgcctgggcagctgggtctctgttatgcccaggtgtattggatgtccctggtgtaccacaggcaacttgggccagcctgctcctgctgagmccatcctcccttctccaatctgcccacaaactgatcgaagtccaggctggagaaagttaatctgctactttaaaaaaatgagtatatccagtcagcttgaaattagctacatcagtaaaaaggataaactttggcctccaaatcagcacatagtgaagctgtcacagtcagactaattaaagagaaggtaggctgaattcaaaggaaatatgaatttcaaaattttctgtcttgtggttttatgactttcaaacaatgtaattgaaaactatctaacacaggcaatcctcaagaaggactatcgygaggactaggtaaaaataagaatagctggaactctctgagtacctgctatgtgtcagacactgttcataacactttgcatgtgttaactcagttcatacctatcaactgttctatagtatgccctgttgctgctgttcccacgtattagtcctttctcatgctgctgataaagaaatacctgagactgggtaatttataaagaaaaagaggtttttcttttttcttttttcttttttyttttttttttacatctgccatcaccacaattttattaaaaatgaagcaaataagacaaagaatatgtgaaacctatacaaacaaatgaataaawcaatatcggaataaaaggcactcttttaaattgaaaatagttttgtaaagtaaactcactaattaaaaaaaaaaatttgcagaagacaaacatttaggagccagtgattgaaatcaccaagactcttttatgctaactttccctttttgggcrtcaattactactctgccttttctagtttacagtattcttcatagaaaaatgtagaagaaaaacaatattatcagagttctgtctccctctggtacttggttaatattatagcatattctaaagggaagggctctaggttttccttgtgctttttcttttcttttcctttttttttttttttacttctctctttttatttattattattatactttaagttttagggtacatgtgcacaatgtgcaggttagttgcatatgtatacatgtgccatgctggtgcgctgcacccactaactcgtcatctagcattaggcatatgtcccaatgctatccctcccccctccccccaccccacaacagtccctagactgtgatgctccccttcctgtgtccaygtgttctcattgttcaattcccacctatgagtgagaatatgcggtgcttggttttttgttcttgcgatattttactgagaatgattatttccaatttcatccatgtcccttcaaaggacatgaactcatcattttttatggctgcatagtattccatggtgtatatgtgccacattttcttaatccagtctatcattgttggacatttgggttggttccaagtctttgctattgtgaatagtgccacaataaacatacgtgtgcatgtgtctttatagcagcgtgatttatagtcctttgggtatatacccagtaatgggatggctgggtcaatggtatttctagttctagatccctgaggaatcaccacactgacttycacaatggttgaactagtttacagtcccaccaacagtgtaaaagtgttccwatttctccacatcctctccagcacctgttgtttcctgactttttaatgatcaccattctaactggtgtgagatggtatctcattgtggttttgatttgcatttctctgatggccagtgatgatgagcattttttcatgtgtttgttggctgcataaatgtcttcttttgagaagtgtctgttcatatccttcacccaattgttgatggggtagtttgtttttttcttgtaaatttgttagagttcattgtagattctggatattagccctttgtcagatgagtaggttgcgaaaattttctcccgttttgtaggttgcctgttcactctgatggtwgtttcttttgctgtgcagaagctctttagtttaattagatcccatttgtcaattttggcttttgttgccattgcttttggcgttttagacatgaagtccttgcccatgcctgtgtcctgaatggtaatgcctaggttttcttctagggtttttatggttttaggtctaacgtttaagtctttaatccatcttgaattgatttttgtataaggtgtaaggaagggatccagtttcagctttctacatatggctagccagttttcccagcaccatttattaaatagggaatcctttccccattgcttgtttttctcaggtttgtcaaagatcagatagttgtagatatgcagcattatttctgagggctctgttctgttccattgatctatatctctgttttggtaccagtaccatgctgttttggttactgtagccttgtagtatagtttgaagtcaggtagtgtgatgcctccagctttgttcttttggcttaggattcacttggcgaagcgggctcttctttggttccatatgaactttgaagtagttttttcaattctgtgaagaaagtcattggtagcttgatggggatggcattgaatctgtaaattaccttgggcagtgtggccattttcacgatattgattcttcctgcccatgagcatggaatattcttccatttgtttgtatcttcttttatttccttgagcagtggtttgtagttctccttgaagaggtccttcacatcccttgtaagttggactcctaggtattttattctctttgaagcaattgtgaatgggaattcactcatgatttggctctctgtttgtctgttattggtgtataagaatgcttgtgatttttgtacattgattttgtatcctgagactttgctgaagttgcttatcagcttaaggagattttgggctgagacaatggggttttctagatatacaatcatgtcgtctgcaaacagggacaatttgacttcctcttttcctattgaataccctttatttccttctcctacctaattgccctggccagaacttccaacactatgttgaataggagtggtgagcgagggcatccctgtcttatgccagttttcaaagggaatgcttccagtttttgcccattcagtatgatattggctgtgggtttgtcatagatacctcttattattttgaaatacgtcccatcaatacctaatttattgagagtttttagcatgaagggttgttgaattttgtcaaaggccttttctgcatctattgagataatcatgtggtttttgtctttggttctgcttatatgctggattacatttattgatttgcatatattgaaccagccttgcatcccagggatgaagcccwcttgatcatggtggataagctttttgatgtgctgctggattcgttttgccagtattttattgaggatttttgcatcaatgttcatcaaggatattggtctgaaattctcttttttggttgtgtctctgcccggctttggtatcaggatgatgctggcctcataaaatgagttagggaggattccctctttttctgttgattggaatagtttcagaaggaatggtaccagttcctccttgtacctctggtagaattccgctgtgaatccttctggtcctggactctttttggttggtaagctattgattattgccacaatttcagatcctgttattggtctattcagagattcaatttcttcctggtttagtcttgggagagtgtatgtgttsaggaatttatccatttcttctagattttctagtttatttgcatagaggtggttgtagtattctctgatggtagtttgtatttctgtgggatcagtggtgatatcccctttatcattttttattgcatctatttgattcttctctctttttttctttattagtcttgctagtggtctatmaattttgttgatcctttcagaaaaccagctcctggattcattaattttttgaagggttttttgtgtctctatttccttcagttctgttgattttagttatttcttgccttcttctagcttttgaatgtgttttctcttgcttttctagttcttttaattgtgatgttagggtgtcaattttggatctttcctgctttctcttgtgggcatttagtgctataagtttccctctacacrctgctttgaatgcgtcccagagattctggtatgttttgtctttgttctcaatggtttcaaagaacatctttatttctgccttcatttcgttatgtacccagtagtcattcaggagcaggttgttcagtttccatgtagttgagcrgttttgagtgagattcttaatcctgagttctagtttgattgcactgtggtctgagagatagtttgttataatttctgttcttttacatttgctgaggagagctttacttccaagtatgtggtcaatttttgaataggtgtggtgtggtgctgaaaaaaatgtatattctgttgatttggggtggagagttctgtagatgtctattaggtccgcttggtgcagagctgagttcaattcctgggtatccttgttgactttctgtctcattgatctgtctaatgttgacagtgsggtgttaaagtctcccattattaatgtgtgggagtctaagtctctttgtaggtcactcaggacttgctttatgaatctgggtgctcctgtattgggtgcatatatatttaggatagttagctcttcttgttgaattgatccctttaccattacgtaatggccttctttgtctcttttgatctttgttggtttaaagcctgttttatcagagactaggattgcaacccctgcctttttttgttttctatttgcttggtagatcttcctccatccttttattttgagcctatgtgtgtctctgcacgtgagatgggtttcctgaatacagcacactgatgggtcttgactctttatccaatttgccagtctgtgtcttttaattggagcatttagtccatttacatttaaagttaatattgttatgtgtgaatttgatcctgtcattatgatgttagctggttattttgctcgttagttgatgcagtttcttcctagtctcgatggtctttacattttggcatgattttgcagcagctggtaccagttgttcctttccatgtttagtgcttccttcaggagctcttttagggcaggcctggtggtgacaaaatctctcagcatttgcttgtttgtaaagtattttatttctctttcacttatgaagcttagcttggctggatatgaaattctgggtttaaaattcttttctttaagaacgttgaatattggcccccactctcttctggcttgtagagtttctgccgatagatctgctgttagtctgatgggcttccctttgagggtaacctgacctttctctcttgctgcctttaacattttttccttcatttcaactttgatgaatctgacaattgtgtgtcttggagttgctcttctcaaggagtatctttgtgrcattctctgtatttcctgaatctsaatgttggcctgccttgctagattggggaagttctcctggataatatcctgcagagtgttctccaacttggttccattctccctgtcactttcaggtacaccaatcagacgtagatttggtcttttcacatagtcccatatttcttggaggctttgctcgtttctttttattcttttttctctaaacttcccttctgtcttcatttcattcatttcaccttccatcgctgataccctttcttccagttgatctcatcagctccggaggcttctgcattcttcacgtagttctcgagccttggttttcagctccatcagctcctttaagcacttctctttattggttattctagatatacattcttctaaatttttttcaaagttttcaacttctttgcctttggtttgaatgtcctctcrtagcttggagtaatttgatcgtctgaagccttcttctctcaactcgtcaaagtcattctccgtccagctttgttccgttactggtgaggaactgcgttcctttggaggaggagaggtgctctgctttttagagtttccagtttaagaaaaagaggtttaaaggacagagttccatgtggttggggaggcctaacaatcatggcggaatgcagaaggcacatcttacatggtagcagacaagagacaatgagagtcaagcaaaaagggtttccccttataaaaccatcagatcttgtgagacttattcaccaccatgagaacagtatgggggaaccacccccatgattcaattatctcccatcaggtccctcccacaacacgtgggaattatgggagctacaattcatgatgagatttgggtggggacacagccaaaccatatcatctcattttaaatataagtgaatgtaggtccaaggtggttaaacaacctgtcaagcttatgccgttagtaggaataggtccaagactcaaactcaggctcccaaaaccacatgactagccaccgtatcaagctgcccctccaaaatgacagagcgtggtgtagaaagggcaaatcatggcagaaagggaaggaacagaggacagaaaaacctgagtgcagagggccagttctgtcaaggagcagtcttacacaagtcatcttaattaacaatcagtggcattcttttctttaaaatgtggaatctggattaaagttagaaaactgaaacctctgggcccatattggcatagactgattttgaatttgaaactgactgcaagacatgcatacccgtagtccccaccccacttgctgttgtgacccagcctgcttctgtccctaacatatgcttctcatctccaaagacagttgagtttgtggaccttagaatgatccatctctgtactactgtaagagtctatgaaactgatacttcctcagtgactaaacatggtttatggttttacataattccatgcatttgtaactgagtccaaagcttgtaccacttgctgcaaaacagtcagtaagtcaagcaataagatgttggggcaaggaagaccactttatttgggggagcaagcaaaccgagaagacggcaggctcatgtcctaaagaaccaccttaagcatatgtgggttccttttatgttaagggaaaggggaagagggagggggttgaggtcaaaaggtgactggtgaccacagacgtttgggctgcagcaaggataaactttcatccttggtcaggttacaatactgttataaatttttaatgtaatgttgttacttgtgtgttcatccttcttatctcctcagggattctttttaaagcatccttgcctcaaagttaaaccataaactaaattcctcccatagttagcttagcctatatgcagagataaacaaaagcagttaacctaaaagacatcatcacagtgggaggatgagagcaagctggttaggagcaaaatggattaagtcatgctaggcttccttttcactgttacacattgtccaagcaatctgatttttcaccatttatgccatttatgtatggtatttagatggagtgaaaaagaaagacacgcaggaagacaaaatggatggattttccacgagctcctcgtacattatcccatttggaaaaatcaatcagctgcccagaggctcattagtaggaaggaggcaacccaggattccagcccaggtctgtctgactcccagattaagctctgattccagcccaggtctgtctgactcccaggttaagctcttctcctacactggtcactatcatctaattctaacccctggaatctgtccttgaaaatgagaaaggaatctgaaaaggaggctcactcttttttttttttttttttttttttgagatggagtctcactctgttgcccaggctggagtgcagtggcatgatcccggctcactgcaacctctgcctcccaggttcaagcgattctcctccctcaacctcccaggtagctgggactacaggckcccgccaccacactcagacaatttttgtatttttagtagagatgaggtttcatcatgttggccaggctggtctcaaactccggacctcaggtgatccacccacctcggcctcccaaagtgctgagattacaggcatgagccaccatgcccagcctggaagctcactcttttaagtgcatttcagaatcggcttctagtgcccacatccctaacccccattttgcattttgtgtatgtgtggagagagacagacagacagagagacaggcagggagactgagagccagaaagaaatcgaggagacttcaccagaaaggctctggcagaaatgtgcgtggagawgtttgtrtggytttatttaatcaggcaattctgccaccctgtcattcattccacaagtgcttactaagtgtctactttgtatcaggcactgtgctaggtgttatggatacagaatggartaagacacagtccctgccatcggacatgcccactggtgataacagtcctctatgaaagtctctatggcrgccttcccagagtaccttgagagggagcctaactaaggctcaggagaaccttcagaaaccaagtgatggcaaagtttgttttgaagcacagaagaagtyggtgagacaaagcagcaagaagagggtcttctagaaagagcgaacagcatgcacaaaaaaactaaggtcaacttttagtccaaaccacaattcctaaattagaggagttcaaccctgagttaactgcctcgtctgggtcctcctcatgatacagttctcaggaaggggaaggcatccctgggaagaggatgaccagtttaactgggctggagcaagtgccccagctccacttgactgacagtaactccctcttcatctatcctggggcagactcagcttctctacttttctatcctgctttcttacacagaggaaaygctcatcaaagattgttaatcataatgatccctgtcataatatttgtatgaccctcatggagcctgtgacatattgttgtatttctacttgacggatgagttagcagaggttccaaggacttaagaaacatacccagaattgcacaaagctaggaaatgactcttgatgcctaatagctcaggcacaaattaagcgctttgtccatgatactacaggatgctcatgataatggctgatgatggccatcatgaggatgaggagaaagaagaaagggaagagaacagagaagaaaacagcatttcttttttttttttttttttttgagatggagtctcaccctgtcactcaggmtggagtgcagtggtgcaatctcggctcactgcagcctctgccctccgagttcaagygattctcctgyctcagcctcccragtagctgggattacaggcacctgccactgtgcccggctaattttttgtatttttagaagagacagggtttcaccatcttggccaggctggtcttgaactcctgacctcatgatccayctgcttcagcctcctaaagtgctgggattacaggtgtgagccaccgcgccctgtygaaaacagcatttcttgaagggtttccaatggttttgaacttgttttcccaggtgcaracaggatttggaaggttgggctctcacttctggggcttccaaacccacgatgtcctgcctgacattgtcaccatggctaaagggattgggaatggctttcccatggcagcagtcataaccactccaggtaggacccacaggcmgtttgtgtttgcttctgggcctcgtacattgggctatggtataacacgtgtgttggaacttgtgtagattggagacaatcatggaaaccacatgatgcatttcccaagcaaatgaaagagagaaacagtctgtctgcctgactgtgaaacagttggaagaaagccagccctttttttttttttttttgagacagagtcttgctctgtcacccaggcttgagtgcagtggcacaatcttggctcattgcaccctctgcctccgcaggtgcaagcaattctcctgcctcagcctcctgagtagctgcgattacaggtgcgcaccaccacrcccagctaatttttgtatttttagtagaaacggagtttcaccatgttggccaggctggtctcaaactcctgacctcaggtgtttgaccttggcctcccaaagtgatgggattacaggcgtgagccactrcacccctatccgaaagccagcccattctgatctacctgtagggaagactaattctcccatgcctatgatgaaactcagggttccaccacacttttgaggtatatggaagagggagagaagatggaaagaggagaggggtgggagagggctctggtgtctcttcctcttcttataagaaaaccagttccttgggcttagatagggccccaccctgatgaccttatttaacctaattacctacttaaacgcactatctccaaatacagtcttattcagggttaaggcttcagccatataaattttgaggcgatacaattcagtccctaacatctactatcagttgaatgaaggatgaattggattggatgccatttacaacacgaagtaactgtagtccaaatggcgcgatgagagattgtggacaggaatgtgtccctctttccacaccttctattttctccctctagagattgccaaatctttggcgaaatgcctgcagcacttcaacacctttggagggaaccccatggcctgtgccattggatctgctgtgcttgaggttggttccagcrgccacattaacctcactcatttcacaaatgactctttcaaaaccacacatgcattagcagaactctatcatgctgagttgttaaaggggagagttaattcatagtttatccattaaagttagatttccatttattattctgccttctccctttttaaagacctactttgggtgctgaaagtattggataagaaataatatataataaacctcacatacatgggaaatataagaattttcctagccagctgaaatttctttgttatcttggtagtgatttatagatgttaactgctatccttgtatttagtttcatgttggccttctcttgtgtattttttcttccttccttttgttgtactattataaattgaatgactaaggagacactgagttctacgtgcttacagcaaggtaattcagctgttcacccctacaccattgatttagcctgggatcgcatctgtttaaaaaaagattttttttaatgttcttgttaacacgcctaatatcatttgcttaaagaactgtaacaaatttctggaagaatgtctaagaagtaaatgatggttttttttgtggggaggaaaactaggtggctgggggccaagggtcaacaagrgtcattctgctgtatatacttttatacttgctgatatttatatatatacatacacatatatatttatatatgtatayatrtttatttatttcaatagcttttgggatacaagtcggttttggttacatggatgaattgtatagtggtgaagtctgagactttagtgcactgtcacccaagtagtgtacatkgtacccaatatgtaattttccatccctcacccccctcccagcttccccgcttctgggtctccaatgtctattgtgtacccatagcttagctctcacctataagtgagaacacttattagttgctgtkaaagacattattttcttttttatggctgagtggtattccatggcgtgtgtgtgtgtgtgtgtgtgtgtgtgtgtgtgtgtgtgtgkatacaccacattttctttatccactcatcaattgatgggctcttaggttggttccatatctttgcaattgtgagttgtactacaataaacatatatgtgcaggtgtctttttgatataatggcttttttttcctttgagtagatacccagaagtgggattgctggaccgaaggatagaactacttttagttcttttagaaatctccatactgttttccatagaggttgtactaatttacagtcccactagcagttacactcactgattttcgaccatgaacttgatttacctattccaaaaaaattttaaataaaaataaataagaaaacactgcctttattaattaaatagttattttcaactacaattaagtcatgagatgagaaagtatgggtaggaatgtgtcatttatttcactttgtagacattgccaatttttttttttttttttttttagaaagagtcttgctctgtcacccagactggagtgcaggggcacaactttggctcactgcaacctctgcctcccgggttcaagcgattctcatgcctcagcatcccaagtagctgggattataggcatgcaccaccatgcccaactaacttttgtatttttagtagagatggggtttcaccatgttggccaagctagtctcaaactcctaacctcaagtgatccacccacctcagcctcccaaagtgctggtattacaagcatgagctgacattgccaacttcttttaaaaagtgctttgttacctcaaccaatttagaaggcaagaaggtttaggtgaacaaataggtctataaaaataacaaggtttgcctggagtcatgcaattattgtcagctaaataaaaatatagtatatttcatgtatcttgtcaagaaccacaggtgtttgctgtaagtaaaactgaggtaaaaatccttttatatcttctggtgccctggctctgggctcagccaaagaggccagagcctcagaccaggctgcttggctatgagagtccatgtctggctgaggcctgctgagcaaaggtcaccatcttccagtagggaaaccatctgtgatatttctttccacagagcattcatcttattcacaaatatatcccagttctcagcaaagcctgacaataacaarccttgggatttcagaatctacattttcaactgcattgagacacacctttattctttcctaaattcttttttgtttgttttttgaggcaaagtgtcgctctgtcacccaggctggagtgcagtggcgcgatcttggctcactgcaacctcctcctcccggattcaagcaattctcctgcctcagcctcccgaatagctgggactacaggcgccccscacmgagccctgctaatttttgtattttttttttaaagtagagacggggtttcaccctattggccaggctggtcccgaactcctgaccttgtgatccacccatcttggcctcccaaagtgctgggattacaggtgtgagccaccatgcctggcctattatttcctaaatacttagccacctctgaaggtgagggagttggrggcagaagcatatcccctcccctaagacttttcttctctccttacaacrgatctttttgtagtccttgtggtcacactagacttgttctgcattctgtttggttaagttacaagagggccatgtcaaatgacttctccacgattctcagtcaatcttagaacttctgccatgtaagatcatttggggctttctcttaacaggtgattaaagaagaaaatctacaggaaaacagtcaagaagttgggacctacatgttactaaagtttgctaagctgcgggatgaatttgaaattgttggagacgtccgaggcaaaggyctcatgataggcatagaaatggtgcaggataaggtaggtgctaatctgcccctctctctcagctgcttggagccagcaggagatataggaggaaacatcagctaaacttcatttactctcaaggagagagcagacacaaacagcaagatttcagcaaagccctttagagattagtagagagtgttgagtatgaacaaaatgctggcagatcatcaagaattctagagggatgagggagagcactgggaaaagaaaccaacattatccttgccatcctaggcaaatagcataggcaatgaccgaatacttagaaatacagggaagggaggaaattatctggggagaaacagaaggaataagaaagaagggccaggaaaatgttatggtgaaggtttggggtgaggaggttaaatatatattaggagttgttgttgttgagacagagtctcactctgtcacccaggctgggagtgcagtggtrcgatcttggctcactgcaacctccaccttacaggttcaagctattctcgagcctcagcctcccrggtagctgggattacaggcacacaccaccatacctggctaatttttgtatttttagtagaaatggggttttgccatattgcccaggctggtctcaaactccttacctcaagttatctgcccaccgtggcctcctgaagtactaagattacaggcatgagccaccaagcctggcctatattgagttttgtttgtttgcatgcttacttgtgaatggatttcaacctcccaagtaaccagggaggaatgttgttacttgtgaatggatttcaacctcccaagtaaccagggaggaatgttgcccactgagacctctaactcatcataacagcaattgaacttagcatcttcccccaaaccagatatttctcccaagatcactgtttgtttctcacactccaccgttctcccaattactcagcctcaatagcacaaaatcatctgactcctcctcttcccttgtttctaacaacaggactcattgatatctcttctctcccatgtctctcaaatctttccctttgtttctactgcagcccctatagtaaatgcctgtaggaaattgtgcctttcctccataaaatcaaagcctgaaaagagcaggagaatcttgggagtagggaggaatagccagactaacctcatgtctacagggatccagctttccctagcaatttctacctctttggttttaccaccattctactttagaaggattgatgctcaattttttagaccagacatggtataagactcttcaattcataccacatgtcacagccagtacaaagctgggatgtttaagtaagatttgaaagccaagggaagacaccagtaaaataaacaaagggtaatatgagactaaggtccccagctcataattttatttatttatttgttttgaccccaacatgcattctacaatggagaagagctcacaagtcataacgtatttcagtgtgtggacaagtacaagagttgttgtaacgttcagaagagttcatcctaatctccacccaaggggttccctgaaagttatctatactcctcaaagtgtagacttgagagaggaaagcccaatgagagaggaggagttcttcctttttctctgttctgaacccaacctctgtgtgctcaaagtcatatgaacaaagatgttcatcacaactttgtcttagtaaaacaccagaatccccctcccagatgaccgttcatacaaagcaagctagcttgtggcatatccccactataatggcatagatatatatttgacatggaaatatgtgcaagccatattgtggaaacaatgaaacaggtttttttagtccatttgtgttgctgtaaaggaatacctgaggctgggcaatttatcaagaaaagaggtttatttggctcatggttctgcagaccrtacaggaagcatgacaccagcatctgcatctgatgagggcctcagactgcttctgttcgtggtggaaggggaagaggcgctggcatatgcagaggtcactgatgagggagagagagagagagagaaagcaagagatyaggggttggtaggtgccaggctgttttcaacagccagctctagaaggaactaatggagtgacaactcatcatggagaggacagcaccaagacattcatgagggatctgcccccaccacccaagcacctctttttaggacccacctccaacattggggatcaaacttccatttgaggtttggagggccaaatatccaaactatagcaaggttataaaatagtatctatagaaggggctctttttctcttcgctgaaccatttgttagtataagcatgggctctaagggcagaccacctggatttaaatcccagctcctacatcccctaattctactcactgtcccctcaatgcaattactctccaaatccaaatgccactcaagcttttcctcaaccatggaacacagtattctcccctctatatctacctatggaaatcctagtctttttcaagatcaagctctccatcgcatctccttaaagcttgcctttgcttctcctctatccaggaratccacccttcagagaattcctctggtactcactgtctaaggagctgctttgaaaagatcttttccactatattagtccattcaggctgctatagcaaagttctatagattggatatcttataaacaacagaaatgtattcctcatggttctggagactggaaagtccaagaacaaggtgcaggccaacttggtgtctgacgagggcccactttctggttcatagatggtgccttcttgctgtgccctcacctagtaaatgaggcaaaagagctttctggagcctcttttatgagggtactgatctcattcatgagggttccactcttgtaacctaatcacctctcaaaggccccacctcccaatattatgccatccccttgggtattaggtttcaatatatgaattttgagggacacaaacattcactctgtgtcacctaacctgtatytgttgactcaccttttatgtataaataccttattttcctaaataagtttacacttttgaggccaggaaacatacagatggtaagtgctttgtgtttctcaattaatttcaggcccctgcaacacatcaaaccacagtcgcatagttataatacccaagaactttgctataatgctgtccagcatcacccaggataggtactctcatattctgttggtaaggaggtacagccctttggacagtaatttgtctgcagctctcaaaattttaaatatctatacattttgacctggtgayatggtttgaatgtttgtccctccaaatctcatgttgaaatgtaatccccagtgttggaggtggagccagtaggaggtatttggatcatgggggcggattcctcatcaatggcttggtgacgagtgacttcatctgagatctggttgtttaaraatgtatggcacctccctaactccctctcttgctcctgctctccccacacgacccatctgctcaccckttgccttctgccatgattgtaaggttcctgagcccctcactagaagcgggtgctggagccatgcttgtacagcctgtagaactgtgagccaattaaacctcttttctttataaattacccagtctcaggtattcctttgcagcaacacaagaatggcctaacatacctggcaatttctagaagtgtgtcccaaagaaataccctcaaaactgtctaaaaatatgtatgaataggaatatttgcagcattgtttataatcatgaaaaattggaarcaacctaaatgctcaacattaggaggttgaacaacttactgcaatgaaatactaggtaacgtttaagaagactaagtccaaatatactgacatggaaagatgyccaagatataccatatattattaaaaggaaattgccaaacrttattaaatgacttattttttaaaacatgcatatagatgtatttgcatgcatagaaaaagtatctgtttcacaccaaattgtcaatagaaggtgtccctaggaataggataggaagtggggaaatgttctcgttttactttatgcacttccagaacatttgaattttttttcaaattttaaatttataattctttaaacatagattcaccaaaagagataaacacgatggtccattatacattcatcaagaagtttaattactagcatgcccacttcattatcaagcagttggggcacaggcatgggcacaagggcctcggcaggctgcgctgtggcttaagcctcagcagagtttcagaccctgctttttttccctgaggatggcatacaagatgttcaattagccatagcagttgaggtcagggagggataaaatgggcaagggagccaagagggtgctggcccagagcaaggtcggggtgaagccacacagactccacccattcaaaactgtcctgttgggccaggcacggtggctcacacctgtaatcccagcactttgggaggctgaggtggatcacttgaggtcaggagttcgagaccagcctggccaacatagtgaaaccccatctctactaaaaatacaaaaattagccaggtgtggtggcaggtgcctgtaatcccagctagtggggaggctgaggcaggcgaatcacttgagcccaggaggcagaggttgcagtgagccaagattgcaccactgcactgcagcctgggcaacagagtgagactctgactcagaaaacaaaacaacaacaacaacaacaaaagaactgacccccccaacccaaccttccctccggattactctccaatccctctggcctctcaaatcatatttaatgcccttctagttctcacagtttagccctaaattattttcattgtctctttccaatcagtcgtaagtggaatgcatgatagcattttgaagtcaatgagaggattctwgtccttccctctccctcaggtcctttctgatccaatagtctgaaagtttgaatatgtattttgcttatgttaaggctttaagacagaacaaaatgcacatatctctctaggaggtcccrtcttattctgttctcagacaatgacaccttacaagaaatggaggattggggaaagagttggatctggggttggtgggaagaaggaagtggatggcaaagcccagactgagggtgggtaggaagtgtggaggatgtaatgaaactgggcacactagaggggccccgtctacctcacttagctcgcttagcccggtcacctgaggaccattttaaaaatgcagatgcctaagccctgcttccaatattctaatttgattggcctagcatgaggcccaaatatctgtcatttgaaagccttccaggtaatgcagacatgctgtcaggtgtgacatgactaagtcagagggagacgtttgtactcacagactgggaagacaggggacgcacagaaaggatgcaagtcagcccaatgtctgaccccacagggaggggacctgctctgaatggctggggatctgacacaggctctcggctcctggagcacttacctttcctaaccctggaggatgcagtcttgggggagaaagagcaagtcctacaagcagggaaattaggacaaaccggcccctcctcagctgtcccactgcgctgcccagggaaagctcaggctgctggtgcctttgtacaacttctgagccatttcctggcctttgaaatgagccctttccatgggcagaacaaagtgaagagttaaggaaaatttccacataaaacagactccaaatttagctattaaggaaccagactcccaaggcagccattagcaaagctaagattcactggctatccgcacagaacttcattttgtcttttgggaatttgggatgaattcggattagaaacaaacattttaaataacatcctccaaaaatctggttcagcaattagcagcttcatttaattacaggggaaggagaggacagagagaaagagggagagagaaaaaaaagaggggcattgatggctgaagggtttttcttttttcctctcttgcaaataattcctttaaccattccaacaccaaatagaaagaattttaaaamtatatttacagataagctgtcggcctcttccccgtgaagaagtaaatcagatccatgaggactgcaagcacatgggactcctcgttggcagaggcagcattttttctcaggtaagagaaagactggtttttacctatcgctctaggtaggagtctctctgatttcctaatgctggtcacagtttcttcacagctgtgaagatgtcctaatrctggttgcagtttttacacaactgtgccgaggtacccagccacatgtcatctagggatgaagctcgggtacaaaaaaaaaaaaggcggagacagtgcagctctcaggccactagggggcgctgagtgaaaatggtttggttgtcgcggctctttggggtaaagatagaggcagacagaggatggtcaaagcggacaactaacagtatggatgataaacatcacagtcatgcagtaaataatctrtctcctgtataattaattctaacccctgtgaaagcaattctggccgttcttagctcagcccmgggctctgacttggtgaccctgctaagccttagtggcctctgtggctgggagcaacacgacagcacctgcaggcccgggtgacgcctgtcggagagatggaggaccacctgggcatagcccccattgccaaactcaaaatcagccagagccagtgtccttcacccttaggctgggagattcagaggtcgagccctccccactcccttccttgaaaagccatgcccagctccacagtcaggaccctggcttgccctgcacacactgcccgagaggctgcccctcacagcaacagcctctccccagggatgggctacagggtggagacttaagagagaaggtaacttctgytcctccctaatttgtcctgtcctttgttaactttctttcccattttaaacattcctcatccttcccagtttccctgctccatccctgcctctcacaacttcagtggatactgaaatatctgcttcttgcctcatacttctcagataaaattgaaactatcaggcaaaacctctatataaactcatcggtccccgcatttattctttcctcccgtgttagtccccccccccagcctgctatcacaaagcgccatagcctgggtggcttatacatcatagaagttcatttctcatagttctggaggcagagaagtccaagatcaaggtgccagcaagttcagtgtctrgtgagggcgctctttctaagcggccatctttctgctgtgacctcacattgcagaaggggcaagagagctccctgggccttcatgggctttgccctcctgagctaatcacttcccaaaggctccacttcacaagaccatcaccttgggagttagggttccaacataggaattcaaggggtagaggcacaaatgtccagatcatagcacttccttccctgaaggttccagaaatgaggcatttctccttttcaaatctagatcttccatctgtgtgcttgtttctccaagctccctccaccttcactcaaggaaacccccatgttttcttgcatcttcaatttttccccaacttccccttcccctttaaacaaaacagacttaaagttctcccagcccaaacaacaaagccagaatgagcacttttgctgggatgtgctctgtgattttttttctagtccaggtcataaatatttttctgtacaaaccagataacataatttaatgattatgaatcktaagacatgcaatttataaagacatgagatacttgtgtacttgcttagctcttcctttgttatttggcaaaatttgttatgtgctaagcaacaggtgtcattctggaaactgaaactattaggttgctgtaaaagtaattgcagtttttgtgattttttttaattgcaaaaactgcaattacttttgcaccaacctaatacggtgataaataagatctggtccttccttcgtggagctggtgggagagaaaggcaaatacatagaaaattacaatataatgtagtaarctcatctataaatattttttaaaagatattcaagggggaaagagaagggacttctaggccaggctttctgggtagcagaatcttaaataatgagataaacaacyaaactgtgcatgaaatgtggcagagtacaaagaactaattttgcacaccacatcacaccacacagatgtggctggtgcaaaggcttgagtagtcagtggagctggtatgaagcccttcctgcttgtcaggcactgtcctaacactttgcatgaactgactcatttaatgctcccaacaagsctataaaataagtactattactatccttattttacagataaaggaaaagacacacagagaggttaagtaatgacagaaccaggatccaaactcaggtagtctgatttcagaatctgtcctctgaggaagacaaatctaaggggacaagactggagacagggggtccctctgggagccaaggaggctgtttgaacctgagctgtggtagtagagatagaggagatattctgaggataatcctggaaaatgcacagactgtggatatgaagaaccagagagagtcgaggaagaagctctcatgttggtttggagtgggcaagaatgagtccagctttgagcatgctccattcaaggtgttcawaaacatctcactctatctacagatgcttcttgacttatagtggggttacctcctgataaacccctcctaaattgagaatattttaagtcaaaaatgcakttaatacacytaaccaactgtacatcatagcttagccagcataccttaaatgtgctcagaacacttgcattagcctacagttgagcaaagtcatgtgacaaagcctattttataataaagtgttgagtatctcatgtaatttattgactactgtactgaaactgaaaaacagaaaggttgtatagatacttgatgtacaatttctactaatgtgtatcactttcccatcattgtaaagtcaaaaatattctgtcagggaccatctgtagaagtctgtagctcggaggaaatgactgaagatcatgttttataggtcatcagcatttacacagtgagatgaggaaatctcccaggaagtctaatgtctagatgagaagctcagtgagatgaagatagaaacctrcacaacactgacttttaacrggcaggagaggccgggcacggtggctcacgcctgtgatcccagcactttgggaggccgaagcggcagatcacttgaggttaggagtttgagaccagcctagccaacatagtgaagccctgtctctaccaaaaatataaaaaattagctgagtgtggtggcacacacctgtaatccctgctactcaggaggctgaggcaggagaattgtgtgaacctgggaggcggaggttgcagtgagccgagattgtgccactgcactccagcctgagygacagagtgagactctgtctcaaataaaataaaaataataacagtaataataataaaaggcaggagaaggaaaaagctgcccaggtagaggcagaaagcgtggacaggtatgaagagaataagaagagtgtgaagtcatggaagaaagagacaggagaggttcaggaagtggggtggggaattccaaagagtcaagtgcagagaaggccagagagartgagggctggaagatgaccagtggattccacacttgcaggtaactttagtagagtggttgatgaggcagaagtcagactgcaaccaattgagatgtgaatgggggaagggcaaagtaataaataatggccaataagcaccaaccagtctttttagtgatgtggctaaaagcaggaagaaagcatttgcgaggtagccataggggacaagggggtcaacaaagatttgtatttggtgtggtctagattggggttatgagagctttaagcctgcttgtttataggctaaggggaagttgaaggggcgtttcctggagtgaaggagatgggagaatccagggtcaagggcataggtggacaatttggagttgaacagcaaatacaccttgttctctgagcctttaggaaagtttataaaaatggatgtgagagcaaacaagtttgtcttgcgtggcagcttcaattttctgagaagtatgaggcatgattgtctatgaaatagagggagaggcgcaggagttgagtaaggaaattgagaggaatgataaaggtttagattgagaaaggacgctgacaatgaacaagaaaagttggggtgacccacagaagttggagaccctgaatatctagcggcatcactcagcctagctgtgtgatttttctctaactcttctcagccatctagattagaaaaaagccattcaataaaatatttcattagcgctgggattggctgtggtgtgggtgcagcagaaaaagggtagaaatgcaagcaaaatgaggggcaagtgygagcctacttcattcaactctgcgttctgagctgggtagaaaggaaggaggagacctgagtggagcaatagacctgaaaacaatgggtgaatgaggattctgaagtcttcatgaaaaggaaagctgtagtgggaatcagaaattgagttgttcctggtgaagaggaggctcatggcattggccatgggtatgaatggttgcagaagggtggacataaagattctgggagttgtggcaataagggcagtgagaagtgagtttgctgggttgcacatatggacatggaagtcaccctgggcagaaatggagtatagcgaggggcctaagacttcagtgaaggtgtagaatgaccaggaggtaaatgtatgacaaaaaggaaaaggggcagagccaaattgtacaagggtttgtatggagactggagggtgaatggcctggattcagcattggggatggaggaggaascaaactgagagaaacatgagaaacatcctaaacacaaggttttggatttttagtttagtgcatttcctcaaagtcatatttgattctctgatgatttgttttcttattttttggtgtctcctcagacatttcgcattgcgccctcaatgtgcatcactaaacsagaagttgattttgcaktagaagtatttcgttctgccttaacccaacacatggaaagaagagctaagtaacattgtcagaaataaataaaaccacaagtctcaagaatttgccacktatgttcaagggtgaatttgaagaatttcagaaccactggtatccagagaaagcctgcagctctccacaggagctgtaaaagtcatggttgactgcctaccaaccatatttgttagcagagcccctcttatcttgagaactccattcttcagggaaaggatctccctagctcagagaataaatcctaattagtttatgttaggtatggtaatttgattcccctttgcagtgattggtttatgcatgaatatgtgatgtatttttgtccagtgaatcttgaagaaaaatcttttggtggaggtgccttcagggaaagttttcttcaccctcactcttcagttcaagaagagatgtcttcttgttgcgctgagaacaccatatgttcatgacgagattcctggcaccatgtcagccggcttgtagtcatgaggacaaccctttttggtgaggttggaagatggatggaagccaagtgcttagtgatgtcaaagaagcactcacttaagcattcctggagccaccctacctcagggcctcttgatatttgaggtaataaattcattgttctgtataaggcttttttatttttcactgttacggtcaaaagcatactgagaaatgaggcagaaaatactcccaaagaaagaacaagttccctctcctttaactcccttaaaacatctgtcagagccttcttttctggtccttacctactaccacatcccactgtggtctgaacccttattactcctattgcaatactctccaagaccataatttcccaaactttagtcattagaatacacagttatataatttctccatagaggcacaccatttgtcttaggtttatttttccttaatttgacttttttttttttttttttttttttgagacggagtctccctctgtcgcccaggctggagtgcagtggtgcgatctcagctcactgcaagctctgcctcccgggttcaggccattctcctgcctcagcctccctagtagttgggactacaggtgcccaccaccacgcccagctaattttttgtatttttagtagagatggggtttcactgtagagattgagccaggaaggtctcaatctcctgacctcgtgatctgcctgcctcggcctcccaaagtgctgggattacaggcgtgagccacctcagccagccaatttgactttttttaccaagatgtgtagtaaactttctgtaattacaataaatgataaatcaatcctacttgtcgtaagtagaaagtaaccataaaaacagagtgaacagaaaacaatgtaattcagttttagcaagatgcaagtttttgcaaagattctcagcctgagtcctgttctttctttgttcaaaagggagattagagagtactcaaaatgccaggtgaggtggctcatgcctgtaatcccagcactttggaaggtcaaggcaggcggatcacttgagctcaggagttcaagaccagcctggccaacgtggtgaaaccctgtctctactacaaatacaaaaattagccaggtgtggtggcgcatacctgtaatcccagctactcgggaggtttaagtttgagttttattgtttccttttcatattttactaaattcctaaattgtgttttcagtgttcctcccttttccgttatcttaaaggaaaaggaatgttggaagtagagggctctgaagaagaactggaaagtaagtattgactttcttgttcaatgtccctgaccctgtaattgtcaccagtaaagaggagaagaagaacattccaggcagagtgaactatagaagcaaagaactaaggtgcatgacatggaaagaatggtggaaacaaagctcaaaaagcttgtttgcggacaaggaggcggtggttgcagtgagcggagatcgtgccattgcactccagcctgggtctgtctcaaaaaaaaaagagagagagagggtatttgaaacatgttaaaaatacactggcaaactgagaccttctcttgaagaatacaaatagaatagggtctggagacctgaagggaaatcactttctcagcatgtgattgaatgcgtatcaaaagttgtgtttctgtttgaagctaattgtcctcattttctaacccccccaccaccaggtgtctgttctgctgacacatcctacacctcactgccagatttgtttccattaagcattaactgaaacatagcattccctggcataaaaccttccagcagcttgccattaaccccagacgaggtcaaaaccctttaacaaggagctcaatgctgcctagtatccaatatccaaatagagcaaatactctagaaatgttctgtttgggcacagtagaaagatcattggaataagagtcaaatgacctgaattctaaatccagttcttccccttatttgctataattgactttgggccagccttttaacttctttttaacctcggtttgttcccaagagtataaactatttgcccttcctaccttccagagttgccttggaaataaagtgaccccgtggatgtaaaagtgctttgcaaaccaatgacctagagaaatagaaacttcttcctttcaagccacatttctcctctttccttcactacaaaatctttctcaagagcagtttttgtgcctcacttatacgtctttgcctcctacccaagccccaaccactaggatttcattcctgtttctcattccttggaaatgccttttcagaaggcacctggtgacttctttataatcgaaacttaatgtttcctttaaacggtctttctgaacaattgctacttccttcgttagcttctgcagtgtggtccttctatctcggatggctttctcagcctcttttctggcaactcctcaactataacgttccgtcctgagctgtctcttcttccatgctatactctctccctataggcaaccttgtccacttctgaaatttcacctatcttgactatgctgaagacttccaaatatttatctctagtctcaaccgtttttctgagctctaaccccaaaattctagctctctggactctgtcatttagatgtcacaggaacacttcaaattcaacagacttaacacaaactctactaaatacctcctccaagaatcccttctttattaatggtacccttttaatctcaggctcataatgatttagatcatttttcccccaagttatctttctgccctttatatgactaagtctcatgaataccttctctgacataattttttccagtatgacccatttataccaaaactgccttaatttggaccatcatctccctgaactatttaaactgccttctaactggtatcctggacctcttcccatccttcctctacattgataccaaagtcctttacttaacaaataaatatgatcatgtctcttgtctcttgaagcatttggggtttcctattgcccagagaacaaagtccaaactccaattattatggcattccagagccttcacaatttgtctccaaacaagctttttgagatttatttccaccattctttccatgtcatgcaccttagttctttgcttctgtagttcactctgcctggaatgttcttctctttgccagtgaaaattacagggtcaaggagattgaacaagaaagtcaacacttactttccagttcttcttcagagccctctacttccaacattccttttcctctaagataaaggaaaagggaagaacactgaaaacacaatttatgaatttagtaaaatatgaagaggaaacaatgaaactcaaacttaaaaccagtaacaacaacaacaaatgtctctggccaagatccttgctagtgccaggacatcctctccaggaagtaggaagctgggagatttagtcattcaggtaaattcatacaacgtattccttgtggttccctgagtcctacagactcttttatatacctaacagtatatcctgctagtttcctatgtccaagggacatattaatgtcaaaaagtcagaaatgaaattccaaaaggtagccaggtcctgagtctcatttcttgactacgaaggctacatggctgtaccccagttcctgctcatcagaataaactgcaactctttcttgaaaagcagttggagattaaagatgagcaaatcatcagaagcatgggagtaggaagggcaaaaaatgtggccatagaatgcatatggccgttcatttctttcactggcttataatcatgatagattcctccctctttccatttggagtcgtgggcaggggtttagcacccccatttttctcccttcctttttctgctctccccacaggcagtgggatgcgagccagcttacataaggcaaggagcccacattgttgccaagatttttaaaaacttttttcttgttaagactgtctaaagtgaagataatgaacactcagctcaagtaaacttttttcacacaaggaacatattgacagtcaatcatgtgattagaatatgcattaaaatgttggcaactgtttaaaaacacttcagatgccaatctactcaggagggagtaaattttttttttctttttttggagacagtctcgttttgtcacccaggctggattgcagtggcgcgatctcggctcactgcaatcgctgggttccagcgagtcttccacctcagcctcctaagtagctgggattacaggcacacgccaccacacttggctaatttttgtatttttttaatagagacggtgtttcaccatgttggccaggctggtcttcaacttctgacctcaggtgatctgcccgccttggcctcccaaagtactgggattacagacatgagccgttgcgcccagctgggagtaattttttaaaagcccatcatattgagctttgtttatatcgttagtaataataattattgtaaaattacacctataaattagtaatactcctataaattagtaatactaatttaataaatttaataaattagtaatactaattaacacctatattactaattattgtaataatacaacactaattattgtaaaataacacctataaattagtaatactttattattataaaatacagtcctatttgtattgtaacactccaacttgtatgtcggtgtaacttttaactttctggaaattcaagctaatctcaaaaggtatctctaaactatgggaggacttaattcttcttccacctttaagtttcacttaagtctcacctttcctgcaaggaacaacaaaagacaatagaaaacatggcagcatttgcttcttcctcatcagagtgttgaaatcagagcatcatagtcatcattcagaagtggtgttgaagactgctgggccctgcatcagttttttgctctggttaattaaagctgaacgctcatttccaactgagacacaatcggtaaaaatggcacagctttgccccatggaaaagctgatggtaaaatacacaccccaaagtatctcaacagaaaccaaaggaccactgaacttaaaacgagtgaagtcacagaaacaaaaggtttattatattaatcctttttggttcaatgaaaataaaggagataaacctaggtctgattggtggcagatgtagggagtgtttggtagatctgaagacattgtgagatgaacccatggtggaaaacacccctagaaaagatctcaaaaacacagtttaatcaagaacagggtcaggatggtcattgcagacagcagctagtgaaaaaacaaatttttaaattggaggggacaacatgatgcagtggaaggaatccacacaaagtctccattggatttgagctgaagcttccttgtatccaaaaagacgatcatatggacccccttgaacccttgtgaggatttaaagaatacactggcagcttctccaataataactttctccttaggattctctgccttttcacccagaaactcccttagttggcacttggttgtcaccatcttgagccaatgtttatttctgtgcatatgttttatttccttaactgaattctaactactggcagggcgaccttctcttattttcttatgcttagtgcctaacacagtgctcctcagagaaagggaaaaagtaacgtctaattggaaatacattctcagaaatacatgcttagatgactttgtcactgagtgaacatcacagagcgtacttacactaatctagatggtagagcctaccacacagctaggccttgtggtatagcctactgctcccaggctgcaaacctgtacagcaggtcactgtactgaatactgtatgtaagagttaaagaaacaggaaagaaacatgaaatgtggctcaacagtcaacaggtttattttagagaaataaacctgagagggacttctgtctgattttggtcaggagtattctctcttacagactaacagtatatattgtttttagggcaaggggccttatcacaagcttggaatgtttctgtgtgggggagaagttttatggcggggttggaatgtctccaggcagaggggaggttatcttggggctgacatctttccagccagagtggggttatctcaggtctggcatgtctgtggttggggagaggtc

SEQ ID NO: 93796 - DNA, 139339 bp, Homo sapiens
tattgcatctatttgattcttctctcttttcttctttattagtcttgctagcggtctatcaattttgttgatcttttcaaaaaagtagctcctggattcattaattttttgaagcgttttttctgtctctatttccttcagttctgctctgattttagttatttcttgccttctacttaacttttgaatgtgtccgctctttcttttctagttcttttagttgtgatgttagagtgtcaattttggatctttcctgcttctcttgtgggcatttagtgctataaatttccctctatacactgctttgaatgtgtcccagagattctggtatgctatgtctttgttctcgttggtttcgaagaacatctttatttctgccttcatttcgttatgtacccagtagtcattcaggagcaggttgttcagtttccatgtagttgagcggttttgagtgagtttcttaatcctaagttttagtttgattgcactgtggtctgagagacagtgtgttataatttctgttcttttacatttgctgaggagagctttacttccaactatgtggtcaattttggaataggtgtggtgtggtgctgaaaaaatgtatattctgttgatttggggtggagaattctgtagatgtgtattaggtccgcttggtgcagagctgagttcaattcctggatatccttgttaactttctgtctcgttgatctctctaatgttgacagtggggtgttaaagtctcgcattattattatgtgggagtctaagtctctttgtaggtcactcaggacttgctttatgcatctgggtgctcctgtattgggtgcatatatatttaggatagttagctcttcttgttgaattgatccctttaccattatgtaatggccttctttgtctcttttgatctttgttggtttaaagtctgtttgatcagagactaggattgcaacccctgcctttttttgttttccatttgcttggtagatcttcctccatccttttattttgagcctatgtgtgtcaatacagagacatttcatcagagacctgacagagatgagggagtaaacatataaatatctgggggaagagcattctaggcaaaggaaataacaaacataaagtccctgaggcagaagaatgcctggtatatttaagaaacagcaaggaaatcaatatgacttgagacagaaaaaagagtgatagaagattgatataataagagttgtactgggcttagatattatgtagggatttatacactatggttaatgtttggcttttactctaaaatggagagccggtagacagttttaaatcaaggaatcatatcattctagattttagattctagtcccatagaagatgctatgtagattataggttctagggggaccaaggccaaaacatgcagaccagctggaggctgtggcagcaatccaggtaagaggtaacagaggcttgaggccaggcacagtggctcattcctatagtcccagcactttgtgaggtggagctgggaggattgctggagtccaggagttggaaaccagcctaggcaacatagaaagacattgtgtccactaaaaaaaattaaaaagaaaaaaatttagccaggcacggtggtacacctgtagttccatctacttggcaggctgagacaggaggatcacttgggcctgggagttggaggctgcagtgagctatgatcacaccactgcactccaacctcgttgacagagacattgtcttaaaaaataaaaaataaaataaaataaaacagaggcttgggccaggatacagcagtgagaagtgattgaatttggagacaattttgaaggaagaactcatgggatttgatgatgaatcaggtgtgggatatgagagaaaatgatgcctccaagacttttgtcctgaatgactgtgctatgttttaatgtttgtgtctcctccaaaattggtattgaaccttaatcccaatgcaacagtattaagaattaattattaaggggcatttaaaaggtaattaggccatgagggctgtattcttacagatgggatcagtgccttataaaagggctggatggaactagccatgtgagtatctcctgctatgtgaggatacagcattcatcactccagatggcatttaagatgtcatcttggaagcaaagagagagcacttctcaccagacactgaacctactggcaccttgatcttggttttccagccttcagaactgtgataattacatttctgttctgtacaaattatccagtctagagtatttagttttggcagcacaaatgcactaggataaacttggaaggataaaattgcaatttcctgagatgataatactgtgtaaagagcaggcttgaggattcaggtggaaatcaaaaattctgttttggatgtaataagtttgagaggtctctaagatatctgagcagacatgtcagtaggctgctgaatattatgtaagctttgagttcagaggacagataaagattagagataaaattttgggagctgtccacaaatagatgctatttaaagccatggcactggatgacagcacccatggaataagtgtaaataaagaagaggaccggccgggcgcggtggctcacgcctgtaatcccagcactttgggaggccgaggcgggcggatcacgaggtcaggagatcgagaccatcccggctaaaacggtgaaaccccgtctctactaaaaatacaaaaaattagccgggcgtagtggcgggcgcctgtagtcccagctacttgggaggctgaggcaggagaatggcgtgaacccgggaggcggagcttgcagtgagccgagatcccgccactgcactccagcctgggcgacagagcgagactccgtctcaaaaaaaaaaaaaaaaaaaaaaaaaaaaaaaagaggaccaacctctgagcactggcagcattacaacatgtagagataggtaaagtgaagcgaaacagcaaaagagattgggaatgagaagtcagtgatgtaggagagagagtggtatccctatccctggagccaagtgaacaaaatgtatcaaggagaagggagtgatcaaatactgctgagaggacaaaaagagatctgaggatgaccaatggattttgcaatggggagaatattggtaactttgacaagaacagtttggtggagtggtggaagaaatgcctgattagagaggtttcaagtgagaataggataggaatagaagagaatggatttagataaatcttttgaagagttctgctgtaaagtataagaggaatggggggatggcaggttggggacagaaatgtgcatccaaaaagatattttttaagattggaaatactatggaatgctttcatgctgatggcagtgatccagtaaagtgggaacatttagtaataaaggcaaggaaacaattgagcaggctaaagagaatgaaattgagtggacaagtggaagggttgccttaggaaagctcaggaagagttcgttaattgaagacagattatacgggctcacatgcagggcatcaagcaaatttggttttgggatgatgtggaagttcccttctcatagcttctatttttatcagcaaactaggaagaaggtaagcatttgagagagaaaacagaaatatttgataataaagttgaggaaaggaaggaacctatcaatattcattgtgtctttacaatgttcctggaacctcatatacattacattttgaattcccacaaggactttaagagaataggtttacagctgagaaaactaaggcacagagagtttgtgtaatttgcccagggccatgtattattagcatattgctaaaccaaaatttgaaccttgtctgactagagtccacacactctttccactatcctaaacagcatggaaacaaggttttgagtctgagtaactgggtatatggtggtgcaattagtagggataggaaaaacttgagaaagagcaagtgatagaggtgggaaaatgcaagggggttgtgagacagtgtgaaagatgagtttgttttgggccatgatgcctttaatgtgctagcaggaacatgcaagtagaactgtcagagggcaattggaagttctaaatttgaactcaggaaaaaggtcatggtacttgagatatgaagttgggtgtcccctactgagggttcattagccccttttcacactgctataaataaataaccgagactgggtaatttataaagaaaagaagtttaattggctcaccgttctgcaggctgtacaggaagcatagtggcttctggttctggggaggcctcaggaaacttccagtcatggtggaaggcaaatggggagtgaggcacttcacatggccagagcaggaggaaaatgggcagggaaaggtgccacacacttctaagccatcagatctcgtgagaactcactcactatggcaacgacaataccaaggaggctagtgttaaaccattcagaagaaaccacccccatgatccaatcacctcctaccaggccccacttccaacgtaagggattacaattaaacatgagatttggtggggacacagatccaagccatatccaggagtaagggtttaacttgtggaagagatcaagataaccaaaagaaagaaaatagaagaggaatgaggatagaagccaggaaaatggcttaaaaaaaagagaaagttgctgggaaggagtcagagaaggaacagttggggatgcaggcagtgagtttgtttataataaaggtcaagggaagaaagaatgtcaaaaaggaatatgaatcaatagttttaaatgctgtaaaacaaatagaaaacgagcactgagaagagctgttggaatcagcagctggaatttaggatgatgtgaaagagccaattgagtggagtggtagggaggagtgagtttgttatggagaagtgaaggtgatgataagtagactattcttttgagatatttggcagtgaaagggctgaacatgatggaacgatggtacaagggagaatagggtcatggatcgagggaagggccttcaggctagggaagaaggcagaatatgataaacgagtaattttgctagcaaatgttataagaactcaaagaagaacaaaattattttgtaggggcagtgagattgcaaaccataacactgcaatagtagagctagaaattaccctgagatagtggccaataccctcattgtaaccttggtcaacttaagacccagagaggtggcatgatttccccaaggtcacatagcaagttagtggcagacctgagaggagtagaatccagatttcccaactctcagattgttcttttttccaccacaaatctgacttggagcacaccactgagggtctgcacctatttacccctcatctgatagctggtccagtgggccctttcttggtcctcttcccatatctacgatggcaaaagtgatgaggatactgtagtattccagattttaactaggttgatggcagcagacacataaaggagagatagagaggaggatatacctttccatatttcaaaaaatattctctggtgacttgcccaaggtctcacagctaggaagctcttcagaaacccaattgccagcatggggcagcctgtgttactgctgcaggatgctatcattgtaatattagagtaaaggagtgatatctgtgttcagagcccttatagcatcaagaagggtgagaagggtggcagtactcgaatctgggacttaaagactcggccaaacgttgaacctgaaccagaataatcaatttcccgaagaaaagggcacttgccaggaagcaagatggcgggaacggctacggtcaaagtgtcgcgataggagctttcgccgaggatcaggtgacgagagtttgagccaggaccgggagggcgggggtagaaacccgggttgaggcaggaggcggctagaccggtggcggcggcatctggagtagcactgagatcttccggtggcgggaactgcagtcatggatcatattacggtacccaaggtaaggagaagagttaagcgaggctgacagccgcgagcttcctcttggtgctcacctgggagcccagacacacctcctcagccttctcagcyttctttgacgcgtctttcctgtggggggtcccgggttctctttctgggtccacaccccctttcaaccaaacacctcttcttaggatctgcttgcgggcgtcagcggccgggaaagaggtggtctgcaccactgtccccttacgcgacgccgcccccgctcctggtgcacgcctgttctggccctctgactccagctcctccctagccttgacctcacactcacccttatctcagctttttatactagctgcacttgtaaccgccattcgcgaataccccacattgctctgcctcctgcggagttacttcctttatcgagcgtttcttcaccatcctcttggctcctccagccactaaccttccccagggattgcccagaaccccactctcgctccagctccacggcatgcctgtgagggtttgtgggggccacagcatctcttcagccaaagctgggcaatggaaaaggaagaggagtggggcagagtggatctggctctgctcagccggtaggagaaacccaagaggtttatctagccagttgtcacctgtttttagccagtcccgagttagagttacttctgctactttttcctctcatctttccagatcctactccctcccttcccaacgccagcccctttctgtttcaaatccacttccctcctttctcctgtctggggctggggaacagtgaaaaattcacaactagtctgtggttattttttcctgttgatcataacacacgtggtccaggctaattgaagtcctggtaaaaaatccagcgtgtttttaatggaaagagcatggattttgaagccagaagacttgaattaaagtgctgcccactgcacccccaccaactacttagctaatgactttggacaaattatttaacctctctgagccttagctttcctcacctactgatagggtttttctctgtgtccccacccaaatctcctcttgtagcttccgtaattctcacgtgttgtgggagggacccggtgggagacggttgaatcatgggggcagggctttcctgtgctgttcttgtgatagtgaatgggtctcatgagatctgatggttttaaaaacgggagtttctttgcacaggctctctctttgcctgctgccatgcatgtaagatgtgacttgctcctccttgccttcctccataattgtgaggtctccccagccatgtggaactgttaagtccaataaacctctttggtaaattgcccagtcttgggtatgtcatcagcagcgtgaaaacagactgatacacctaccaaatgaggataatgaaatttgcccggctcacttcacaagatggttgtgggattaaataagaggatgtgtgtgaaagagtttttgtaactagtaatgttttgcccactttttagcataaaactttgatgctgcctgatgggcaaagcacaaactccaacctttaacctttttttctgactccctcctcttcagggcctttctctgtggaggataaccacatcccgtgtaaaagccagccagccttgcctttttctgtgtccctttgtttccggatcatgtcatttgtacgggtcctctgacatggtataagaaggtggtaccattaaaggaaaggaacttctgttgtccagactccctcttctcccaacccacctaagcttgggccacgttacttgtctagttcaaaatcagctcactcgaatactccttttttctctcttttgacaactggggaagatggggaggcagaactgctcctgtccttgagtgttaaaatattaaaattcccctgttagggattgaagctataaactgggctggctctatggaaattggaagggagaagaaaccattaacgggcccatatgaaaattataatagcagctaatacgtatagaatatttaactatgtgacaggcactgtgttcaatattttacctgaaatatgccttgaatccttacaataacctattaggagatactattattattcccatgttacagatgaggaaactgagatccatagatgtggaatgcttgcctaataaacaaagataggagtgctcagactggtgctgggatagggttcgtgctcaagaaaacttaaacttgcatcatggtcagactccatttgtactgcatggatagtgtgattagtcttgaaatataaataaaaactccaaatgaagacttgattctttaagcagaattagtatttgttttggtgcctggcagggctgtgagtgcccacaggtggtatgctgctgtgagtctgtttttttctcagtttctagaaaggattagggttgcattaatggctcgggattaaaatggcctcccttttgttaactcactgtttccataaaagagagagacatctgccttgtccatctcaggtcaaagggataactttgagtttgtcagtcattagttgtgtatgtcaagtacaaaagtgacttttatttttggctcttgcttgagtctttttctttactcaggaagactttaaaaaattattgaagtacagtacacataaagaaaagtgtatagattggaagtattcattgtgctataaacttaaaaactggacacacctgtgcaaccgctactgagattaaaaaaaacaaaaacaaaaaacaaacaaacaaacaaaaaaaagaacattactagaagtccacttcatgcccccttccagtcaatacccctcccaagggtaaactactatactgacctctaacaggatacattcattttactcttttgttgtacttaatataaatggattaatacattctcttttgtgtttgacttcttttgctcaacattgtttgaaagatttatccatattatttcttgaagttatagatcattctcattgctatattatgttttgttaacatgccacatgtgatttatccattcttctgttgatggggaatttccagtttctgccttttgccaatagtacattttgacagatttaaatatacatttttgttggtatatgccatcggagtggaatttctgggccgtagaatatgcatatgttcatctagacactaccaattttacattcccacgacctatgtatgagaacagatctatctaagatatagcttagggttcaacaaccatttttggagcgtctcagacctgccctaaagtttggtgactctcctatctgaatcagaatttgttctatgtatttttccctaccctcattacatctgtgtcagttggcacccagaattcttaattacttttctttcctggaatggaaccttaataataaggctttatgcaattaacatttattgagcttcaactggtttgacaatttgctgtggtttaagagtgcatactttggagccaggctgtctgaaataaaatctcaactctgctacttaactagctttgtgattttggcaaatatataatctcttttgcctcagtttcttcatctataagatggtgttgaaaatagtacctatctcacagggttgttataagaattaaataagttagtatctgtaaagtgcttagaacaatgtctggcacatggtagatgcttaatttagctaccagtcactatcatcatcgttattaattattatatgcagaatatcacattgggagtcaaggatacataactggatatggatatggcaactgccctctgggatctcttaagtaaggtgatgagatgccaagcacaaggtccaaaaatgaaagagactgaaaaatatgtctattctgtcttgtgatctgatgggagcagcctgacaggcagggagaagctcttccaagtttacagcctcttagacctcaataactactctagagaatagtgttatgtgtttaattcatgaatctctttaatcaaggacaaggataatttagtcaaaaatctgttttctggactctccttcacataaataattgctagctcattaaggaatgttttaacacaaaaaaagtaatttctacatttgtgtgggtagaaaaaaaagacagtgaaagattttatagattgtaaaggactttgaatgttacactgaggaatttgaacttgtaaatagccaaggagctactaaagctttataagtctagaaatggaaaagttagaaaggaccttttaaaagattatctaaatgaggaatggggatgaagtttctttttggaatgatggaaatgttctaaaattacattgtgatgatggttgtacaactccaaatttactaaaactaattgaattgtatacttaaaagagtgaatttgtctgggcctggttggctcaagcctgtaatcccaacattttgggagccccagatgggaggatcacttgagcccaggagtttgagaccagcctgggtgacatagtgaaacctcatctgtacaaaaaattaaaaaaaattagctgggtgtggtggcttgcacctgtggtctcagctactcgagaggctgggggggcggtggggatggcttgaatctgggaggtcgaggctgcagtgagctctgatagtgccacttcactctggcctaggcgacagagtgacatcctgtttcaaaaaaaaagggtgaattttatggtatgtaaattatagttcaataaagctgctaataacgaagttaattaataaataaagatcatctagtgatggtccaagcctctcatttcacagatgtgaaaactgagtccagagagctagagttttttatccaaggtcaaacatctagcaagtagcagaggtagcattgtcttttaattgtttagtatgcatagcttgttcagactataataaactgtggagttatcacagaaacgacatccaaaataattggagtgccagatgggtacagaatgctatcctggatagtaataataaaaaataataacactttgtagtatgttaataacactttgtaacactttgtagtaccacacaggagattacaatttgtatgaagctttcttaaaagcagataatttttgcctttacttccaggaaactaaggccaaatgttcagtcatgttaactacattagcccttgtacttagcataattgcttcctcccagtcttcatggctttggttttcattctaataacctatttgtagatctgtcttttattataaacaacctgaaatgcatttagacaagaagcagggtcaaaataaagaaacataaaactgggtaaagaagtgtttttcattatgaaggaaatgagatttccagaggtgagaattgtgctccccttccagttcccaaaattgcaactccagttggcttcactgtgatccttccagtctaggaaatagtgtgatataatggaaaaagcatggacaaagctggctttgaattcaatctatattatttattagctctgagttcttgggcaatcacttaaacactctgagtctgttgggactatgatgaagattaagataaggtatgatgagggcctggcacattataagtgctctataactgtgtgttttttcctctctccatcagagccaaacaatagtagaggctttagtatacattagtcatgggaggtgtcaaagatcagcctgtctcagggagatttgcctgagcatccagaaaggctcttggtactacattgcaaggaaagaggctacctagaaagccctggtggcagtggtctggcattttagacactgttttataggcattggaataattttcctcaccaccaaaacccactccttcaacctcattttgtacttgggaaaccccaactaagcagttactcctagaaaccactgggatttgttttagggttgtgtctttttagatatcattttctggtttttgtggtaaaatacttaagtgctttagagagacgttttgctaagtactaaagacattttcatcatttgagacaccaatactagacagagagttaggagacctgaattctggccccacttctgatactgacatgctatgtgaccttagactgtctttttacctctctaggcttcactttcttcatcagtaaaataatatttaacctttatagagcaattgctatgtgccaggtactattctaagtgctttatgtaagtattacatatttatatgctaatttaacccttgcaacaatactattatcttcattttaaatataaagaaagcatccagaaagcttaagcaacttgcccagagctggaaatacgaagccaaacagtctgtgacccaagtttgtgctctttacccatgtactatagtgcttcaataaaatgagctgagtggatatactagcatttcctaaactatgttcctgatgaacactagtcccacaagataatttgttttaaaaaaatgattctaaggtaaaatatattaacaccacaaacactgtggagattcatagtgaacgttcacctattaaaggctccgagaagccctgcaataaacctgcttatgtttgtttcacccagtgttcccctatgctgaccacagaactgtgtgtgtgcatgtgtgtacatgcctattaacatctgtggaactaggattcatagaacatgccttaagaaatgctggtatcaatctggaaggttccttctaactcttgagtgctttcagcatttaaaaatgatagatgtggggactgcaagatgcaggattcctttccaagtctgaaatttgctttagttggaggcacatggagaagtagggtgtggagaggcataagttcaaggctagtctggattgtatttttaacacttaaccttcaatgaccttgtacatcttgacacaaaagtattccaccattccccttccttcctcctgttacatattttctcgcttattactttaaagaagagacctaaattagagaggcttgtcataaaagcctgccgtttttaatacatacagggcacagcagttgttttcatgatgaatgctctctgctgttgggggcaatgacacaaggggcaggacttgcttgggacatggatgtgactgatgaatatcattacactggttggtattctagagccaggtgtcacttcttttatttattattgcagtgcatctaacttgttaccaataattgtggcaaatcaggacagtagatggattcagagacctctgaagtacacctgatttcctctcttcctcccttcctagaaagaaaatgagaaaaacaaacagataaacgtggattatggttcacagcttctccaagagcaaagttcttataaatgtcagagtgctctatctacagctcaggagtggagaaataacaaaacaattgggtggcctgcctgggaattaaaatctgtaccgtacctagtggtggtcagcctcttttctctccttttctctcttttttcatctttctctgtctccttctctttactctgcctctcttctcctttttcttctctctcctcctccctcctttcctctctcctcccttcttttttaccttccctcttgcatccctttctctccccttcctttttgtcttttccttctctctccccccaatctctctctctcattctctcttcccctcacccccaaccccacacacatattctgtgagacctcagtttctgccaggtaaaagcactaccggtagtgctttataacactgtatcagaaacagatggggccctggtgcctttgagtagaaagaggggagggtctgagtaactgcaagtctcctagaaggtcctacctgctaataggcacaggattcctgcctttgggagacatactatagaggaagttcagcctggatatcaataattttcccctcccttcaggcttcctcaaagactgttctttaagtgtcacacagcactctttgtacttgcataatgtagccgtttggtaggtagtgccctgggccttagcaggaatttcttctgagtggccagtttttcctcttgttgagcatctcctaccattcaggactgcataaggatctctgggacagtcaggagaaagctaaagatgctttgtttttttcaattcctactactcatcccttgaccatttctttcccctgaagtgtgacttcttttcctgagtgtgagtgagtgaggccctgtgcaattgacactgatgtttttcttttaatctaatcacaatacactttgtctagcaggggcaagcctagtttctttcttttcttttttgagacaaggccttgctctgtcgcctgggctggagtgcagtggcatgaacttggctcactgcagcctcaacttcccaggcttaagcgatccttcccaccacagccttctgagtggctgggaccacaggagcatggccccacacatggctaatttttttagcattttttttttttgtagatatgaggtctcactatgttgcccaggctggtcttgaactcctgggcccaagcaatcctcctacttgggcctcccaaagttctggaattacaggtgaaagccactgtacctggcgctttttgacttttagttggctgaaatgatgacatgctttcaccaaactatttctatcatgtttacatatccttctgcattgagattagcacaatgcctccctgcagcttccccatcaggtaaggaaatggtttatacccatggttctcttgctgtagttctttgcagcttttcccataagtattttccgtggtggtagggggagtgttctacttattctgtgcctgaagattcctgtgagttgtttttcccctctcatccccatgtgggtttttggttttaaagtgccccctgaattctgagagttctttttcatttatcttacactggtccctctggcttttcacttaactgtttaatccttctctggccttgtcccaccttgctccctcctttctatagctggccccttgtagctgacttcacttgcatctgcttctccagccaccctttagccaccttctatattatcaaaagacaaaattacaagaaaatttagttatagatctaattcatgaattggggaacctccattctacaaaatagaatgagcgttcccactgggcattaacagaacagtgtattttgtaaggtgggaaccggaaaacagaatagaataaaaataatcagttaacatgaggttacttcaggttactttttttttttgtcagggtgaaagcagagaagacttccttattaagctgattcaggtagattggagtctcctgttttcaggaaaaactggtccgtttggggatctgtatgtttctttaaagtttcagtttgattatgagacatttaacttgagtgactccctattggtttggtctggcctcttgggaccaagtgcaggagctctgtccaaaacaatggtctctgatgtgattaggatctttgtccccaccaagtctcaagttgaattgtagtccccaatgttgaagacggggcctagtgagaggtaattggatcatggggatggacttctcatgaatggtttagcaccatccttctggtgctgtcctcatgatagtgagtgaattatgagatctggttgtttaaaagtatgtggcacctcaccgcctacccttgctcttgctctgccatgtgagatgcctgctctcccttcaccttccaccatggttataagcttcctgaggcctcccaagaagctgtgcagataccaccaccattcttcctttaaagccttcaaaactgtgagccaattaaaccttttgtctttataaattacccagtcccagatattcctttatagcaatgcaagaacagcctaatacagaaaattgataccgaggagtggggcattactataaagatacctgcaaacctggaagcagctttggaactgggtcatgggcagaggttggaagagtttggagggctcagaggaagacaggaagatgagggaaagtttggaccttcctagagactggttaaatggttgtgaacaaaatgctgatagtgatatggacaatgaagtccaggctgatgaggtctcaggtggaaacaaagaacttactgggaactagagcaatagtcacatgtgttatgccttagcaaagaacttggctggattgtgtccatgccctagggatctgtggaagtttgagcttgagaatgatgatttagtgtatctggcatgaaaaaaattctaatcagcaaagtgttcaagaatggcatggctgcttctaactgcctatgctcagatgcacgagcaatgaaatgtcctaaggttggaacttatatttcagggtataaaaatttggaaaatttgaagcctggctatgtggtagaaaagaaaagcacattttcagaagaagaattcaaatgggttcctgagcaaccacttgytggataaatttgcataactaaaaatgaggcaaatagtgatagccaagacaatgggaaaaagacctcaaaggcatttcagagaccttaatggcagcccctcccatcacagacccagagacttaggaggaagaatagttttgtgggtcaggccgaaggccctgcagccctgggcatccttaagacactggttctcaaatctgggctactctggctccagccttggcacaaaggggcccagatatagcttggattctagctccaaagggttcaagccataagccttggtggcttccacatggtgttaagcttgcaggggcacagattgcaaaagaggaagcttgggggcctctgcctatatttcagaggatgtatgaaaatgcctgggtacccaggcagaagcctgctacaggggcagagccctcacagagaacctctactagggcagtatagaggagaaatgtagggttggagcctacacacagagtctccaccagggcactacctagtggagcagtgagaaggaggccaccaccctctagaccacagaatgggagatccactggtagtttgcaccctgcacctgaaaaacctggaggcattcacctacaacctgtgagagcagctgcaggttctgaacaatgcaaaaccacaggggcagagatgcagaaggccttcagagtccacccctcacagcagtgtgccctggatgtgggacatggagtcaaaggatattatttacttaggagttttaagttttaatgactgctctgctgggttttgtacttgcatggggcctataactcctttcttttggctgatttttcccttttggaatggaaatgtttacccaatgcttataaccccattgtatcttggaagtagctaacttgtttttgattttacaggctagaaagtagaaggaacctaccttgtttcagatgagactttggacttttgagttaatgctgggatgagttaagattttctggggatgattgggaaggcatgattgtattttccaatgtgagtaggacatgagatttgggggaccaggagcagaatgatatggtttggttctgtccctaccaaacctcatgttgaattataatctttggtgttggaggtgggaactggtaggaggtgattggatgatgggggtgcatctctcatgagtggtttagtaccatccttctagtgctgttctcatgatattgtgtgagttctcatgaaatctggtcatttgaaagtgtgtggcttcttccccccattttacttcttctctcgcagtgtgagtgcctgctccctcttcaccttccaccatgattgtgagtttcctgaggcctccctagtagctgagtacatgccaacatcatgcttactgtacagcctgcagaaccatgaaccaaattatataatatataataaattatgtatgtataataatatacataatttctgattttggttttatatatcatatatataatttttggttttggaattctatataattataaattatatcatatatataatactgtctccaataattttgttaaaatatatctgtagctatatctatctatatatctaatctgtatttatatgcctccagcaaggatggctctatgctggaaatgaatgccttcctagcttgtacatgaaaataagacttcttgggattggaaaacagttttaagaatgactttgcaggacagaatcctaggggcaggtgatcaaaagagatcttttttctttgaagaataactgcactgtgttgtagtaaggactcaaatgaaatatgacatgtaaagctcaatacttggtgtatagtaacttctctattttgttattatagttgttgttgttgtttctgtatttaagggtgaagcttggaacctacccctggaaaataagaggatgaatgggatgaatgtgttctcatccttggctgcatactagaatcacctggggaactttttcactcttgagatcatttatgttagaatatctaggggtgggaccaaataatcagtatttcttaaacttctccaattccaatattcagctaagagggagagccattggcctaaatttgttgttgtttttaaaaataattctgtatctcaaaataataagagctatctatgacaaacccacagccaatatcatactgaatgggcaaaaactggaagcattccctttgaaaactggcatgagacagggatgccctctctcaccactcctattcaacatagtgttggaagttctgaccagagcaatcaggcaggagaaggaaagaaagggtattcaattagggaaataggaagtcaaattgtccctgtttgcagatgacatgattgtatatctagaaaaccccatcatatcagcccaaaatctccttaggctgataggcaacttcagcaaagtctcaggatacaaaatcaatgtgcaaaaaccacaagcattcttatacaccaataacagacaaatagagagccaaatcatgagtgaactcccattcacaattgcttcaaagagaataaaatacctaggaatccaacttacaagggacgtgaaggacctcttcaaggagaactacaagccactgctcaacgaaataaaagaggatacaaacaaatggaagaacattccatgctcacgggcaggaggaatcaatatcgtgaaaatggctatactgcccaaggtaatttatagattcaatgccatccccatcaatctaccaatgactttcttcacagaattggaaaaactactgtaaagttcatatggaaccaaaaaagagcccacattgccaagtcaatcctaaaccaaaagaacaaagctggaggcatcacactacctgacttcaaactatactacaaggctacaataaccaaaacagcatggtactgctaccaaaacagagatatagaccaatggaacagaacagagccctcagaactaatgccgcatatctacaaccatctgatctttgacaaacctgacaaaaacaagaaatggggaaacaattccctatttaataaatagtgcttggaaaactggctagccatatgtagaaagctgaaactggatcccttccttacaccttatacaaaaattaattcaagatggattaaagacttaaatgttagacctaaaaccataaaaaccctagaagaaaacctaggcaataccattcaggacataggcatgggcaaggacttcatgtctaaaacaccaaaagcagtggcaacaaagccaaaattgacaaatgagatctaattgaactaaagagcttctgcacagcaaaagaaactaccatcagagagaacaggcaacctacagaatgggagaaaatttttgcaatctacccatctgacaaaaggctaatatccagaatctacaatgaactccaacaaatttacaagaaaaaaraaaaaaaaacaaccccatcgaaaagtaggcgaaggatatgcacagacacttctcaaaaaaagacatttatgcagccaaaagacacatgaaaaaatgctcatcatcactggccatcagagaaatgcacattgttttaaaccacaatgagataccacctcataccagttagaatggtgatcattaaaaagtaaggaaacaacaggtgctggagaggatgtggagaaataggaacacttttacactgttggtgggactgtaaactaattcaaccattgtggaattcagtgtggcgattcctcagggatctagaactagaaatgccatttgacccagccatcccattactgggtatatgcccaaaggattataagtcatgctgctataaagacacatgtgcacatatgtttattgcggcactattcacaatagcaaagacttggaaccaagccaaatgtccaacaatgatagacttgattaagaaaatgtggcacatatacaccatggaatactacgcagccctaaaaaatgatgagttcatgtcctttgtagggtcatggatgaagctggaaaccatcattctcagcaaactatcacaaggacaaaaaaccaaacaccgcatgttgtcactgataggtgggaattgaacaatgagaacacatggacacagcaaggggaacatcacaaaccagggcctgttgtagggtggaaggaggggggagggatagcattaggagatatacctaatgttaaatgatgagttactgggtgtagcacaccaacatggcacatgtatacatatgtaactaacctgcacattgtgcacatgtaccctaaaacttaaagtataatatgaaaaaataattccagatcaatggatttttccatgtccttaatttttctcaaataaaaattttatttasatgaagtttggattaattcagtggttctcaacaatggctacacaatggaatcacccatggagcttaaaatatttaaatgcctcacctcaggccaattaagttaacctttgagggtggagcccgaatatgttttgttaaatctcccctggcatatagcccaggtagtaccactggtttaactgaaagaaggtttgtgttgtgaggctaagtcactgcagagtttaattgctacagccataacataattatttaatggaaatctgaaacgtgtgagcatttctgggtaacactattctggaataatcatctcttgtggtttacaaagtgaagtcagacacatattcatttggtgtttgtaataacctcagtggcaggcatagttgggaaactggcacagtgcagtgaagtcagttccctggtttaactgaaaggaggtttgtgtttgtgaggctaagccactgatgttatctgtaggttttttgtagatgttatttatcaagctgaggaaatgcccctctgttcctagtttgctgagaggtttttatcattawtggggattggattttgtcaaatgcttttcttcatctagtggtatgacactgatttttttttcctttttagcttgttgatgtaatggattacattaattgattgttaaatgatgaaccaacattacatacctggaataaaacccacttggttgtagtgtataattatttttatacattgttggattcaatttactaatttttatggtatgaattgtgtcccccaaaaagttcatatgttgaagtcctaacctcagaatatgactttttttgagatggggactttacaaaggtaatcaagttaaaatgatgtcattagggtgagccctaacccaatgtgactgggttataaggagaaatttggacacaggcatgcatattgggtagctgatgtgaaaagacagagggagaagatgtctataagcctagaggagaggactgggttagatccttccctcacatctttgagaaggaatcggttctgctgacaccttgattttggttgtctgaacttcagaactgtgaggtaataaatttctgttgcttaagctgcccagtttctggtactttgttatggcagccctagcaaactaatacaccaatattttgttgaggatatttgcatctatgttcatgaaaaatattagtctgtacttttcctttctagtaatgtattttctggttttggaattagggtaatgctagccttatagaatgagttaggaagtattctgtctgcttccattttgaagagatggtagataattgctataatttttttgttaattgtttggtggaattcaccagtgaaaccatctggacctaaacctttctgttttagaagattgctaattttggattttgtttctctaatagatatggcccaatcagatgatctgtttctccttgtatgagttttggtagactgtgtcttttgatgtattggtccatttcacctagattatcaaatttgtggacatacagttattcataatattgtttcattatccttttaatgtacatgggatcagtagtgatggcccctctttcatttctggtgttatttgtgtcttcactctctttcttaggtagcctggctagcatcttatcaatttcttgatcttttcaaagagccagctttgggttttgttgattttctctattgatttcctgttatcaatttcattgatttctactctataatatttcagaagtttactttggattaaatttgctcttgtattttttagttttctaaggtaaaagcttagattattgaccttagatttttctttgttctaatatatgcattcaatgctatagatgttcttctaagcactgcttttgctatatccttcaaattttaagaggtattttcttttagtttgaaatgttttaaaaacatttttcttgcaacttgtttgatccatgtgctatttagaactgtgttgttacattcaagtgtcaggctggtcacagtggctcatgcctgagaccctagcattttgggaggccaaggcaggaggatcgtttgaggcggggagtttgagaccagcctgggaaacatagtaagaacttttctctacaaaaagttaaaaaattatgttggcatggtgatttatgcctgtaatcccagctacttgggaggttgagatgggagaatcactggagtccaggaggttgaggctgcaatgagccatgatcatattaaaaaatatgttcttagagaactgacccctctatttttatgtatttcttcttgttttagtctgttcaggctgctataacaaaaatactatagatttagtgtattagttttttcttgcattgctgtaaggaactacctgaaactgcataatttatgaagaaaagaagtttaattgactcacagatccacaggctgtacaagaaacatggctgggaaggactcaggaaatttacagtcatggcagaaggtgaaggggaagcaagcacatcttcacatggcagagtaagagagagacagagcaaaaggggaagtgctacacacttttaaacaatgagatctcgtgataattcactgtcatgagaacagcaagggggaagtctgccccatgatccaattaccctcaccaagcccttcttcaaacattggggattacagttcgacatgatatttgggtggggacatagagccagaccatatcattccaccctggcccgtcccaaatcttatgtccttctcacatttcaaaacagtcatgcctttttaacagttccccagagtcttaactcattctagcattaattcaaaagttcaagtccaaagtctcatctgagacaagacacatcccttgtgcttatgagcctgtaaaataaaaaacaagttagttacttccagatacaatagaggtacaggcattgggtaaatattcccattccaaaggggatatattggccaaaacaaagaggcaccatgcaagtttgaaacccagcagcgtagtcattaaatattaaagctccaaaataatctcctttgactgtatgtctcacatccaggccacagtgatgcaaggggtgggctcagaagaccttgggcattttgccttttggctctgcagggtacagccctcttggctgctttcacagactggtgtagagtgcttgctgtgggtggatcttttccaggtgcacagtgcaagctgtgggtggatctaccattctggggtctggaggatggtggccctcttctcacagctccactaggcagtgccccagtggaaactctttgtgagggctccaatcccacatttcccttccacactaccctagtagaggttcttcatgaaggctctagctctgtagcagacttctgcctggacatccaggcatctccctacatcctctgaaatctaggtggaggctcctaggcctcaactcttgccctttgagcacctgcaggcttaacaccatgtggaagctgccaaggcttgtagcttgcactctctggagcagcatcctgagacgtatctggggttcttttagccatggctggagctggagtggctgggacacagcagtgtcccgaggctgtgtatggcagcagggccctgggcccagaccacaaaaccttgattcactcctgggcctccgggcctgtgatgggaggggctgctgtgaaggtctctgaaatgcctttgaggtattttctccattgttttggctattaacatctggctcttccttacttatgcaaatttctgcatccagtttgaattcctcccctgaaaatgggttttctcttctaccacatgaccaggctgcaagttttctaaacttttatgctgtgcttctcttttaaatataagttagagtttcagattatctctttgctcacatatatgagcgtatgctgttagaggcagccagggcacatcttgaacactttgctgcttagaaatttattccgccacataccctcaatcatcactctcaagttcagagttccacagatccctagagcaggggcacaatgccactaatctctttgctaaagcatagcaagagtgacttttactccagttcccaataggttcctcatctccatctgagaccacctcagcctggactttattgtccatatcactatcaacattttggtcacgaccattcaacaactctaggaagttccaaacttttatcttcctgtcttcttgtgagccatccaaacttttccacccaaagcctattacccagtttcaaagctgcttccacattttcaggtatctttttagcaatgttcttcttttctggtaccaattttctgtattagtctgttcttgcattgctataagaactacctgggactgggtaatttatgaagaaaagaggtttaattgactcacagctctgcaggctgtacaagaagcatggctggagaagcctcaggaaacttacaataatggtggaagcaaaggggaagtaggcacatcttcacatggtggaacaggaaagagtgaaggggaagtgctacacacttttaaacaaccagatcgtgtgagaactcactcactatcatgagaacagcaagggggaagtccaccctcatgatccagtcacctcccaccaggcctgtcctccaccactgaggattacaattcaacatgagatttgggtggggacacagagccaaaccatatcgctcagtgagacaatagaatttattgctcacagttctggaggatgtgaagtccaagataagatgcatgcagatttggtatctggagagggcctacttcctggttcatagacagtggtctttttgctgcctcctcacatggcagaaggggcaaacagctcctttaagcctctttcataagagcactaatcccatttatgagcagagaaccctcatgagctaatcaccacctaaataccccacctgttaatactattgcattggcaggggttagatttcaacatatgaatttttgagggacaccagcattcagaccattccacctctcttcattcctgataactttccttgctctgaagtcttttatgtcttatattaatatatgtacttcaacttattttgattagtgtaagcatggtatatctttctccrtccctttacttttttttttttctattgagacagtctctctctgtcacccagggtggagtgcagtagtgtgctctcagctcactgcagtctctgcctcccaagctcaggcaatcctcccacctcctcagtctcctgagtagcggggactacaggcacccaccagcatgcctggctaagttttgtagagatggggttttgctgtgtttcccaggctggtctcaaactcctgggctcaaatgattctcctgccttggcctcccaaaagtgctgggattacaagtgtgagccaccacagctggcccttccttcacttttttttttttttttttttgcttaaaacaatagaaatttattccctcaccattcaggagcccagaagtctgaaattcacatgttggcagggttgccctctctctggaggctttaagggagaatccttccttattgcatcttccaatttctggtagctgtcagcattcctggtggctatatccatcgctccaatctctgcctccatttcacatatccttctctgtgtgccgtctcctctctgtctgttataaggacacttatcactggatttgcagcccaccttggcagtcctggatgatttcatcttagatctttaacttacttatatctgcaaagaccccttttccaaatagggtaacattcacagggtccaggtattagaaagaagacctgtctttcaggaggctgccattcaacctactataggtgttcagcaacctttttcacttctctttaactacttttattccactcttggctgagtacaatccttattctgtttcctaaatactgatggtacttccttgcctgatttgtgagcactaactctgttagtcctttaggataaagagcgtgcttagacatctttaattctataacatttgacacagtgcctggcatatagtagattctcaatgaatgtttgttaaatggatggttgtcgggagggatcatgccttgtttatttcattttcccttaaaatgcctaactccatagtctgaaaatagtagatactacagaatcttgaattaaagaaagaatacctttgaatattcagttctaggtgtctcccaggggaatctttctgaaacttggacctctggttgccctagtgctctgctcatgcacctgttttggcatttaccacaggatgtcttttgttatgttgcattgagttgggttcatgtttgcattcttcaacaaattataaactcctgggagtttataatttataatgtctcatacattctacttttatttcccatgggatggtttagcacagaatctggtacatagtaggcattcaaaaaagaattactgaattaaatctagctttagttgtttgtatttttgctgttgtctggctctgtggtagagtgaacatcaagatatctggctgaaagaaaacttcctgagtccatttggctttttttctttgagcccagtgctgtaccatcttactacaagatcagtattcttcagatacagttactttggcaggaagttcccattattactgccttgtctcttctaatctgtccctgcccaaagagaatgtggtgtgcttagattggggtatcttggcatcttcccctagcctccatgctttgactacatttttgttacctttcctcttttagagggtgggccataggggtgggaggttttttcagttcccttcctctccccaaccacacacggttaataagtctgtggcagtatagtataatggtgtattagttcattctcacactgctataaagaaataactgaagattgggtagtttctaaagaaaagaggtttaattgactcatagttctgcaagctgtatgagtagtatggctgaagaggcctcaggaaattttcagtcatggcagaaggtgaaggggaagcaggtttattttcaaatggctggagcaggagagagggagagagagggatgtgctacacacttttaaacaaccagatctcatgagaactcactatcatgagaacagccagggggaaatctgccctcgtgatctaatcacctcccactgggcccctcctttaacattggggattacaattcaacataggatttgggaaaggacacaaatccaaaccatatcaaatggttaagagtttgggttcttgcttctcactgcctgcctttacctcaccacttaaccacccatgtggtcttcgataagttaatttacctctctgagacccaatttccacatatatgaaatggaattaacaatatcacctatcttaaatagttattatgaggattaaatgagataacatgtagagtatagcacagtgtttatcatctctctttgttcccacttttggcttgracatacttcctagattggtgttattggggtctgtggattgattggcccagccctgtcagagttatttgtctgacaatgaagtactcttttcctttaagtgcatacatatgaattttaatttgtcattaaaaaatattacagaaattgcactcttggccatttatcccagagaaatgaaaacctattttcatgcagaaacttgtgtactatgttcatagcagctttattcataatagccccaaactggaaactacccatatgtcccttcagtgagtaaatggttagataacttatgatatatccatacagttgcaatactgttaatcaatgaaaagaggtaaactattgatataggcaaacacctggatgaatcttaagagaattatgctgggtgaataaggccaatctcaaaaggttacatactgaatggttctgtttatataatattctttaagaattaattgtagagatgaagaacagattagtgtttgccaagggctcgatggagaagggatgggtgtgactctaaagaaatagcagaagggagttttgtggtatgtatgtatgtatcatgattgtgctgatagttacacaaagctatacgtgtgatataattgcatatagccatacacacacacaatttataactgttacctggtatacatgtataactacatatataatgggtataatccaaataagatctgtggattgtaccaatatcattttcctggttttgatgacataatatagttattgtaagatgttaaattttgagagactgggcaaaaggtccttgggaacttcctgtaatttttttttttttgcaatttcctatgaatctataattatttaataataaaaaagtttaaaaaatcttaacattaaggattaccccaaatcctgtcattctaaatttaggctaccgttttcattccattatgttctcatctatgttctcatcaatgtaggtatgtaggtatgcatacctacattgtttaacatatttataatatttttacttaacttttaaatttattatgttaaatatttttatacagttctggaaaaatttttaatggcaccaaatttcagatctagttaatttttgtacacttaatatgtgaaaggcacctacctaggaaccatagtattatttatctacttaatagtccattttaatataatgttcttaaatttacctaatcctttcccctattattggacatacaggtatttctagttttctcctattattggcagaatctcagggaatattctcatgtgtataaatttgattttctgaggataaacttctaagtgtagggatattgggtcaaaagatactggttcatacttatatgttcttgacagtttttccatattgctttctaaaagtgatatagcattgcaatcagctatgtataaagatacatttctgaggataaacttctaacagtagggtattgggtcaaaggatactggtttatacttatatgttcttgacagtttttccatattgctttctaaacgtgatatagcattgcaatcagcactgtataagcataccagttttaccacaaccatgctagtatttgatgtttttcaaatttaatacgtataaaatagtagctccatgtcatttaaaattagcatttctgtcattactagtgaaatttaactcatcacatttttattttctcttatgtgaattatctgttcatgttctttggctacttcatctgttgagcttgtaatgcttttcttataaatgtaaataagctatttatactttacaagattaataaggagaacatttttgatactgattgatttgttaattgattgagctagggacttgctgtctcacttaggctggtgtggagtgtcatggtgcaatcgcagcctcaaactcctgagttcaagtgatccttctgattcagcctcccaagtagctgggattacaggcatgcaccaccatgtctggctaattatttttattgttttttgtagagacgagttcttgctatgttgcccaggatagtgttgaactcctgggctcaagcaatcctcccaccttggcttcccaaagtgctgggattacaggtttgatccaccatacctggtctgtcttggatattgaggatccctaattagagcacatttagagttacagtcatgcatcactttaccatggggatatgttctgagaagtgcctcactaggcaattttgtcattgtgtgaacaacatagagtgtacttacacaaacctactacacacctaggctatgtggtatatagcctattgctcccaccaccattgtatttgtggtacgttgttgactgaaatgttgttatgtggtgcatgactatataagagaaagtatcaaggcctcagtagataaatgaatatccttttcttaaatgccttcagggaaaaaggtgataccatttttgtgttatcccttttagctatatgtaatttgcctacataatttgtcacactggcagactttgggctaatgactcatggatgtcaacaagagaacatgtgaatgaaaagatcattgggctagggattttatgttcacaagcatctcgcctttcctttttttttttataaatgaaaattttcattttgtaaatgaaaattatgacatctaagggtatgaatatacatgttagaagcaggggttctgaaccactcattcacctatgagttaaagaggccaacatcatacaacaccatttaaatatctaagattatttctcatgtttctgaaaaggaaagatggctttttagtttgttttgttctatttttctaacctcaggtgtattgcattgagttcataatgtgctcctcaattcttggtacttatcatcattggtccatgaaaagctacctcttgtttttatttaattacttagcccatttttttcccattccactcccccatctcaggcaagcattctaatatgattaatgtgatttgtattagaatgcatctttcaaaacatgatagttgttttatacacatgaaattttagtttatatagtgatgccttctgtatatcattctcttacttttttccctgtcatatttatattgctgtatgtacatctaacccattgcttctaatagctgcataatatcccatcacatttgacctgaacaggcctgttcttgcatttcaataaagaaatacctgagactggataatttttttttaaaattatactttaagttctagggtacatgtggacaatgtgcaggtttgttacataggtatacatgtgccatgttggtttgctgcacccatcaactcatcatttacattaggtatttctcctaatgctatcgcttcccctgccccctcctccatgataggcccccatgtgtgatgctcactgcactgtgtccaagtgttctcattgttcaattcccacctgtgagtgagaacatgcagtgtttggttttctgtccttgtgatagtttgctgagaatgatggtttccagcttcatccatgtccctgcaaaggacatgaactcagccgtttttatggctgcatagtattccatggtgtatatgtgccacattttcttaatcccgtctatcattgatggacatctgggttggttccaagcttttgctattgtgaatagtgccgcaataaacacacrtgtgcatgtgtctttatagtagcatgatttataatcctttgggtatatagccagtaatgggattgctgggtcaaatggtatttctagttctagatccttgaggaattgccacactgtcttccacagtggttgaactagtttacactcccatcaacagtgtaaaggcattcctatttctccacatcctctacagcatctgtggtttcctgactttttaatgataaccattctaactggtgtgagatggtatctcattgtggtttaaaacgatttgcatttctttgatgaccagtgatgatgagcaatttttcatgtgtctttagactgcataaatgtcttcttttgagaagtgtctgttcatatccttcaccaactttttgatggggttgtttgactttttcttgtaattttgtttaaattatttgtagattctggatattagccctttgtcagatgggtagattgcaaaaattttctccaattctgtaggttgcctgttcactctgatggtagtttcttttgcattgcagaagctctttagtttaattagattccatttgtatattttggctttcattgccattgcttttggtgatttagtcctgaagtccttgcccatgcctatgtcctgaatggtattgcctaggttttcttctagggtttttatggctttaggtctaacatttaagtctttaatccatcttgaattaatttttgtataaggtgtaaggaagggatccagtttcagctttctacatatggctagccagttttcccagaaccatttattaaatagggaattatttccccatttcttgtttttgtcaggtttgtcaaagatcagatggttctagatgtgtggtgttattcctgaggcctctgttctgttccattagtctgtctctctgttttggtaccagtaccatgctgttttggttactatagccttgaagtatagtttgaagtcaggtagtgtgacccctccagctttgttctttctgcttacgattgtcttggcaatgcgggctcttttttgattccgtatgaactttacagtagttttttttccaattctgtgaagaaagtaattggtatcttgatggggatggcattgaatgtataaattaccttgggcagtatggccattttcacgatattgattcttcctacccatgagcatggaatgttcttccatttgtttgtgtcctcttttattttgttgagcagtagtttgtagttgtcaatgaagaggtccttcacatcccttgtaagtttgattcctaagtattttattctctttgtagcatttatgaatgtgagttcactcatgatttggctctctgtctgttattgatgtataggaatgcttgtgatttttgcacattgattttgtatcctgagaccttgctgaagttgcctatcagcttaatgagattttgggctgagacaatggggttttctagatatacaatcatgtcatctgcaaacagggacaatttgacttcctcttttcctaattgaataccctttatttctttctcttgcctgattgccctggccagaacttccaatactatgttgaataggagtggtgagagagggcatccctgtgttgtgccagttttcaaagggaatgcttccagtttttgcccattcagtatgatattggctgtgggtttgtcataaatagctcttattattttgagatacgttccatcaatacctaatttattgggagtttttagcatgaagggctgttgaattttgtcaaaggccttttctgcatctattgagataatcatgtggtttttgtcgttggttctgtttatgtgatggattaagtttattgatttgcatatgttgaaccagccttgcatcccagggatgaagccaaattgatcatggtggataaggtttttgatgtgctgctgaatacggtttgccagtattttattgaggattttggcatcgatgttcatcagggatattggtctaaaattctctttttttgttgtgtctctgcccggctttgttatcaggatgatgctggcctcataaaatgagttagggaggattccctctttttctattgatttgaatagtttcagaaaggatggtgccagctcctctttttacctctggtagaattcggctatgaatctgtctggtcctggacttttttttggttgataggctattaattattgcctcaatttcagagcttgttattggtctattcagagattcaacttcttcctagtttagtcttgggagggtgtatgtgcccaggaatttttccatttcttctagattttctagtttatttgtgtagaggtgtttatagtattctctgatggtagttagtttctatttctgtgggatcgatggtgatatcacctttatcattttttattgcatctatttgattcttctctcttcttctttattagtcttgctagtggtctatcaattttgttgatcttttcaaaaacccagctcctggattcattgatttttttgaagttttttttgtctctatctccttcggttctgctctgatcttaattatttcttgccttctgctagcttttgaatgtgtttgctcttgcttctctagttcttttaattgtgatgttagggtgtcaaatttagatccgtcctgctttctcttgtgggcatttagtgctgtacatttccctctacacactgctttaaatgtgtcccagagattctgttacattgtgtgtttgttctcattggtttcaaagaacatctttatttctgccttcattttgttatatacccagtagtcattcaggagcaggttgttcagcttccatgtagttgagtggttttgagtgagtttcttaaccctgagttctaatttgattgcactgtggtctgagagacagtttgttgtgatttctgttcttttatattttctgaggagtgctttacttccaactatgtggtcaattttggaataagtgcgatgtagtgctgagaagaatgtatattctgttgatttggggtggatagtgctgtagatgtctgttaggtctgcttggtgccaacctgagttcaagtcctggatatcctttttaaccttctgtctcgttgatctgtctgatagtgacagtagggtgttaaagtctcccatcattattgtgtgcgagtctaagtgtctttgttgttctctaagtacttgctttatgaatctgggtgttcccgtattgggtgcatatatatttaagatagttcttcttgttgaatttatccckttaccattatgtaatggccttctttgtctcttttgatctttgttggtttaaagtctgttttatcagagactaggattgtaacccctgcttttttttgctttccattttcttggtagatcttcctccatccctttattttgagcctatgtgtgtctctgcatgtgagatggctctcctgaatacagcacactgatgggtcttggactctatccaatttgccagtctgtgtcttttaattggggtgtttagcccatttacatttaaggttaatattgttatgtgtgaatttgatcctgtcattatgatgttagctggtcattttgcttggtagttgatgcagtttcttcctagcctcgatgatctttacaatttagcctgtttttgcagtggctggtaatggttgttcctttccatgtttagtgcttccttcaggagcccttgtaaggcaagcctggtggtgacaaaatctctcaacatttgcttgtctgtaaaggattttatttctccttcacttatgaagcttagtttggctggacatgaaattctgggttgaaaattcttttctttaagaatgttgaatattgccccctactctcttctggcttgtagaatttctgctgagagatccgctgttagtctggtgggcttccctttgtgtgtaacatgacctttctctctggctgcccttaacattttttccttcatgtagagcttggtgaatctgacaattatgtgtcttggtggtgttcttctcgaggagtatctttgttgtgttctctgtgtttcctgaatttgaatgttggcctcccttgctaggttggggactttcccttggatagtatcctgaaaagtgttttccaacttggttccattctccccgtcactttcaggcacaccaatcaaatgtagatttggtcttttcacataatcccatatttcttggaggctttttctttctttttactcttttgtctctaaacttctcttctcactttatttcatcaatttggttttcagtcactgataccctttcttccacttgatcgaatcggctattgaagcttgtgcatgcatcatgaagttctcgtgccatggttttcagctccatcgggtcatttaaggtcttctctacactgtttattctagttagccattcgtctaatcttttttcaaggtttttagctttcttgcgatgggttcgaacatccttctttagctcgtagaagtttattactgaccttctgatgcctacttctgtcagcttgtgaaagccattcttcatctagctttgttccgttgctggtgaggagctgcagtcctttggaggagaagaggcgctctggtttttagaatttttagcttttctgctctggtttctccccatctttgtggttttatctacctttggtctttgatgctggttacgtacagatgggattttggtgtggacgtcctttttgttgatgatgatgctattcctttctgtttgttacttttccttctaatagtcaggtccctcagctgcaggtctgttggagtttgctggcggtccactccagaccctgtttgcctgggtatcaccagtggaggctgcagaacagcaaatattgcagagcagcaaatattgctgcctgatccttcttctgtaagcttcattccagaggggcacccgcctgtatgaggtatcattcggcccctactgggaggtgtctcccagttaggctacacagtggtcaggaacccacttgaagatgcattccgtcctttctcagagctcaaacaccatgctgggagaaccactgctctcttcagagctgtcagacagggacatttaagtctgcagcagtttctgctgccttttgttcagctatgccctgccccagagttgggctctagagaggcagcaggccttgcagagttgcagtgggctctgcccagttcgagcttcctggcagctttgtttacctactcaagcctcagcaatggtggacacccctccccctgccaggctgctgccttgcaggtcaatctcagactgctgtgctagcagtgagcaaggctccgtgggcgtgggacccactgagctaggcacgggatataatctcctggtgtgccatttgcttatactgttggaaaagcacagtatttgggagggagtgtcccgattttccaggtacagtccgtcacgtcttcccttggctaggaaatggaaatctcccaccccttgcacttcctggtttaggcgatgccccaccctgcttcagcttgccctccatggcctgcacccactgtccaaccagtcccaattagatgaaccaggtacctcagttggaaatgcagaaatcactatcttttgcgtcggtcacgctgggagctgcagactgtagctgttcctattcggccatattagaaaagaagagactgagtaatttttaaagaaaagaagtttaattggctcacagttctgcagtctgagcagaaaccataacacaggcatctgcctctgggtaggcctcagacagcttacaatcatggcataaattgtaggtgagaagcaggcatctcacatgtttggagcaggaccaagagagtgcaaagtgccacacacctttagacaaccagatctcacaagaattcagtcattatcatgaggacagcatgaaaggatggggctaaatcattcatgaggaattcacccccatgatccagtcacttcccaccaggccccaccaccaacattgggcattatatttcaacatgagatttgggtggggacaagtatccaaactgtattacctgactattctcaaagtgatggacatttgctgagtcataggaaatacatttttttttattaagtagtgccagattgcccttccgaatggtccccacgtatctgtaaccccctggttgtagtggatgaggattcctatatgccttgaaccctaccaacacttggcatcttctagctgtctagtttttgcaaatcttgtagtcttaaagcaatatcttattttaatttaactttattttattcccaatgttttgagcttctcttcatggttatatgcttctgggattgcctcttatgcaacttgcctgttcttatgcttcatatatttttcttttggggcctctttttcttattgagttgcaaaagtcccttgtatattctagataataattccttgttagttttaggagtggcacatatgttctcctattctcttattaatttttaaaaagtctttccctgttcatagatccaaggtactctgcattttttcagtaactttatattttatgtaagagttacatatagatatatctagagtctagttttgtatatggtgttaggtaaggatatggccttagcttactgcatgtactaatactgtttccccaacacatctagcaaatactcttttgtctgtcaatttgtagtgccatgtttatgctctattagactcccattttttacatcaatctgattttgagctctggtccttttccattggtttatttttctgtttttttttttttttttttttttttttttttctgcaatagtactagaggttttttgttgttgttgttgttgatttttttcccccacagctttgagtatgttttaatacctagtagagcaaatctttcccctttacttttttttgaggttgatttagcaatttgtggggttttgttcttctatgtaaatttagaataagtttattagaaaatccactttgaaatatgattgaaattgtattgaatttatagattgagggataattgccatctttattatattaagttggcctatccaagagcatagacattatttctttagattatattctatatccttcattagacttttaaagttttctctgtaaaggtcttgtgtatacttggttaattaagctaatttctagattctatataatttttgttgccatcgtgaatgttatttttttaattatgttttttaagtgatcgttgctgatataggaaaatgttattgacttttgtggttgatattatatttggtatccttgctgaactcttttatattagttctgagagtttggttgattcttttctttcatttttttctagttgaatgattaccttctgtaagtggtgccaaatatagaacttcccttctgatccttgcatttcttaattccacgccccctttcctcatagtatttagccaggatatttaaaacaatagcagtaatagttagagtcaagtttgtcgtgttcatgattttaaattaatgcagttagtttcttcattattcataacatactttgtaggttttttgtatataatttttaccaagttaagatcgtttacttttattccttgtttactaaggattatcattataaatagaattaagctatattaaatacttctttttctgtatcaattgagataaagcatatgatttttctttttagtcttggtgatgtattacgttgacattttctgatgttgaactccccatgctttcttgtgataaactgcacttgatcaaaatgtattttttaaaatatactgttgattcattaacattatttagcattttttgtgtctacatttcataaatgaagtagccctaaactttcttactttataattgtctttatttgattttagaatcaagattaaattgccctcataaaatggactgagtaactttattctttttccagtgactggaatcaattggataaggtagtaattaattatattttggaagtttagtagaataaacctataacatcatctgggcctgagggttttgttagggaaaatctttgactaccattgccattttatttttttcttgatatttaaaaacagttcttataagttttccaatttattagcatattgttgttcataatagtgatagttttaattttttatattttccctttttcattctgtattttgtttatttgcatcttttctcttttttagcaaagatctatcctattaaccttttgaaataattaaattctggtttgttaatcttttctgttcaggctatgtgtgtgtatctgtggaggaggattctctggttttaaatttctgtgctttatcatcttatttctctgttcttttgcttatttccattacattgactgttcaactagtatgttgttaacctttctcatttcatggtaaacttacttactactatacatttacttcttagttcttgtttaactctgtccttcaaatttttatttgttgtgtttttattatcgttcacttttaaatatttcttagtttcctttcctttttctttttaacccaaggttaatttagtaataagctattgtgttttcaaacatacgctacattttggctattattttgttattaatttctagtgctattgcattgtggttggagaacctaaactgtatgatattgaacgtttggaatttattgatgtttcatttacagctgtaatcatggtctctttttgggaatttttttttgttgtcttgaatgttctatttgttggatatagagtcctactctgtatataatagcttgagtttttcagttgtaatgtgtaagtgttccgtatcttcatttgatttttttttttttttttggtctgcttgacctattagttcctaagaagagtattaaaatatccatgtgcacttgttccttttctctttgcagttctgctagttgcttgatatagttcgagactgtattatacaatatgtttatatttatgatggctatatcttcttgtcctgttgatttttgtcacgtaaattctatttagtcagatattgagactgctacctcagctttattttggttcatatttgcctggcatatcttattattttcagtttgtgactctaaagtatatctcttctagtctgaatattgttgaatcttttgttttagtctgtgtctttcttttaattggtaagtttaattcttgtacatttattgcaattacttctatattgggatttaattctggcatttctttttatgtgttttatttatggtactccttttttttgttttgtttttctctttttctgttttttttttttttctattcttgccctgtaacgtaagatctatcttcatgttatttacccttactgatttttttacacatacaataactgcaccttcttccaacaagataagtacctcagcaggctctcaggttctatatattttccagttatacgtacctcatcttgtaaactttgtctagaatttttatcttttctagaatacgggttttcctctcactttcatagtttttcccgcactgatttcagaaaaggtaatacagatcatagtagtttgccaccttggcaggaactggaaagactcragttttgtagcaaattaacagcrtttatcttgctttgaatggccccacttcaatcataggtggtgagttggtaacttattcagtattttttcctccaataacaggtagaaaacgtgaaattggtggatcgttatgtgagtaagaaaccagctaatgggattctttatcttactgcaacccacctgatctatgtggaggcttcaggtgcagcccggaaagaaacatgggtatgttcatgagaagaagtatcaaagagtcttaaagagttgtgcatacatgctctctatatggtagtttcttgaaatttcaagtgtaatttttaaattgctgtaaaaccttttcttcagaggacctattctaataatctttttatggtctgaattgtattactcctcttttttcaagttattggctctggtcatcatagtcattttattctacatgggaatattcctggggtttagctaaattatttttaggtagaatagtttctgctaattttctgaactatgtttgtaagcatcttgaagtaatttaaagccttgctgcccataaaatatagttcaagaaccagcagcatctgtagcgtatgggaacttgataaaaatgcaaaatctcaagcctaagattttgaatttctaaaaagggctcaggttatgctgatgctaaggcctcatggactttaccttgggcaacactaatttagaccatctctctgtcctaagacaggattttacctgggtatatatatatgtgtgtgtgtgtgtgtgtgtgtgtgtgtgtgtgtgcatgcacgggcatgtgtatgtgtttctttttatacctgtaagtaatgttttctaattaattcagcaccccaacattactttatgccttacccatcctaaagatcataatttaatcttaacttaatcattagttagatttatgcttagacctctccatttataagaagtacaacatgcttcttttataccrcatagcttagtgattaaagctttagagccagtctgctcaggttgaaatcccagcttcaacatttactacttttgtaaccttgggcaagttgtttaacttttctgtgtctcgcttccttcttctgtaaaatacagataaaataataccttgaattagttttaaaaagtcaagatacaagaattataaagtgaatgtttataagtgcttacaacaatgcctggaacatggtaaatactatcatataagtataaaatgaattgagtatgcacatgaaagaagtatcttaatacttccttttaaaactgaactttccccatgtgagattgtattttgctccttttgctgtgataagaatgtcaaaagaggaatgagaactgggctagactaagctctgatgctaactggctatgtaaccttaggcaagtgattcttactccttgggcttgtttcttcatctgtaaaatgaggtggttagattatataattagtaaggattcttgtaattctaacagtttaggaaccagttctttagtactgtgccgtaagcctatctcctatctacctgcatttatagacagtacagatgtctccagatttgttccttttgggtattatttcaaacccagtggactgtatctggaagggagcacttacacttatttctgcatgtcaaaggaggcttatttacccaattagggaagttcttcccagccttagtctgcctaccttccctggacccttcccagtttcaccacaattgtttgcctgggccctgatctcaattatcagtatcgtactaccaaaacacacatctctcatgttgactggaagatctttgattttcttgaggttgaatatattaattcatattacattttgtgatgcctccagaactgccattgcaggacttgagtgtgacaaaacagttaagatagaacttaattatacctgtgatcccagcagtttgggaggctaaggaagaaggatcgcttgaagccaggagtttgagaccagcttgggcaacaaagcaatacctagtctctacaaaagttaaaaaaattagccaggcatggtagcacacaactgtattcctagcttactcaggaggctgaggcaagatgatctcctttgaacccaggaggttgaggctgcagtgagtcatgattaagccactgcactctagcctaggcaacagagcgagaccctgccttaaaaaaaatagaaaatttatcctaggaatatctgaatcatttccacacttgctccattcttagatggtggatatgattgaaagacttcattgaagagatgacttttccaaagaaattagggactggggcattgaggtgatgggagagcagaaaaggcactattgattggaagaccattccaggcacaggacagggagtctagagaatggaaagagcacatccaggctccatagttgcagaaacataagacagggataggaggagaacatcaaagatcaaaatgcaaaaccatgattatatggctttttgaatcaattaagagagaattatattatttggacacattttgtttcatcagttccctttccatgcatttctttttttgctggcatcagcatgaacagaagtaatcatcctacattctttgctttactgtcactagagtttaaaatgtagaggaatagttcctccctaacatttctagttaaatccttattccagaacttaatcctggacttaagtttagactgctatggttcaaattctgtttgtgccacttcttggctatatgatatctgatgaggaattcacttctcagagctttgtttttttttcattcctgaaataggatgattacacgtcaaatggctcttcttaaatagctaatggtcatggactactttgtttatgataaggcacaatacctgctattaataattatcttaattagtaatttgatataagaaaaaaaattcctgttttcctctgtaacaattattctgattgtgaactctatcacagcatgctaaaagtcatctattctgagctgatctaccaaaattgtcccacaaacttggtaatctcgtatccttaaggagagagaagttttctaacactgcagtctgcttcttgttgctttaccactattatgctttagttctatttgagagaaccccagttgtgtcttacaaagaatggttgtaggctgtagatgtagcctacagatctggtcatgctgttaccattacggagagtcaggaatactgatagtgatagagatattgcacatctgtatgtttacgctggttcttttatgtttttcagattgcactccatcacattgccactgtggagaagttacccatcactagcctgggttgtcccctgaccctccgctgcaagaatttccgggtggcccactttgttttagattctgaccttgtgtgccatgaggtttatatttcactgctcaagctttctcagccaggtagttatgatagtatttttatctaaaaccattttaatatttttccaaaatggcataatggaaagatcagggctatggagtcagaggagggtttggatctgggctgtaccacttattagctccattatatttgggcaagttatataacctctgaactcattttctttacctgtaaaagtaaggagagtaaaagctcttcaaggggattgttttgagccttgaataccttcatgtattagtatatagtagatgtttaatagatattttcttctctctccttccctcctttaaagtatcaacttgtgaatgttttctcagttcaggaaggaaractgctttggaagaaaatttgtttcctgctgtcctgcagactttttgtttggcccacgatttccacccctacttttaattccaactagaagactaaggcagttcatcaaagtcctyattaatgtaggacttaatgcttcctccagcatcaccctttcattccccagcccccacccctaggcaattaaccagcttcctctgattttagtctttgattttaatcatgctcttacattttctctcccatttttccccttttccctcagagtaattcctcaatatttgctgatttttattgataaagttacctgctggatggcctagcattttacaagtctctgataggctccattaatctctggagaagttgttgccatataaattggtcaaatgagttatttgattggatgctgtatctcgtgaagggaggaagcaggactgacagagaaaagagaggaaggggccatttataagtcagaagttgctgttggtctgacaagtacaatgcaaaaacattgttaaagatgtgcaacatgttacaataagcagtactattaggacatgggagcccagttaaaaacttttggtaaggactcttttcttaacatgtgaaaccctgaagcctcagttcagtcaattatccagcattctttttttataggaagccaggcagaaagatcccacttcgtattgataacacaaaaaattaaaacattttttcaaagaacccaaacaatattccagtttttattccttacataaaggcaaacttgcacacaccacagtccttttctggggctgtttgacaaacattcccttaggaaaaggaaatctagcctttatttgcattgtttgatgatttttaggtttcattcatcattttgttttccatgcctrtctctcttctccagcattacctgaagatctttatgctttttcttataatcccaaatcctcaaaagagatgagggaaagtggatggaaactgattgacccaatatcagactttgggcgtatgggaatacccaacagaaactggaccataacagatgccaacagaaactatgaggtaattttgtccttgttgtttgccttttggtgcatttaattaagatggtagaatatcaggaaacaagattttgaaaaaagagagaaatgactcataatctctctctcctttccattcaacattcagccattcaacagacatttattgagtacctacagtgcaataggcactgagtaagagatctcatggcctaaagcatagggtgttatgggagcataggtgcagggcatgaaaatcagcctaaggaagccagaaacaacctgatgctttgcagagtagccttgtgaaggctaatttattttaacattttttatttttaattattatggatatataatagttgtacatatttatagggtacatgtgatatttttatacaggcatacaatatgtaatgatcagatcagggtaattggggtatccatcaccacaagtatttatcatttatttgtgttaggaacattccaattccattttcagttattttattattgttatctgtagtcgtcctgttttgctactgaatactagatcttattccttctatctaactgtatttttgtacccgttgaggatcctctttttatcccccccactccactacccttaccaacctttggtaaccatcattctactctctgtctccatgagttcattttttttttttttttgctcctacaacatgtgaatgagattatgcaatatttgtctttctatgctttgttcatttcacttaatataatgtcccccagttccatccatgttgttgcaaatgacaggattacatttttttgtgactgagttatattctattgtgcatatgtaccacagttttcttttctttctttttgagacaaggcctcactctgttgcccaaggtagagtgtagtggcatgaccatagctcagtgtagcctcaatctcttgggctcaagtggtcctcccatctcagcctcccatgtagctgggaccataagcacccacmcccatgcctggcgaatttgtttcattttttgtagagatgggattcttgaactcctgggctcaagcgatcctccctccttggcctctcaaagtgctgggattataggtgtgaaccaccacccctggccaatagtggctgtactaatttacattcctaccaattgtgtatgaagatttcattttctccatatcctcaccagtatccattattgcctttttgataaaagccattttaacaggtgaaatgatatctcattgtggttttggtttgcatctttctgatgattattgatgttgagcattttttcatatacttgttggtcatttgtgtgtcctcttttgagaaatgtctattcagatactttctccatatttaattggattatttgttttcattctattgagtttcttgggctccttatattttctggttattaatcccttgtcagatgggtaatctgcaaatattttctcctattctgtgggttgtcttttcactttgttggttgtttcctttgccatggagatttttggctcagtgttaacccatttgcctatttttgctttagttggctgcatatgcttttgaggtcttactcgagaagtctttgcccagaccaatatcctaaagtgtttctttgcatatggacatccagttttcccagaaccatttattgaagagacttatttcccccaaatatgtgtccttggtgcctttgttgaaaatgactgaactgtaaatgtctggattatttctcctaatttatgcagggggagaaggaaggaggtcaggaagtgaagccatatcataaagcgcttcgtgaccaaattaaggaatttgaactttatcatgaagacagttgtgagccacaagagtatttacgcttgaaaggaacatatatatatatatttgtgttttagaaggataactgttattagtgtggagaattcgtttgctggagctaagaatgcagaagaatgatatgtgaagttatgagaacctgaactaaggcaatggctgtagatggaaaggagatggttttaaaagatatttaggtggtagaattgaaagcaactggtgacagatcaaatgtggctagaaaagtgaaggaatttaatatgcatcccagctttcctggttttggctttgatgaccaatgagtagtggtgatgttaacaaagataaggaccacaagaagaggggcagatgstgtcttcaattttacacttgacttcaaggtgattaaacagatatcaagtatttgatttcaagcatttgggtttggatctcaagaaagagctctgggccaaatatggacatctgggaatgtgttgaaggtcccaaagaccgttcctcaggttttgtgatttactaggaaaattcataggactcggtgtatagtcatacttatgactgtgatttattaccgtgaaaggatccaaagcaaaaatcagcaaagggaaaaggttcaggggacaaagtcaacaaaaccaggaacaagcttccagagtcctctctcagcagagtgacgtaggacacactgaattcctccagcagaaattgtgacaacacttatgaaatgttgtctgccaggatgctcattagaggcaaagtgctcagggattctattggagcctgcccacataggcacgttctgcttagtgtatgccagaattccagaagtccagaaggaaggcaggtgttcaggataagccacattgtttgtacaaacagttttaagcacaatgcaagtaggcctttctaagggtagtctgatggttaatattgtcaatttgattggattgaagtatgcaaagtattgtttctgggtgtgtctgtgaggctgttactagaggggagattaacctttgagtcagtggactgggagaggcagacccacccttaatctgggtgggcaccattccctcagctgccagtgcagctagaaaaagcaggcagaagaaggtggaatgagcagacttgctgaatcttccagtcttcatctttctcccatgctaaatgcttcctgccctcgaacatcagacttcaagtacttcagcttttggattcttggacttacactagtggtttgccaggggctctygggccttcagccacaaactgaaggctgctctgttggcttccctactttagaggttttgggactcggaatgatccactactggctttcttgctcctcaacttgcagacggcctactgtgggactttaccttttgattgtatgagtcaattctccttaataaactccctttcctatatacatatatcctattagttctgtccctctagagaactctaacacaggtagcaatcaggcctgctaggataatttttctgcagagagagtcattggtgtttaagtgatattcctgaatcgttcatctttaacagtgtttttactatcataataagactgttattgcattgactttctggtaacatagctttgaatgtctactaggtatggggattgatgagctgtgacttcgcagggtcatctgtgaggtggcttgttagggtcatgcttgagaggaataagtagagattgggggtgaaatctgtccacctcaaatgtgtgtctgagtctcccaaagaaggtctgaaatactcttgttggtctttttgatgtgtataaccttctaagctgaatggggagctccatttatttttctttgtatgactgtcttctccaaagtttaagtccaggtaagggggtgggtagaaaacattttcaaatggtctgcattctggggacattgactttaatgagttacatagagcattcttaatcttatctacctttaactttttttatttttgcctgttcagtttatatttgtttcatctgttgttaaatgtttgggggtgttctttagttaggggagtgattagaattaattttgcaatgtcaggtctgtggtgttataatattttgtcactgtctctttggaaatatgtattttggtaaccactaaaagctgataaacttgagaaaatatgtcagtcttttcatagagtaagtcacacctaaaatgtcaacacctccaacccccagactagtggtttaaaggccgtccagatatgaacactaggaacctagtatgcagtttatatatatacatttttcacttgctagcaacaggctggaattagcaatcactcaagcattagctagctggtatttaatcatctattcctcagaaatagaaatgaaaatatccttggtataaaagcttttccaagtgtgctattattttctagaaaggaagggattgagacatataagaacaaaatgtacttttagaattagaaaaacaaaaatcatagacagaaacacacataaaaccccatgttgaaattcctacgtgtgcatatcagagcaaaaacaataactgtaaacaagtgaattaatatgaacggacacaaatatgaagcagacaggtagaggaggaggaaatatgatgtrctctttcataaactacatactaggttcctagtattcatatctggacggcctttaaaacactagtcttggggtggaggtgttgacattttaggtgtgacttactctatgaaaagactgacatattttctcaagtttatcagcttttagtggttaccaaaataygtatttccaaagagacagttatatataaatgtataaatatatatwtatatatattgtgcttattttcttttagatatgcagcacctaccctcctgaaatagtggttcctaaatctgttaccttgggaacggtggttggaagttcaaagttcagaagtaaagaacgtgtccctgtgctctcctacctctacaaagagaacaatgtaagttaagcagatttctctaatgataattaaacatggctctggaagacctgttttaagtttcatgctgccacttagtagctgtgtgacctcargcaagttacttaacttctctggactttcatacttctgaaggtttttgagaggatctcagtaggaataatatgtacaatgtactttgtaaattgtaaaatgttatgcagatgttaagtgtcattttagtatgtttatttctttttctttttttccttttctgtgggatccagctttgtggaaagttgtgaaatgacagaaaattagttgtatacaggattttttgggggctgtggcctcccagtagaatacagatatccttgatactttcttagtgcttttcatataatttcaggtagtagtaagaaagcacttgactcctctgtgtttcaatccccttacttatgtaggaagtgataatatttatcacctcttgtaatcactctgagatctggggttagacaaataggcaagttgtcaggtgggcaaccgttcaagtgctaaggagtatagtaatgcaattgggtgtcatattattgaagtgagttgaccccttmaaagccacatcaaagtgtaacgaatttcatgaactaatcattaccagacattcatgttaaatagttacgttgtttttgtgttaaagtggcttgaaacaaaccacccttctgatttggcattaacttctgaaactagtgaaccctgttttcttaagacgctgtagatctttgctctatcttgaattctgctgcctccgcaagcttatggtttatgtgggcaatattactgggactgtaaaaagtgaggcggtttcagaaaaatagcccattatatatcgagaatagaatttcactaaggaaatactcatgatgtgattttttttgtagtctgatttaccaagactgggttggaaattagagccacatgcccagggtaggcaggaggttaagcccaatgtcagtggagaatgactttagartcacatttctctttgctttggacactatcttaagttggctcatcctctccctctactcwtggaacctggcaagggtcaagaaagatttttgaccatttrtgaatataatcactcaactgacacaccttttccttacaggctgccatttgccgctgtagccagcctctctctggattttacactcgctgtgtagatgatgagctcttgttggaggccattagccaaacaaacccagggagccagtttatgtatgttgtagacacaagaccaaaggtatctatttctcagtgatttctttgatatttctgcctcttgcattctacctcctcatatattgagacatgcagtgttattgggaaagttaggtttgtgtatgtgtgtttattatgtcagacattgtgtaaaatcatttcaggaagccatttggggctccttttataaggttgccactgtcaagtgaggttatgagagggtatttcaagcaacctgtctttcccacctcagtgtgacgtcctgcatagaaggctccttaacatccctcatcttttttaccaagtctgttccttaaccagaattttcagtattcccattctgtggtctagatttactgttagagaaagagcttcaacttagacattggaaacttactacaaccaacatgttttttttttttctataaatgtgttaggccacagtaatttaataatactttggttctcccaaagcaccagggttcacaaattttactgctatgcaattaacaaaaaatctttagctcatatggcagtaattcttttttagcatctagtactgttagctgattaaatttttgccggtttagtacagtgcagtttaaatcttcgtcccagagaattaaaaagaccaagttcataaatttgccgtggattttggcagtggacatggatagacctagtcaaatcctttgatctttccaataatctaatgctgcatgatttgttgcaatgtgttttctcaggctttgtctctttcaaatatgaacattgctgaacagagtgtcctcatgttaacctaagtatcagcttaaactcctctctgcattaattccttaaccttcaaagttttgtgtggctctatatgggctgtagaagaactcattgtgtcccacaaaagaagtaaaggatagattccatattcttaaatgttgtcctttttacaaacagccccagaaagaaataattttgcttataatttggtatgtaaagtgtgactgactaagaggtttcattgctgattctagtcattactaaattggtgattttcatctaagcctaagccagatggttgtgacttaagagttgagcagttggatgtacatgaaaccagatagttgccttagacagctttctgccccatctttgtgatccctcagtggctattctccagagctacctaggactgactgagctcaggagagaaaataatttccctttctgttcaggcccatccttcagtttctcagaagcttgctgtcttgtttcagccataactgcatctgaaattctgcaattgaaaagagtttaatcgagtctgtatctttaaaaattaaataatcttaaaatagtaaagagaaatacaccaagcttttgaagaaacaaaagagttggtgccttttgttcaaatctaacaccaaaaagcccccttttttttaacaggttccattttcctctctccaatttgagcaaattaagacaggcctagaaatatctggcattccctctcttctggatggctagatccgtacttttagtaggaactatattatactgacaaaattttgttctaggagtcagtcaaacctgaggtcaaatcctgctttcagcctttatccatatcatcttgggcaaattggttcatctctctgagcctgttttcttatggggataatatagcacccattttgagaggctgtaatgaggattaagtgagataatgtacataaaggatttagcacagtgtcaggcatataataggagctcaataaatattacattacaataaatattacatctgacattctgcaattggaaagagtttaatcgcgtctgtatctttaaagattaaataatcttaaaatagtaaagagaactacaccaagcttttgaagaaacaaaagggttggtgcattttgttcaaatccaacaccaaaaagccccttttaacaggttccatttttgtctctccattttcctctcagtttgccacctgaacattaaataggtatctgttactcagatctgccagacatatttttaaagagtgaatactggtatgaggtagctagttatctgcattaggtggcctacccaggcctgggtagtgactactgtaattattattattattattatttttgctgaagcatcactcataacaaacatccttgctactaggtgactattgcttatgcttccacgggtgttcctttgacatttgtcattaatttaatgaaagctcagtaacactatcaatgtgataaaagatcaaaattaccatcacatttccccttttaacagatgtcttgcattgtaaacagaatatgtttagcacactgacttttttccctctgcatgttctaacttgaatagtttgtgtcttgaggtttttgtattcttttaatacaaaaattataccctgtccacatacatgctcctcctgccttctgaaatgcacaatattgggagatgagaaaataggcccagaaaacagaaaatcacttaattagtaagatggtcattatcgtagacagtatcttggctgccttctggttattatattcatatttccacaagtctcatttactccctaccccacccagcattcttcatatgacctagagattttctgattaccacaaactgaacatagtgttaaaacagttggtgatgtctccatttcaattttgtcagtgagtaaaagtcatttatctcatgcagtcacattttagacatttttctagaatagctatttaattgggctgtatgtggtggcttatgcctgtaatcccagcactttgggaagccaaggcaagaggattacatgagtccaagagttcaaggccagtgtggggaacagcgagactgtctttacaaaaaacattttttgtaaaaaaaattagccaggcatggtggtacgtgcctgtagtcttagctgttcaggaggctgaggcagaaggattgcctgagcccaggagttcaaggctgcattgaaccttgtgattgtgctgctgcactccagccttaatgacagagtgagacactgtctcttaaataaataaataaaattaattcatcctgaagttcttaggcttctttctagagcttctcagttgtaaatatttttgaacttttgcatgtttctcagtataaaaccctttcagctgagaaaacatttgtggtaggcagctcaaaattattatttcagttttttagatcagatatcctcatagctgccataacttttctctcttaagaaaggttttcataatgaaacaaaacactgtatctccctatttttcccctatatgagtctgttactaaaagtacctgatgtaaaaactagtgaaattctctccattccagaatgtatctcatctgatttaacttctttttaattgggtaggattttaaacggttcagaatgaggcattgagattgatgaactccattctttcatcatctggcctatctgctctattatgtcctctgctattgcagttgaatgccatggccaaccgagcagctgggaaggggtatgaaaatgaagacaactatgccaacattcgcttcagattcatgggcattgagaacatccatgtaatgcggagcagtctgcagaaactcttggaaggtacagggatttcaccttggctaggcaagcggccatagctttgcgttatcatgtaagcagaaagcatgcctgatttggggtggaatataaaagcaagcaggtgagcagagtcaataagtggttaggtgtttaactattgtacaaatctagcttaaatagtactgaattatagcagtgttgatctggaaaagggactaagatgtgcagtttcataattcaataaagttcatctgggtctagttggtatgaaaattatttctctctgtggaaatacagaggttgattttcagggataggcaaaccagcataagtattaaataaatttgggattcattttatcatccttaaggtaagaaattatcttctttaatttggtataaggattcagtctgatttcatcactgtgctgatgaagttgaatttagacctcaaaagaataaagttgatatcagacagttttggtgatctgttatcgactacaaaatgattagggtcagaaagggggcaaggtgggattggggccttacaagactcttgggtgtagagcatttctcctaaaaccactacccaggattccatgatgttctatgtcaactcaggcagagatagtgaaaacctgccttctttagtgaactccccattcttcctcttctttcttcaactttgtacttgcgtagtctgccatgacctctcctttacatcacccttgccagatctcatctgctcagtctgcatcccttttaaaatattaatatccctcttccttaggtctcttactcctttcttttttgccccagaatattttatggaagaggactttgttttacagatttttaaggcaaaagatttccctctgctggataattattgcaaagtgcataaaaattaactggtattttttttttcaacctgttgacagaacagggctacagggagtagatgggggtgtgggagtagagacagatgctgagggccttcagagttagcataagtgggtgggattaggatagggatcaaatatgttttctaatcagaggaggtgtgttttcctgtagatgctaattcagtcttctggctctcttcttgagagatttctaagggcttgagagtgggttctacagcatgataaagcagaggcccaggcgaggagatctggtaggctttagacctagttctgtccctgactcactgtgtggtttctaactaatcatttaacctttctgcctcagcttcctcacttacgatayggagatccactttctccccttaatgaataaactgagttgattgtgaatttcaatctctgcttccttttctaccttagtttgtgaattgaaaactccaacaatgagtgaatttcttagcggcctggagagctcagggtggttaagacacattaaagctattatggatgctggaattttcattacaaaggtaataatcaggacttttaaaatttgcactgactttaattatgggatatattgaagtagtaktgtgccatggtggaaagaatattgaaaagaaatctagtttctagattcagctctgccactaattcactgtgtgcccttgggcaagtctcttttcttctctgggtctcagtgtctccatctttaaacaaggtggttgaactataatctaatgatgtaacttttaggtggccacagaattctttgggaatatgattaaccctctcccccactggaaaaatgaacatatgatgatacatacagaaaatgaacctcaatttcagggggtccacagacccctggacttcacattaaaaactctkaggtgatctctaattgataattgataataattgatctctagctcagttattctgtgatatatttttgtgttgattctaaggtattaagtacaagggtgggtgtgaaataaatgcagagcttatgtatctatgagttttcagaactctgagtacaaagacctatttttttaaacttctttgtatagatctgcctccaaatgcagtctaggcaggctttgtcaccctgtatttatgctgactcatttattttctgatctctaggaccctaggctctgtagcctttgttaagtggtttgttttcttacaaaaacaaaaacaaaattcagtgtatattttctcattttgacgttttgtttttatgtatttctacatgagtactctacctcttcatcccacccccattatttggtaaaagcaaaggagataatgacttttcatacatctgctataattttctcagttgaaggcaatgttatatataacttctggcttaaaaggtttgaagattgtatataatgaactgccttaaatatccaagccctaatgctttttgctttcctaatcctgttgcctgcacttttcattgttattgatgttcactatgtgaccctgtcagttgtttcaagcccactattctaactattctttgttctgttcctttttcatagattctacatccatatatctatagtccctttctgaaaccaaatttattagaccaaagagagtgaggatggataagagggagatttgatagacagtacagccttataaatattggttgaattaaaatgaatgaaccaaaaagataggcttggattgcacagtgtttctgtgttccctatctctgttaccacctatccaatatcccaagcktgagaacttcagtcagccttgaactctacctcttctcctccatctggctattgccaagtcccatgtgttctgcttcaaaagtgtttctcaaatctgtcctttcttcccagtctccactgctatttctctagttaagatagccacaatccattgttcacagtgtaataacctcttaactgctttacttgtctctagtagttactctttagttcgggaaccaaattgctactaaagttatttttcttgaacatgtctgatcatgtcactttaaactcaaaatcctccattggttatcaattctattgccaataagaccccataagcttgacattcagagtctttcacaatgtcgccccagcttggctgtagtggacctcttgctgttctctaacatactatgttacttctttttctctctcttttttaaatgtttattttatttacctattttctcattacaaaagcaatacatgtacattatcaaagaagtaaacatttcagaaatatataacataaaatgtaaacattccccatagtttgtaccacagtgcatacacatcactgatagtagtttaatgtttatgtccttcagtcagcactgtccatttgaactttttgtgatgatggaaatattctgtatctgtactgkctaatacagtaccactacatgtggaaattgagcacttgaaatgtggctagtgagactgaggaactgaatttatgattttatttagttttaacaaattcaaatttaagtagctataggtggctggttactaccatattggacagtgctgctgtagaatttttcaacatatagagttacacatattaatactttgtgaaaatgagctcatactgtgcatactcttttttttttttttttttttttttgagacagagttttgctcttgttgcccaggctggagtgcagtggcacgatctcggttcactgcaacctccgcctaccggattcaagggattcttctgcctcagcctcctgagtagctgagattataggagcatgccaccacgcctgactaatttttgtatttttagcagagacggggttttgccatgttggccaggctggtctcgaactcctgacctcaggtgatccaccagccttggcctcccaaagtgctgggattacaggcgtaagctaccacgcccggcccatactgttctttaattgaccttttatacttatactatttaatgagcatttcttaagacagttcagtcagtactacgtcattcttttcagcaactatgttatattcaattgtggtaacttagttgtttctaatttttcgctaatgcagatattgctgcaccaaatattcttaaacatatatctttatagaagtggattttctgtgtcaaagagtatgaatatttcagattttaatagatgtggccaaattgccctccaagtaggtaataccagtttccattcctaccaacagtgcctatttctccattttggcagcaatggttatcatcaatctttttgatctttgccaatgtgataggtgatagattttgtatcatgttttaatttgtatttctttaatcattagtgaaatccagtatcattttctgtccaccagtgacttttgactctgtttggagccctaaacaaagaacatggttgctgccgtcatgttctgctactacctgaggtgtctgcttaattgagaagtcaaaaaggttgaaaaacttttttccagatctctttaactccttttttacctgaaacctgactacctttctaggaatacgattttttcttgtacccctattacaaagattactcattgtcccacatcatatgaaccacatggcccagggcagtttcactattctccttgctccttacaaaagcctccccctcctttcagatctatttcatttagctataccatcctctataccttctagttactcttccccctccattaaggatgttgggaacagccttgccgtcttcttttccatcctggttcttcccgtcatctgaagagatttgagtgtcaatgtacaacttatcaaacattctacacttacagttctttggactttttataattccagctttcacatccttaatccagctagcatagttcttctatctcatggaaacctctgtacttttaactcctctttttccaaacttcttttttcttccctatataccaagaccgggtggtgtagcacttcatccattccaccttgtctcttatccttccactctacctgccctgctagccacggtcattctctgctcttacaccctgacctctaagcattgctgcaaatagatgtatcccatagatatgttagttggtaccatcacaggtttatgccttatagtcttagctgagctgaacagttattttatgtgtttttggttggctcccagtcctgtttcaccaagcagatattccttgtaccttgctttcaaactggctacaccatggtaactcccctctctgtaagctcatattgaaacatgtccttcatggaaaaatgtatataatacctcttctcactattatccttaccgacttctttgctatctcggtggacatagtgccccatcttctgtgtaaggatactcactctacctatatttgaaattccatctcttcctactttaaggaaccaactctgtcagttaaaccctctttgtcttacattttcaacctattcttttcaactggcttcttctctcagtagtatgctcaaatattttctcattcctaaagaaaaagtactttttcaatcttctagttattgccctctttcctcttggttggcgccttctgaaaagtagttagtctttcctattagtacttcatctcccttcacctttcagcccactgtgatccaattttcatataattactattgctcttccagaggtcttatgacctttgacttgtcatatctaagagtcacttgttagtcttcactctattttgacctctctgttgtgtttggcacagttcactccttttcactttgaaccctttttgtagtcctgacttttatccaactattccctcctggctctctttttaccttttgggcttttttgaacaggctgactcctataataatcctccttcctctgcttgccctttaagggtcactgctttttaaggtcttttcttttgtcacatttggtctctgcctgggcagcatcaactatgcacacagtgtatactactatctctattcagatagtggtgaaatctatactctggttcagatctttccctctcctgaacttcaaacccacatatccagttgtctcactggactttccattagatgttcccgaactacctcaaactcaccatggccaaaacataaatcttcttacataccaccactactacctaaaacttgcttttgtgttcattatttagtctaatggcactaccatccacctggttgctaaaccacacatttcagagttatctttaacttttccttttctttcatcccatgactagtctctcactctgtcctgttaaaatgttcataattaaaatccttcttctgtttttcagctccactgctactaccttacctcaggcctatatggacttccacgattttagtagcttcctaactggtcttcctgtatccaaactcatgtcttctcaatccattctccttactgccaccacagtgatctttcaaagatgtacatctgatcatggcactcctctgcttccaactccctattgccatcagataaaatgtatacttgattggtctgacccttgtcctcctagctggctctatctctccttattctctcacttccagcttagcctgagtcattaattgttcttcctctatgtcatgcctccttgcaatgtacacgctgttacatcattccccagcctggaatgtcctttcctcctggtccatctggtaaattcttattcatctttccagacccaccttagttgtctcctccttgctggttatcttttgtgcctttgttatacctggcatggattttccccttttatttttcattggtttgcagtcatgcatttaagtgtttgtctcttttgtattcccaatgcacatcatagtgcctcttgtacagtcactcagtaattattggctaggtgtgtggatgaatgaatgggtgaattaatgtccttcttcacctaaggaaacccagctctttcttcaagggtcaagcttccctggctcctgcaaaagaatattgttactacacattactgtatattaccagtagtttttccattgtattttaattatttatttattttcggtcaccctgactagtttgtgggttccttgaaagcagaaactgagtctttgtatttctaatacctggcacatagaggcacaaaattgttagaatgaataaatgagtggtcaatatgtaccattgccaaaatttcccaggttaaataactgcccagatctttacatcattctgattgtgtttatacaatcacttgttaaagcgacctaagacaggcaagcacctccatcttaagttgaaagcatttgtgttagtaacactaaaacagctagaggagattgttgtcagatctgggactagaatgcagagctgtctgtgtttttgagtgtgaattcttcctccagttcacctattcctctgagaattgatccttggtttcttcagaagtttagtgaatttagaactcccctcatctttctttttgccctgcattatgggttagttttgatattcttttcctatgtggtaagctctccttctcttgaactccattgttttccttttcattccccatagaggatgttaatgttatgagaaaaaattaatgtagcccataagaccaggttctctgtgctttagggacagtatttggcaactctttaatccaacaagctgtgcaaaggttgcttgtggtacttttttgcctcttgtcttcacaggcagtgaaggtagaaaaggccagtgtcttagtccattgttctgatggatgggaccgcacagcacaagtctgctcagtggctagcatcctcctagatccattttataggacattcaaaggactcatggtaagagagcacgctactatattttactttgtgtaagagacagrttgcgacaaaataaaaaataactgtcaaacaatattttttttrccagagttagctctaagtctacaaaaatagcttttccaatttagcttcttttcattaaatttaggtgtgtactatctgtatactttcttttgtatgttcaacatacttcttacctatcagaaggtaagttatatgtagcagactactgtacagagtaggaaaagctcaaaaagtttgcagagcttaatggatgactgtcaaatagactgtccaaggggctcatcatctttaacatgtcagctgtttgaatgtcagacttatgattgttttctaatgctgaatctaaagcctcttagttgatctttctaagaaacagaactcaccatagtggtttattctcatttctttggaaagcttttttttgttttgttttgtttttttgttttgaagtagtcttactctgtcacccaggctggagtgcagtggtgcgatattggctcactgcaacctccacctcctgggttcaagtgattcttgtgccatagcctcccaagtagctgggattacagatgtgcaccaccatgcttggctaatttttgtatttttagtagtgactgggtttaccacattggccagtctggtctcaaactcctggcctcatgtgatctgccctcctcggcctcccaaaatgctgggattacaggtgtaagccaccatgcctggctagaattttttttttttttttaatggttaaaaatggttttgttactggtataaagctaagagctgcctttggatttctgtttttcaaagtgtgaatttaatatcgtgcttatcaggattgcatttagttatggctcagtggcttgtcacacatgtgaaagccaaaggaaatttgactctggatatgtctgagagcatctgaaatttgaaggcaccctgtataggcttatgaatgaaatctaagttacttacttatttatcatttaggaaattaactattttatgatcagttcaactatttcagcaaagtgttttgacattcttgtgtgtatggttaattcattttatgattttcctaatgcaaacactttcttttctataaaatgaagatcttgatagagaaggaatggatatccatgggccacaagttttcccaaaggtaaaaatatactcattttgaaggaaggggctgaggatagttcattagggtgaagtatatcaaaacctcagtatgtacatgtaaaggaaggaagaggaagttgaacatggcataaatctcttttcatcaagaaacaagtattctagatactatgctagggcactaaggtgacaaaagtaaccagaatattatccctgttttcaaggagtacaagtaattatatcaaattgttaaatatttcaaggaagaacaaggcatcacaggctacagaaggaaaagtgcttaacattgcacgaagaggtcagggtaggcttccaggagtacacagcatttgaggatgaatttttggaaatgaatagaaatttaacaggaagaacaagggaatgatgaggtcattcagagggactaatatcaagacaatgcaccttttaaccttttgtaagataaaaggggcagatttgttcttttttaagggatgaggacaagggcttatatttatctgttgtctgctataaaccaaactgcctcactaaggctttacctgtgttatcagaacaatcgataaatatttgtcaaatgcctaacaatgtgctgtatattatatcagacactaagctgattccaaaggcaaataaaatttgagatttggccgggtgcagtggctcatacctgtgatcctagcactttgggaggccaaggcgggcaaatcgcctgaggtcaggagttcgagaccagcctggccaatatggtgaaaccccttctctactaaaaatacagaaattagccagacatggtggcgggtgcctataatcctgactccttgggaggcagaggtaggagaatcacttgaacccgggaggcggaggttgcagtgagctgaggccatgccattgcactccagcctgggtgacaagactgaaactccatctcaaaaaaaaaaaaaattgagttttaccccaaggagattataattcaggtcttattttcccccattgatatgcattaatttaatttcatttggttgccactctctagccatttgggtccatttatttattcttccttcacccacaaacattggaccagtcattatgttaggtattgagaagacagagctgaatcagatatagttcctatctcatctttgaaagaaaagaaaaatcagtgatgacggtgtagtatgataagtgcttaagacagaggaaaacataaacaaaggacgtttatccattctggggcaaagaaggcttcctgtaataggtgacattttaactgagatttaaagtatgagtagatgttatttagaaagggagaaagcattctagccctgatgtgtttgaaaccataaaggcattaaacaggattacgtgtttgaggagctgcaagcaattcagtgtggctgggtcaaagggtgtgtagggagaatagaggaaatgaggccagggaagccgagccagtgaggagaagatcattcagagccctgtttttttttttttttttttttttttaagctgaaagatttgagtgttttgtgtacatagtaaagctatattggaggactttgaacaaggcagtgacatgatgttcagatctatattttacaaatatccctctgacagcatgtagaagattgaaattggtggcaaggggctgaattagtaggctaccagaattgatgagggcctgaaaaaaagacagaagcaatgatatagatacaagggtattcaggaagtagaactcaccaggagatgggagaaaaagtccaataaaactcaaaggtttctgcctgaggtagctgggtttattgagatagaggatataggataatacagggcaggtttggtggggaagatggcttcagtttgggacttatttggcatagggcatccaggagaagatatctagtagggagactattcagtagtaatctggagctcactagttctgggttggatagagaggtggtgtagaggtttaagagttatctgcatataattggtagtttaaaccatggattcagataaggtaactcaaaaaattgtataaagaggaagaagagccaaggggtgggacagagccttggataatactgacacctgaaagtctartgaagaatgaagtccatgaagttgactgtgaaagagtgattagtgagataagaataaatctaaggataggaaagaagaaacataagagaggagaatctcaagggagtagtcagcagtgtcatatgcctcagaataacccaagaatcgactttggcaatatgcaggttttaatgatctttagtgataactggttgagcaaagtggtgaaagcagaagccaaatgtttgtgaatggaggcatgagtgagggatgaagaagtggaatgtgagtatataaatctctttccaagaaccttggctctcaagggggtagaagagaaggggtcgggtttgggtctgaggaagtgtatttcaagacaggagatatttgagcagtttcttatgctgagaagaaagaaacattaaagaagataaggtggaagatatgccaaaacagtgagtttttggtagagtaagacttctgggcaaatcggtgaaagttccagtccaaacgaaagattagcttgagctataatgaagaacaccttttccatggagattaggtggaaagacaggcagaaaaggtgctatatgtgaatattagaggcagaagttagaaatttttttttctacttaatggccttgatatttttcagtggcactggagtgaaggaagatatgaaatggattaggggtttgacaaggtagttgaaaatttgtatgagctgtaaaggtaatgagaaaatgttgttaaggacctacacaaagattatttgagagcagttaaaacacagctgaatgtggagactcaatttgaatggtgtgaatttgtatgattttataattttcttgagcattattaatcagtcaggatgtggaagcagagaacatagcttttcaggctgatctgtggttggatttagaaggaaaataattacaagaaagaccagaaagctgaacaaaatggggagagagtagttaatagggcagatcatggaatttaggcttgataagaaaaaagagaagccaacaggaatctagcatgtggagatgtcctgagatgaggtctgcaggagttaagaagatgagcagcctttggaaatataatatatggtgttcagagtgggatatcgtgattaagatttcaaagatggagtaagaactactagccagcctgtggccagtggattcaaaaggctggagtagaggtaaagatcagtgaaggtaatttgatttgcgttagttaaggaatctgttgagctagtgtaagtcatctacatcaacacaaaagcttaagaccatcagattattcagagaatgtagggaagtgacacagagattctagaagacagcattgtggaaggagaaggtaaataagctaaatagcatgacccataaaggaagtgttcttaagggcatgaaaagaatagtagcttggaagcagcagaagcagcagtaggtgcaaggagaaagctaaacccacctctgctttgtttyagaattatggtatgtggaaagtggaatgatcagcattctccatttttatttgaccccaaggaaaggtggtatcgttgtgagccaggttgtaattatatcagaaggtagagaacattcagtgtagaaactgagagtgccgtgttcatttccagtggaatagtgtttcagtcgatgatagggttggtaaagaaaacattgtggggaggaaatattaaacagttctgggatgaggtttcattcatgtacttaataaatgtttctttaatacctattttgtgccaggcactatgcagtaaacaatatagatgtggtcgttgctcacatagagctaaatgtagctatttaaattaaattaattaaaattaaatacaattaaaaattcagttcctcagtcacagtatccacatttcaagtgcttaacagttagtggctgctatattggacaacacaactgtagaaattttccatcattgcagaaagttctattggaaagagggtgtataaaaaaatagactagatgaccaaagggtttacagtatggatgacagtgaaggacaccagcagctaagaggtctgctgggattgactagctttgagattctggctggcattttggtatgaggtgtttccttgccactaccaacagagacaaaagatgaccctcttacagcctattcccaacagtgtaatccttaatgctaactagtgtctttctttacctttattttcatctctcaggtgtggccacctcgatggggactctaaagaagtgtcccctatcttcacccagttcctagactgtatctggcaattaatggaacagtttccctgtgcctttgagtttaatgaaaacttcctgctggagattcatgaccatgttttctcctgccagtttggaaacttccttggtaactgccagaaggatcgggaagatctaaggtgaatttactttgtgagaagacactgaacagggagaaggtggtcagtgcaaaaagaatgtacctaccaccctgaatttggcatagcagtcaagaaaggggaggagataacaataataaaaagaacttttgaagcataaagcactcaatgtttgcacagagatctctcagaaccctaagatatctcatctgtaaaatagggataataatgcctactttttagagcagtcatgaggatccagtaaaataatggatgtacaaggcctttgcaaataattaattgctgtgcaggtatgagtagtcattatctacagtcctttctcactcatatcagagattacaaactagcagctcataggccgaacccaacccaacaggcgtggtttgtttaatctgtggagtattttttaaaactcctaattcgttgccgacatttttgtttatttccgtaggtttttgaggaacaggtggtatttggttacatgaatgagttctttagtggtgatttgtgagactttggttcacccatctcctgagcagtatacactgaacccaatttgtagtcttttatccctcacccgcttcctaccctttccctctgagttcccaaagtccattgtgtcattcttatgcctagttgctaacatttaaatatcagtagatttcacattaaaatccagttattttaggatgttttttctaaatattctgaaaaatcaggagctctggcaatactagactattttctcatgataataaacagctagagctgaatagtagctgttccatttggatgaggcaaactcactcttgttgactgcagttcttaccattctctatagtttattcttagcccatttctaatgttatctgcctagttctagtaggcagttgagtttgcacccctcacttaaactaacagcttggcaatatatgagacataagtacttttcaaaattgacaaggtagagctcctgtgaacagtattttcattatgttagagacagagaaaaagaaataggawagtagctgtttcacaactcactcctatttcacagctgttggctgagttagtagttagcccaaccctcaggcccctttatagcatagcaagatgaagttacttctctgtgatttggttttcctgtcaacatagagaacaataatgagtctttctgtttcaacatttgtacttacttggtagtttctctcttgatgccatgcatgtttctctctctctgtctttacaactagacctttgtcactttctccccaaattcttttaagatattcattctgtctttgtttacctacgcgttaaaacacagaatcttttccataatctttttccttctcttaaaattggtcaatatatgtggtatttttcacacaaatctgaatatccatttaaaaaacataacagttgaacattttaacatattttaaaatagtgattacttaaaataagcagaagtgtcattcattcatgaacagaaaaggatgggctttagaatcaggcagacttgggttcaaactttggctctctcacctactagctatgtgaccttgagcaaattaatatttagtctcattttctcattagtaattttgggctaaaatatctcacaaggttttattgggaaaatttaaggaggtattttaggtaaagagtctggaatagtgtttgaacacatagtaaatactcaacaaattagttaccttaccaacgcaatatttttttttttctgttataaaccaacagcaaatgagaaagatggatgtacaaagcctttggcctcactgaaatgctctgacaattgcaaaagttacaagaccacaattttaggtcttaccacttatatcactcttcagttctcctttagcttcctttgacatggtgtgtgtgcaaatgaccttctcatgggtggttatacagtaactctctttgggaaccagtggatctcatgtattttgaggtgttaactaagggacttgcttactggttaagcagcctccccatggtctgaactaaagtataagaatcaattttgtaatataaatgccataatctttagttgcccacctgggataactcatgacattttctagtataaatttccaattgtctttcactgtcttaaaccttctgaagggagaagtagctggctttaagtaaaatgaaatatagaagagccagaaattcaccccatagaacctatcacttaacttaccagacttgtaaaagcaattccagaatttttaaaaccagaaaagtcattagttcataaaatccttgatttggaagataacttagaggtcacatttaacggtgaggaaataggcccagaaaaaaactcgggattttcttaagatcacacagctattccacacagagactggacttagaatctcctgttctccaatatggaactctttctaacctctcatttattttaaagatggataaattgaagcccagataatttgttactccatcaacactttttatccacttatttttcttctgtcatatcctgtcgtcctttcttgagctgggttacttattagtaaaatttgctgcttatcagttcaacaggactattgagattacttgcttcctgcttttaattttttggcttgtttttcttttctaacagagtctatgagaaaacacattctgtgtggcctttcttggttcagaggaaaccagacttcaggaaccctctctayaaaggcttcactatgtatggggtactcaatcctagtactgtgccctacaacattcagtaagttcttaagtttttccctcctttcttatagcaggtcccagggtctcagcttccttgcttctccttggatagctgccaccatctgtacaagcctggctatggagtaggatactctgtcctcatatcacccatacattgctgcttctgaaaacaagagcccaattccttttggttttcagggctttgctgttacctgcttagggaaataaataagaaattatagttgatttgtaggaatacaaccagtcaagataacgtttgtttgattcatttactcttcctctgtatcttctacttgtctttcccttccccaacaaagaaaagaaaaatgagacaaatcaggagtgtgctggtaatgtttgctatatttttccaaagcttctgcaggctgaggcactcacaaagaatacaaaacagagattaatatatttattagctctaatagctcattttgtggattctttaggattttgtaaatattagatcatgtcatctctgaaaagagaattctatttcttcattttcaatttggatgtcttttatttccttgcctaattgctctggctagaacttccagtacagtgttgagtaaaagtagtgaaaagaggcactggtgtcctgttcctgattttagggggaaagctttcagtctttcactattgagtattgatgttagctgtaggtttttcacaaatttcctttttcatgtttaggatgttctcttctgttttcagttgagtatttattgtatttttttgctattacattttaaattttaattgacacaataattgtactacatatgaggtatagagtgattatgctgtatttgcctttgtgtggctggcttatttcgcttaacataatgttctccaacctcatctgtgttgctgtgaatgacagcatttctttcttttttattgctaaaatagtatttcctcgtgtatgtataccacattctccttctcaattcatccatatggacacttaggttgacttcatatcttggctattgtgaatagtgctgcaataaacatgggagtgcacatatctgttcgacacaatgacttcattttctttggatatatacccagtaatgggattgccagatagatcatagggcagttctctttttatatttttaggaagtccatactgtttttcataatgaatgtacgaatttacatttccactgatagtatgtgagtgttcccctttttccacatccttgtcagcacttgatatgttttgtctttttgtgaatagccattcaaacttggtgaaatgatatctcattgtggttttgatttgcattttcgtgatgattggtgatgttgcatttttttcatatacctattggccatttgtatatcttcttttgaaaagtatctattcagatcttttgcccgttctaaaatcagattgtttgctttgctatttagttgagtttcttatatattctggttattaatcctttttagaagggtagtttgcaaatattttcttccattctgtgggttatctcttcactttgttgattgtttcctttactgtgcagcagaagctttttagtttgatgtaatctcatttgtctacttttgcttttgttacctgtgcttttagagtcatagccaaaaaattgttgcctagtccaatattatgaagtgttttccctatgttttcttccagtagtttcatagctttcggtctttcatttaagtttttaatccattttgagttgatttttatatgtgatgagagatatgtacctagttccattcttctgcatatgggcatccatttttttttcagcaccatttactgaagattgtattttccccaatgtttgttcttcacacctttgcctgtatatgcattttttttctgggctctctattccattggtctgtgtgtctatttttagatcagtatcattctattttggttgctatagctttgtagtacattttgaagtcagatagagtgatatcttcagctttctttcttcttttttttttccccacaagtttgcctcagctattcgggatcttttgtggttccttacaaattttaggattcttttttctatttctgtgaagaatgccattggtattttgttagagattacgttgaatctgtagatcactttgggtagtgtagacactttaacaatattaattcttccagtccatgaagatgggctatccttctgtttatctgtgtcctcttcaatttcctccatcaatgttttatagttttcagtgtgaagatctttcacctccttggttaaacttatccctaagtatatgttttttgtaactattgtaagtgggattgttttcttgatttctttttcagatagtttactattgatgtataaaaatactgctgatttttgtatcttgcaactttactgaatttgtttattagctctagcagttttttggtggagtcttttgggttttctgtatatggtggacccttaaacaacacagatttgaaatgtgtgagtccatttatatgtggattttcttccacctctgcaaccactgagtcagcaagaccaacttttcttcttcctcttcctccgcctactcaacacaaagatgataaagatgtagatgtttatgatgatccatgtccccttaattaatagtagatgtattttcttaataataattttttctttagcttaacttataagaatacagtgtataatacatataatatacaaaataggtgttaatcaatgatttatgttattgatcaggcttctggtcaacagtgggctactggtagttaagtttttggtaagtaagaacttatatattgattttccagtgtgcaagggtctgacacttctaacactggtattgtttgagggccaactgtatacactcatgtcatctgcaaccagggatagtttaacttcctcctttccaatttggatagctttcatttctttctcttgcctaattgctgtggctaggaattcaaatactaagtagaatagaagtggtaaaagtaggcattgttgtcttgttccctatcttaaggaagagcttccaacttttccctgttcaatatggtgttagctgtgggtttgtcatatgtggcttttatttgtagtgaggtacatactttctatacataatgtattgtttttatcatgaagggatatttaattttgtcaaatgccttttcttcatctattgaaatgatcatacggtttttgtccttcattccattagtgttctgtgtcacatttattgattggcatatgttgagccattcttgcatccctgggatgagttccacttgatcatagtgaataatctttttaatgtgctattgaattctgtttgctagtattttgttgatgatttttgcatttgtgttcatcagggatattcttttttaattgtgtccttgcctggctttgctatcagggtaatgctatccttataaaatgagtttagaaatattgtctcctcttcagttgtgccgactagtttgaggaaaattggcattcattctttaaatgtttggtagaattcagcagtgaagccatcaagtcctgggcttttctttgatgcgagatttttattactgctttgatttcattactcactattggtctgttcagattttctatttcttcattctttaatcttggaaggttgtatatgaccaggaatttatccattttttataggttatctgggttttctggcatagaattgttcctgatactgtcttgtgatgctttttatttctgtagcatcagttgtagtgtctctttttttggtatctaattttacttgaatcttctctgttttttcttaggccagctaaaggcatctcaattttgtttatcttttcaaaaaaacaactctttgtttcattgatctattttattttaaacctctcttttttttttttttttttttttttggtgagcaacaaggctgtttatttcacctgggtgcaggcgggctgagtccgaaaagagagtcagcgaagggagataggggtagggccattttataagatttgggtttcttttctttccttttctttttttgagacagggtcctgctctgtcacccaggctgcagtgcaatgccacaatcatggttgactgcagccttgacctcctgtgctcaggtgatcctcctgcctcagctccctgagtatctgggactacaggtgcatgccaccacatctggctagttgtttaatttctttgtagagatgggggtctcactatgttgcccaggctggtcttgaactcctggcctcaagcagtcctccctcttggcctcccaaagtgctgggattacaagtgtgagccaccaagtccgtcctctttcttctcttctcttttctttattttctttctttcttgagatatgatctcactctgtttaccaagctgcagtacagtaatgcaatcatagctcattgtagcctcaaactcctgagctcacatgatcctcctgtttcagcctcccaagtggctaggactactggtacatgcaaccacacctggctaatcttaattttttgtagagatgaggtcttgctttgttgcccaggctggtggaaactcctggcttcaagtgatcctcccactttggcccccccaaaagtgctgggattataggcataagctactgtgcctgggcactttcatttatttctactctttattatttctttccttttactagttttaggtttacttgggttttaaaatgtttaattcctttggtgcattgttaggtttttatttgtgatctttcttctttttcaatgtagacatttattgctataagatttccttttagaactgcattagctgtgtcccaaggattttggtatgctgtatttccattttcatttctctcaagaaatttttagacttccttttaatttcttcattgacctgttggtcatataagagcatgttgtttaatttccatgtgtatttgtgaattttcagaagttcctgttgttactgatttctagttttataccattgtggtaaaaaaaaatatactggaaatgattttggttttcttaaatttgttaaggcttgttctacaggctaccatatgatctgtcctagagaaagtttcatgttctgttgagaagactgtttattctgcagctgtttggtcgaatatgctgtaaatgtttgcttggtccatttgatttagtgtgtcctttaaatgtgatgtttctttattttctgtctggatgatctgtccattgctgagagtggcatgctgaagtctccttatattattttattgcagtctattcccttagatctataataattgcttcatttacttgggtactctggtgttaggtgtatacatattaaaatttttcgtatcatcttgtggaaatgactccttttcattatataatgaacttcttttctctttttatagtttttgccttaaagcctattttatctgttatgattatagctactcctgctctctcttggtttccatttgcatggaatatcattttccatctcttcactttcagtgtacctgtcactctgagcaggtaccccctggaattggtatgcctggttggtaagtatgtaggcagcagaagtctgccagtttggggcagggctccatggaagcaacatgtctggctggtatgccattgtcacacgggggccaaatcaccaacttggggcaggggcacctggaagcaacatgcctggctagtgagcgcacagggttgcacatggacagtgaacctggctggtgagtgtgctgactgtgcacatcactgggcagtactcagtttctttacttggcaagattacctattcctctagggacagagtaccacttgcctttgtgctggagcagtggacttaggctctgagaggctagggttggttgctgcagtcacctgaatgtgcaagacagagcccttcctaggcagcttattctcagaggatagagtgctgtaacagcttggctggggaatggtgcaccaccactaaggtggtgtaatggcagtgcagcttcagcaatgaaaagatgcagttattgctggctcttggagcaggatacatgctagctgtggctctgttttcaagatggcactgtatagctgcagcttgggttttggtgagggaaaggtgtacagtgagtaattaaattgaaaccataatagaaagtctccaatcaaagaaaagcccaggacttaatggcctcactgctgaattctaccaaacatttaaagaacaaataccaattcttctcaaactagtcaacaaaattgaagggagacaatacatccaaactcattctataaaaacagcatactctaatacaaaaaccagagaaggacataacagtaaaaggaatatccctggccaatacccctgatgaacatgaatgcaaaaatcctcaacaaaatacaagcaaacagggccttgtcatggtggctcacacctgtaatcccatyactttgggaggctaacgtggaggatcacttgatcccaggagtttgagaccagtctgggcaacatagtgagacctcgtctctacaaaaaaaaatcaaaaaatgaggcaggagaatgactgaagcctaggagatcaaggttgcagtgaggcatggttgcaccactgcactcccacctgggtcacagagcaagaccctgcctcaaaaaaaaaaaaacaaaaatactaacaaacagaattcgacagcacgttaaaaacataattcatcccaaggatacaagaatggctcaacatatgcaaatcaataaatgtgatacagaatgctagtggaatgaaggactaaaccctatgatcatttcaacagatgaagaaaaagtatttgacaaaatttaacatctcttcatgataaaaacttaacgaattatgtatggaaagtatgtacctcaatacaataaagaccacatatgacaaacccacaggtaatactatattcatcagggaaaagtttaaagctttcctacttggagtttattgagctttgtagatatgtagattaatgtctttcatcaaatttgtgacatactctgtcattatgtcttggaatattctttccgctcctttctatcactcctatccttttaggactctctctgtgcacttattggtctgcttactaatcttctacaggaccctgaggctcttttcatcatttttctttctttttgtctcacagacagggtaaccccaatggacctatcttcaagttcattaattcattcttttacctgctgaaatctgttgtttaactgttctagtgagtttttcatttcaattattgtacttttcatatccaaaatttctgttttgttttgtttttattatttctgtctctttattgatgctatctatttggtgagatactattctccaggtttcccttagttatttttctatggtttcctttagctgtttgagcatatttaaaacagttgatttaaatttgttgactagcaagtctaatatctgggtttcctcataaacagtttctattaattgtttttcctatgaatggggcatacgtttttgttttttttctgaatgcctcataattttttgttgttgttgttgaaaactgggtagtttcaatattataatgtggtagaaatcagatttttacctctctctaggattttttgttgctacttgttgtgggttgtaattgttagtttagtagcttttctaaattatgtttgtaaaggttgtgttatttgccacatgtagtcagtgaattctctgtcagttagcttagttctcagatagtgatttcgcagagatttccttaaattccagaaaaataacaatagttctcctagtctttgcagattggctttttgttggtgtattatcttcaatgcttagctgggccacttatattttagccatgtcctgcttctgtagagcttaaaagtaagccacaggtgaaagcttagggtcttttcacatattttctgagaataggtctgaccctcagcatgtatctgacctcctacattccctgatatttgcaggagctttccagagcattttttttctcatgtatctgcttccccagccttttccttcccaggctttttattctgtctgctgcttgctccatctattatcccttgcctcagttggctgtggctagtacatttgcctttaagtgctttcaacaaatattatgaaaaaggccactctagctctgagaaagttccaaggtgggcaaaataaagtcaaggtcctgagcccataccttagggagctaccaggcaggccaaaatatataaccatagttttctgagatgaagatgtatattgcttcccttgcagcagcgagccacatcagtaatgtagactaccatctccaaggccgccactaagctggggaataggggatggcagagagggaagtcagcatgttgtatcactctcttaccaaaatttagtagtctcttaagtctcaggatacaaaatcaatgtgcaaaaatcacaagcattcttgtacaccaatagcagataaacagagagccaaatcatgaatgaactctcattcacagttgcttcaaagagaataaaatacctaggaatccaacttacaagggatgtgaaggacctcttcaaggagaactacaaaccactgctcaacgaaataaaagaggatacaaacaaatggaagaacattccatgctcatggatagcaagaatcaatatcgtgaaaatggccatactgcccaaggtaatttatagattcaatgccatccccatcaagctaccaataagttacttcacagaattggaaaaaactactttaaagttcatatggaaccaaaaaagagcccgcatcaccgagtcaatcccaagccaaaagaacaaagctggaggcatcacgctacctgacttcaaactatattacaaggctacagtaaccaaaacagcatggtactggtaccaaaacagagatatagaccaatggaacagaacagagccctcagaaataatgccacatatctacaactatctgatttttgacaaacctgacaaaaaaaagcaatggggaaaggattccctatttaataaatggtgctgggaaaactggctagccatatgtagaaagctgaaactggatcccttccttacaccttatacaaaaattaattcaaaatggattaaagacttaaatgttagacctaaaaccataaaaaccctagaagaaaacctaggcaataccattcaggacataggcatgggcaaggacttcatatctaaaacaccaagtgcaatgtccacaaaagccaaaattgacaaatgggatctaattaaactaaagagtttctgcacagcagaagaaactaccatcagagtgaacaggcaacatacagaatgggagaaaatttttgcaatctactcatctgacaaagtagtctctttttttaactaagcatttccctggtttttgtagttggtgtaagtttatttaaattagattctagaatttgaaaatgtttattcttatagtttcttcctgcttagttattgctttcatggaggtacggagttccctactccaccatttttggtgatatcaccaatgataggtatttttcattgccaccaattattctttttagctttgagtatttcaaatgggaacttctcagtgaagcgaaggtagtttacatgtacttattgacaactgtagtgccagaaattctgcatttccttaagatataaaaaccagatttaggctgagcgtggtggctaatgcctgtaatcccagcactttggaaggccaaggcgggtggatcacctgaggttgggagttcgagaccagcctgaccagtatggtgaaatcccgtctctactaaaaatacaaaaataaccccagctacttgggaggctgagactggagaattgcttgaaccctggaggtggaggttgcagtaagccaagattgcaccactgtactccagcctgggcgacagagggagactccatctcaaaaaaaaaaaaaaaaacaaaaaaccaaaccaaaccaaacaaactagttttaggggaagatggagtcaacatatttttcctactccccccactaagtaaaactaaagcccatggacattatgaaacaaatattaacccatcatgaaaaattcagagtagaaggcagattgactagggtccacaggacctaaggaacaacacgattgtgagtttcatgggttttctttttgcctcatataacccagacttggagctgaagaagctggcaacccatacataacacgggaacagaaaaaaaagccacaaatagaagccatctctttctagccaaaggaccagaaaagagcctagtaacacagaaaacttgagaaaataactgctctatgtcaaatactacagaaaacactatggctctacttagccagaaaaggccatgtcaggagtctagatttctggcctcatcaagctatcacaaaatacccaaatggccccctgccagggtggtgtcagaaaaagccaagtggggagttggaatttaaatccctaaaagacacttctgttcctgaggtgtcagtggagaccatatggaaagtctggacttccactaagtggtaataaggtaactcttcccctccccacttggatatgatcagaggaaggctagtggagagtctggactttcacctagcattaatgtgtccatgccctgtgttgtcattggaggtcacatggggaaaagcaatgagccacttttatccaatgcagctagggtgttattaacatagactgagtggggggcctgaatccccacttctacccagtagtactatggggcacctccccaactcaagtgtcagtggaaactaaatggagaaccttgacttacattcccacctggcaataatgaggaggcactcctccttctttattatcccctgccaaaacagttttatagtaagcctgctaaaacagcagatctaaatgcaatccagagtctcttcacaaaattacctaaatatttaggttttagttgaaaatcagccatcagaccaagaacaaggaaactaacaactgaaaaaaggcagtcaatggatgccatcattacgatgcctcaagaaacaattgcaaacctgattgaaacaaatgaaaaaagtctcagcaaagaaattcaagatataaaggagaaccaaatgaaaattattcaaatgaataatatagaaatgaagaaaactaaatggatcagctcaacagcagagtggaagggaaagaggaaagaatacatgagcttgagatataaaaatagaaagtacccagtctgggagaaaactgacgaaaaaaataaataaacagagtcacaggggtctgtgggacaataatgaaagttctaacacttgtataattggaaacttggaaggaaagaggaaagatggaaaacctcaaaaagcactcaaataaataatggctgataatattccagtatggcaaaaggcttatacgtatagattcgagaagctgagtgaacatcaaacaggataaaccccaaataaagttacatgaaaatacatcatagcaaaatttgtgaaaactaaaatattcttttttttttttttttttgagacacagtctcgctctgtcatccagtctggagtgcagtggcatgatctcggctcactgcaacctctgtctcccaagttcaagtgatcctcccacctcagcctcccgagtagctgggactacaggcacacatcaccacgcctggctaactttttgtctttttagtagagacgggattttgctatgttggccaggctggtctcgaactcctcacctcaagtgatccaccttccttgacctcccaaagtgctatgattacagccgtgagccactgcacctggcctaacaaactattgaaagcagcaggagagaaattacaccttacttataggggaaaaacagtttaaatgacagtggatttctcatcagaaatcatggaagccagaaggaagttgcacatttttaagtgccaaaaaaaatatatcaatgcgaaatcttataaatggtgaaaatagtctttttttgagactgggccttgctctgtcacccaggctggtgtgcattggtgcaatcatggctcactgcagccttgacctcccaggctcaaatgatcctcctgcctcagcctcctgagtagctgggacaacaggcatgcaccaatcatgcccacctaatttttgtattttctgcagagttggggttttgccacattctccaggctggtcttgaactcctgagcttaagtgatttgcccaccttgggctcccaaagtactggtattacaggtgtgagccactgcatctggcccaaaaatattctttaggaatgaaggagaaatgatgatattctcagatgaaataaaacgtgtttgtcaccagcagacctaccttaaaaggaagacttaaggaagttctctaaagagaatggcaatgataaaagaaggaatcttggaacatcagaaaagaagaaagaagaatggaaagaatagaaatatgtataaatacaatagacttttcatctcctcttgaattgtctcaaatgtatgacagtggaagcaaaaattataacgctatctgatatgattctaaatgtatagagaggaaatgtttaagataattatattataaataggggagggaaaagggatgtaaaaggaaggaggatttgtagacttcattcaaacttataaaatgctgacaccactacacgatgatacacggacacacagagagagtatgtataggcacacatataatatactgcctagagaaaccactgaaagacctatacaaggagatacactcaaaaacactttagattaatcaaaatgaaattgtaaaaaagtaacccacaggaaggcatgacaagaaaacagaaatgacagattgaacaaacaaaaacaataacatggggaattaagctctaacatatataattatcttaaatgtaaatgatcttaatacaccaattaaatgaaaaaaattagcagagtggataaaaaatatatgctgtctacaataattgcacttcaattataatgaaatagacaagttgaaagtaaaaaaaaaaggatggaaagagaagcattatgaaaacataaatggaagcagcagaggccatatcacatagtatcagattaaatagacttcagaagaaatttatttgggcaagatggctgatgacacagccaggtggaacagctgccaccaagggaactgggacaactagtgcactcctagaagatcttcagagggaaggcactgagagtgggcagagggaaggcactgagagtaggcagagggaagacacagaagctgggctgaagttggaggaagctggggaccctgcacggggccaccatgcctgggacttgttactggctcctaacaacaatgggggaatgggtgagttgaactggcaaggagcaaccctctcttgccatgggcctctggaatcctggcaggagaagacccccagaccatgatggacacttgagttggcagggagagaagtttagagaagtgttaggggcagcatgccagccagttgtggagcacagagggcttggtgcaggaacatctgtattggagcagagccagggatgcccatccccctaactcgacttgctgtcatagtagactttagtcttaggggaactagtgggcctgaactctgcagggtggtcttgtccatcactcaggccagtctgatctgtgcaccccttggtcttctggcctctcttagggccccagcctggccacattggtttgcagtgcagtcttggtaccctgggggtctgcatcatagcttctgagctggtggactgcacctgactgctgatgagctatagcagggtggcccccgaggtcacgtaccatcccacccactcgatacccacaatacagcttcctgtgggcccagggccacttcccacattgccttgaccgcacatgtgtacgtggggccaatcttgccttcttccctgcctggccagcacatatatgcactgaaccatgctgtgccactgctgccagcagcagttcactacaactctctaccctccaccgctgctgtaccgccattgcagttggagccttggcaggcacaaagccaggcagttccgcccctgcaagtgaaactaggcacagagactagcagaccctcccctgccctgagcctgcataaacatgcacagagggtggacacagtcctgcacccaccagtgccctacccccatgctaacaccactagcaggaccacacacacagtcaccagtcaggcctctgccctcctgagcctccaccgccactactgtgaatgcctgcatggaggcaggcatgctggcacctcctagcaccctgctgcagcaaacaagcatgcaccccgctgtgctgccactgccaccactgctgacacatgcaaacaaagatgaatcccactaccatcaccctatgaaacactttagctgttaccactcattagagtgtagtgaccagcggtctgtgagcacctcggcccttctagcacagcaggttcataatttcaaggagccaaagaacaaagcagaggcttgatagcagtcatccagagttagcacatggagttccggagtcctgagctgaggcttggcctcctaaaatcttccagaaatgaacccagtcaactgaacccaccttttgccacaatcaaaccccaaggtcctcaaatagaatraaatttaaaaacatccaaaggacagtgacttcaaagattgaagaaacatcagctgataaaaatgagtgcaagaactatgacagcttgaaaagccagagtgtcttctttcctccaaatgacagtactagttcttcaacaagggttcttaaccaggctaagatggctgaaatcacagaactagaatgcagaatatggaaagaaatgaagataattgctccatcttttcagtcttctggattcaagacacaacaatattgaaattaggccaactaataaccatgcaatggcctttaagtgttcaagtgaaacgaagagtcacatgtttctcactttaaatcaaaagcttgaaatcattaagcttagcaaggaagacacgtcaaaagctgagaaaggacaaaagctagggctcttgcaccaaacagcccaagttgtgaatgtgaaggaaaagttcttgaaggaaattaaaagtgctactctagtgaaaacacaaacgataagaaagcaaaacagtcctattgttgataaaagttcctaactgtcttcaattctttgaaggctgagaaaagtgaggaagctgcaggagaaaagttggaagctacctgagcttggttcatgagttttatggaaaggagtcatctccataacacaaaagtgcaaggtgaagcaacaagtactgatgtagaagctgcacaagttatctagaagatctagctaagataattggtgaagatggccacactgaaggacagatttttcaatatagatgaagcagctttctattggaagaagctgctacctagtactttcataattagaaagaagaagtcagtgtctggcttcaaatttccaaaggacagcctaacttttgttagggtttaatgcagctggtgacattcagatgaagccagtgctcatttatcattccaaaaatcctagggcccttaacaattataataaatctattctgcctgtgctctataaatagaacaaaaaagcctagatgatagcatgtctgctcacagcatggtttactaaatattttaaggtcactgttgaggtgcactgtgcagaagaaaaggtttctttcagagtattactgctcaataacagtacaccaagtaatctaggagctcttatggagatctgcatgcagatgaatgttttcatggccgctaacataatatccattctgcagcccatggatcaagtagtaactttgactttcaggtcttattatttaggaaatacactttgtatggccatagctgccatagattgtaattgctccaatgtacatgggccaagtaaataaatttctgggaacaattcactattctagatgccattaagaatattcatgattttgggcggagacaatggggttttctaaatatacaatcatgtcatgtgcaaacagggacaatttgacttcctcttttcctaattgaatatcctttatttctttctcttgcctgattgccctggccagaacttccaacactatgttgaatgggagtggtgagagagggcatccgtgtcttgtgctggttttcaaagggaatgctccttaagctgataagcaacttcagcaaagtctcaggatgcaaaatcaatgtgcagaaatcacacggattcctatacaccaataacaaacaaacagagagccaaatcatgagtgaattcccattcaaaattgctacaaagagaataaaatacctaggaatccagcttacaagggatgtgaaggacctcttcaagaacaactaaaaaccactgctcaacgaaataaaagaggaacaaacaaatggaataacattccatgctcatgggtaggaagaatcaatatagtgaaaatggccatactgcccaaggtaatttatagattcaatgccatccccatcagactaccaatgacttccttcacagaattggaaaaaactgctttaaagttcatatggaaccaaaaaagagcctgcattgccaagacaatcctaagcaaaaagaacaaagctggaggcatcacgctacctgacttcaaactattctacaaggctacagtaaccaaaacagcatcgtgctggtaccaaagcagatatataaaccaatggaaccgaactgagccctcagaaataacaccacacatctagaaccatctgatctttgacaaacctgccaaaaaaaaaaaaaaaaagcaatggggaaaggattccctatttaataaatggtgctgggaaaactggctagccatatgtagaaagctgaaactggatcccttccttacaccttatacaaaaattaattccagatggattaaagacttaaatgttagaactaaaaccataaaaaccctagaagaaaacctaggcagtactattcaggacataggcataggcaaggacttcatgactaaaacaccaaaagcaatggcaacaaaagccaaaatagacaaatgggatctaattaaactaaagggcttctgcatggcaaaagaaactatcatcagagtgaacaggcaacctacagaatgggagaaaatttttgcaatctacccatctgacaaagggctaatatccagaatctacaaataatttaaacaaatttacaagaaaaaaaaaccccatcaaaaagtgggcaaagcatgtgaacagacacgtctcaaaagaagacatttatgcagccaacagacatgaaaaaatgctcgtcatcactggtcatcagagaaatgcaaatcaaaaccacagtgagataccatctcacaccaattagaatggcgaacattaaaaagtcaggatacaacagatgctggggaggatgtggagaaataggaatgcttttacactgttggtgggagtgtaaattagttcaaccattgtggaagacagtgtggtgattcctcaaggatctagaactagaaataccatttgacccagcaatcccattactgggtatataccgaaaggattataaatcatgctactataaagacacatgcacacgtatgtatattgtggcactattcacaatagcaaagacttggaaccagcccaaatgtttatcaatgatagactggattaaggaaatgtggcacatatacaccatggaatactatgcagccataataaaggatgagtttatgtcctttgcagggacatggatgaagctggaaaccgtcgttctcagcaaactatcacaaaaacagaaaaccaaataccgcatgttgtcactcataggtgggaattgaacaatgagaacacttggacacagggtaaggaacatcacacactggggcctgttggggggtgaggggctaggggacggatagcattaggagaaataccttatgtaaatgacgagttgatgggtgcagcaaaccaacatgacacatgtatacctatgtgtcaaacctgcacattgtgcacttgtaccctaaaacttaaagtataatttttctaaaaaaaagaatattcatgatttatgggaggaggtcagaatatcaacattaacagaagtttggaaagagttgatgccaactctcatggatgattttgatgagttcaagacttcagtggaggatataacggcagatatggtgaaataccaagagaaatataaatagaagtggttcctgaagatgtgactgaattgctgcaatctcatgataaaacttgaatggatgaggagttgcttcttatggatgagcaaagaaagtgatttatttgatggaatttactcctagtaaagatgctgtgaacattgtcgaaatgatagcaaaggatttataatattatataaacttagttgaaaaagcagtgtcacggtttcagaggatcgtctccagttttgaaggaagttctgctgtgggtaaaatgcctgaaatagcatcacatgctacagaggaatctttcatgaaaggatgagtacatcgatgtggcacacttcattgttgtcatattttaagacattaccacagccactccaaccttcaaccaccagtaccctgagcagtcagcagccatcaacgtcgaggcaagacttcccaccagcaaaaagattactacctgctgaaagctcaaacgattgctggcattttttagtaataaagtatttttaattaagatatatacagtttttagatataatgttgttgcatacttaatagactacagtatattgtaaacataattacatgccaaaaaattgtgtgactggctttattgtgatactcactttactgtgacaattgctttattgcagtggcctggaactgaacctacattatctccaaggtttgacagtaatttaattcataatttgtgacttcaaaatcttaactagtattggaagtcctagccatagaattaaggcaagaaaaataaatgaaagacctacagattggaaagggagaaataaaactgtctctatttgcagatgacatgattgtttatgtagaaaaaatcccaacgaatctagaaaaccagagaacaactgtttttttttgcatttacaagtttaatataatatacacaaatcaattgctttccaacatactagcaatgaacaagtggaatttcagattaaaaacacaataccatttacattagcacacaaaaaatggcatacttagctataaatctaacgaaatatatgcaagatcaacacaaggaaaactataaaaatctgatgaaatcaaagaactaaataaatgaagagatattctatgctcatggatagaaagattcaatattgccaatctgtcagttcttcccaactttatagatccaataaaatctcaatcaaaatcttagtaagttactttgtgaatactgacaggctgattgtaaagtttatatagagacaccaaagactcagaatagccaacacaatattgaatcagaataacaaagttggagaactgaaactacctgactttaacacttactgcaaagctacaataattaagacagggtgttattggaaacaaacaaacaacaagtacaaatagatcaatggaacagaatggagagcccagaaattgacccacagaaatataatcaactcagctttgacaaaggaacaaagacaattcaacagagaaaggaaagtctttttaaccaatggtgccagaacaactcaacatccacatattaaaaaagaaaaaaattgaatctagacacagagcttacacactccacaaaatttaactcaatataggttatataacaaaacataaaacacaaaactatctgtatacgccatgccacgtatacagcacatgacatttatagaaatggtattattaatcgttatgtagaaatagtttatagactggaatcaaatgaaaatattgtttataaaattggaaaataaaaaattaggaaatattgtcagaaaaatataggtataactataatagatgatactatattctgaattataaataggaaagccaaaaaactaaaaaataaatcataaaaagtattatgccctgtcagctgggcacagtggctcatgcctgtaatcccagcactttgggaggccgagtccagtggatcacgaggtcaggagatcgagaccctcctggctaacacagtgaaaccccgtctctactaaaaatacaaaaaaaaaaaaaaaaaaaaaatagccagccgtgatggcaggcacctgtagtcccagctgctctggaggctgagacaggagaatggcgtgagactctgtctcaaaaaataataataaaaaaaaaagtattatgcttcgtcaaaagtttttttgaattcttagctaattctctttttatttttattattattattatactttaagttttagggcacatgtgcacaatgtgcaggtttgttacatatgtatacatgtgccatgttggtgtgctgcacccatcaacataggtgacttcaacgcaatcataggacacaatatcaacatacataaatcacttgtgcttcatatactagcaatgaacatacagacattgaaataaaaaatatatcattcataatcattcaaataaatacgtaaatgcaaatgtagcaaaacatgtataagatctgctgacaattagaaaatgctgataaagaaattaaagatctaaatgaatggagaggcacattgcatgttcgtggattgtcaaaatcaacacagtaaaaatgtcagcccttcccaaattggtatgcaattacaatacatttcctatgaaaatcgcaggcagattttttttggagatgtagtcaacattattctaaaatgtgtatgtaaagtcagcggaggtagaatagctaagacaatttgacaaagaagtataaggtgggaggaaccattatactcaatttcaagacatttatatggctatggtaatcaagtctgtgcggcagtggtagagggatagatacgaaactcaatagaagagaatagagaacccaaaagccgacctgcacagatacgcctaaattattacagaagtaattaaatgggggaaggatagtcttttcaacaaatgatgctgaacaatccattgccctctccgctcaaaattaaccttcacctacacctcatactttatacaaaatggatcataaatttaaatgtaaaatgctcaaactataaatcttttagaagaaaacttagaaaaatttcaggtaagtcacttgatactaaaagtatgattcataacaggaaaagttgatatattagacctcaataaaattaaaaacttttcctctacagaagctacagagctacagactgggagaaaatactacaaataacgtatccagtaacaaactagtatctagaatatatcaagaactcttaacacgtaatagtaaaagcaagcctagttaaaaataggcaaaagacataaacatttcactgaagaaaatataacagatggaaaataagcacatgaaaaggtgtgcagagattgaggccatctcactctcagcatgcattacattccgccaccgttgctgccattccgctcccgtagttgtctccacctgatctgctctcatgctggggttgaggaagggagttgtacagggagaggagaaggcctcagctgaggcagttgaggaggaggaaggaagcagtggcacagccggcatagcagcacaggcagcctggttcctgggagtgtcggtgtggcatggtggttggggcagatcctgtggggcctgggtaggggaaggagtcatcagctcgttcatagtggacaatgaaaaactagacagccaatggctcaagaattttgagaacaaagtccacaacttggggattatgagaagacagcaaaatgaagttgtagttgaattaaggaagaataaaagagatgaacatctcttaaagagaaggaacgtactgaatgaagatacctgtgaagactgatacaaatgatgattatggagtgtaaaatacctctctagtagctattattcaaaatgcttcaagtgataactaagaaattcaattaaatgcagttcgggctgctaggaagctttgtccagtgatcgaagtctaccaatttataaaaataaaatctggaatactacctgttctagtctattgtcttgaaagagatgacaatgctttacagttagaagctgcatgggctttgacaaacactgcatctagaacctctgaacaagctcaaacagtagttcagtccaatgctgtgccacatttcctgaggctcctccattcacttcatcagaatgtttgtgagcaagcagtgtgggcattgagaactatcataagtgatggtcctcccgatgtagagattatgtcataagtcttggagttgtgaaacctttattttacttcaaaacattttttttttctgtgataggggctcacccaggctggaatgcagtggcgcaaacacagctaactgcaccctcaacctctggagctcaagaaatcatcctgccttagcctcccgagtagctggaaccacaagtgcgtgccaccacacccagctaaatgtttaaattgtttgtagagacagggtctcaccatgttgcctaggctggtctctaactcctggactcaagaatcctcctgcctcagcctcccaaagtgctagcattccaagtgtgagccaccatgcccagcctgggttatggccaatttatgtcaccacaaagagccaccaccaccaatggaaaccatacaggaaatgctttcagctctttgtgttctaattcatcatacatttgtaaatatattagtagatacagactgggccctctcttaccttactggtgctggcaatgaacaaatacagatggtagtagactctggaatagttcctcatttggttcctcttctcagccgccgggtggttcagactgctgcacctcaagctgtgagcaacatggctactggaattgaagagcaaacagaagtagttgtgaattatgatgctctttcatacttgtgggcaatcctgacacatcccaaagagaaaattaataaagaggcagtatggtttctctgtaacatcactgcaggtaatcagctgcagatacaggcagtaatagatgccaatattgtaccaagaataataaaccttttggataagggggatattggcactcagaagctgactgtaaaagatgcacaagttgtacaagtagtactggatgaattaatatattaaaaatggctaaaaatgaggcagaatccatagccaatcttatagaaaaatgtggaggactggagaaaattgaacaacttcaaaatcataaaaatggagacatctacaaattagcctatgagatgattgctcagttctcttcaaatgatattgatgaagatcttagccttgatccagaggcaattcaaggtggaacatttggtttcaatttatctgccagtataccaatagaacagttccagttttagaacagtattgtggaagttaggtacaatttatatacatacatacatacgtatatatgtatatacatatatatgtatatacatatatatatgtttatacatatatgtgtgtatatgtgtatatatatatgtatgtgtatatatatatatatatatatatatatatatatatatatatatatatataaatgtttgatccatcaagcttagctcatgggatctgcttctgcattaaattgggaaagaaaatgtgaagatttcatttggaatcacagaaaatgcccaaatgtggtcaagatggtgaatgggtatgagtgagaatgagtggcaaaatgtaatgaaaactttacatgaatgcttatttaggctgttcatagtaaaaagggctacaggtcacagatcttcagtgcctgagaaagaacattgacttactctatataaactgaggggaaagtgtagtactattatcttcaaggcttgtaaccgtaaaagagaattggatgcccacataagtaaaaggaaaatgagcctaggccttgctatgaagcagtgtccaaatggaaaatgttgaatgaatgtctggctcagtgatggacagtcagtatcatctttaaaatctagggctctcattcatgaattagactcctagtcctggagtgactatgtacaggagtgtggtagtggtgctgtatgtgaacacatgcaagcttgatttgccttcaggtggctgatagcctagtaaatcatcaaaatgagatcctgagtgttaatgtacactggacataaaaacaaatactggatcagcagcagacatttgtttactctgcaacttatgttttctatttccccttaccccttttcctccccgcccctgtaagtttttatttacctagtatggctttctttttagttgactctcaagtcagaaaacatttcaggaaggtttccctgtgcatttgcactgaatgaatgtttgatgctatgaatgtctttccttatcaaagctaatttgtgtagatttttgcatgaaaaaaatcataactttttctcaaaacagactgtgctgcagtacacaagttgccataatagtataaaacagtaaaatgtgcttaaaaggccatgcttttcactttcagagagaacataaagatctttgcatgaggtaaatttacagcatagttcattttcagattttgttgggtcctgtagagaagaagaagaaaaaagtttcagttgtgttagaataccatgctgtatttaaatgttacttgttttcaaactttgttttatatgaaaatgatgtggaaacttctaaaatggaatttggcacatatgtactgcttcataaagactgataaagtagtttttgtaaattgaataatacctcagttttgaggttatgtacagtaaatgtgatgtaatttatacagtaagaactctttataaggtggctcattttaggaaatcatgtgccttcccctttgagcacaagtattgtgtgaaccacagtttgctataagaaatatatcacgttaaccaccaatagcctctatatctactttgtgtttaaaaatcaactagtaattctgaaacactgtagaatggataaaaattgttttgtgaacataactctgttgaactagagtatttttgcagtgtgtcttgtcatcagaaatataaagtttaaaactagtaacagcagaaaactagcttatgaaatttatccaaatagagtacaagctaggctgtcttggagaaataaacattaaaacttaaaagaaaaaaaagataaatgttcaacatcattagccaatttggtaaatgcaaatgctcaatcagatactactacacatttatcagaatggctaaaataaaaaaaaatggttacaatacaaagtgctgtcaaagatactgaaaagctgaatttttcctgccttcctggtggggattatagtgactttgaaggattttacatctgataagaatcacgagatggcattaacgcacagcaaactttaagtgatcctttgacagatttgcacctgggaaaatccttcacagcacgaggccatccagactctctggtataggcctgagggcacaacccataaggggaggagggctaaggaactcatgaaggagacggagctgacatgtctattaatatatgatgttgctaggcagcacagcagggagtctgtgggtcagggaactctgaagaccagcagcagcttggggtctttattgccctacagtttttcttgtctatgggtagtagatattttgtgaagttttgcagtgtatgtaaagcaggcaggctctaatgcctaaaaatatactcatgtgggctatatttaaaacaattggctgtgtaacattttcagattggtactatcaagcttttcagctaatgggttcctaacctgtaatgaagaagtaaacagcatagggtccgaggggaggagccaagatggccgaataggaacagctccggtctacagctcccagcgtgagcgacgcataagacgggtgatttctgcatttccatctgaggtaccgggttcatctcactagggagtgccagacagtgggcgcaggccagtgggtgtgcgcaccgtccgcgagccgaagcagggcgaggcattgcctcacctgggaagcgcaaggggtcggggagttccctttccgaatcaaagaaaggggtgacagacgcacctggaaaattgggtcactccaacccgaatattgcgcttttcagaccggcttaaaaaacggcgcaccatgagactatatcccacacctggctcggagggtcctacgcccgcggaatctcgctgattgctagcacagcagtctgagatcaaactgcaaggcagcagcgaggctgggggaggggcgcccgccattgcccaggcttgctcaggtaaacaaagcagccagaaagctcgaactgggtggagccaaccacagctcaaggaggcctgcctgcctctgtaggctccacctctgggggcagggcacagacaaacaaaaagacagcagtaacctctgcagacttaaatgtccctgtctgacagctttgaagagagcagtgggtctcccagcacgcagctggagatctgagaaccggcagactacctcctcaagtgggtccctgacccctgacccccaagcagcctaactgggaggcaccacccagcaggggcacactgacacctcacacggcagggtattccaacagagggtcctgtctgttagaaggaaaactaacaaacagaaaggacatccacaccgaaaacccatctgtacatcaccatcatcaaagaccaaaagtagataaaaccgcaaagatggggaaaaaacagaacagaaaaactggaaactctaaaacgcagagcacctctcctcctccaaaggaacgcagttcctcaccagcaatggaacaaagctggatggagaatgactttgacragctgagagaagaaggcttcagacgatcaaattactctgagctacrggaggacattcaaaccaaaggcaaagaagttgaaaactttgaaaaaaatttagaagaatgtataactagaataaccaatacagagaagtgcttaaaggagctgatggagctgaaaaccaaggctcgagaactacgtgaagaatgcagaagcctcaggagccgatgcgatcaactggaagaaagggtatcagcaatggaagacgaaatgaatgaaatgaagtgagaagggaagtttagagaaaaaagaataaaaagaaatgagcaaagcctccaagaaatatgggactatgtgaaaagaccaaatctacgtctgattggtgtacctgaaagtgatgaggagaatggaaccaagttggcaaacactctgcaggatattatccaggagaacttccccaatctagcaaggcaggccaacgttcagattcaggaaatacagagaacgccacaaagatactcctcaagaagagcaactccaagacacataattgtcagattcaccaaagttgaaatgaaggaaaaaatgttaagggcagccagagagaaaggtcgggttaccctcaaagggaagcccatcagactaacagcggatctctcggcagaaaccctacaagccacaagagagtggaggccaatattcaacattcttaaaggaaagaattttcaacccagaatttcatatccagccaaactaagcttcataagtgaaggagaaataaaatactttacagacaagcaaatgctgagagattttgtcaccaccaggcctgccctacaagagctcctgaaggaagcgctaaacatggaaaggaacaaccggtaccagctgctgcaaaatcatgccaaaatgtaaagaccatcgagactaggaagaaactgcatcaactaacgagcaaaatcaccagctaacatcataatgacaggatcaaattcacacataacaatattaactttaaatgtaaatggactaaattctccaattaaaagacacagactggcaaattggataaagagtcaagacccatcagtgtgctgtattcaggaaacccatctcatgtgcagagacacacataggctcaaaataaaaggatggaggaagctctaccaagcaaatggaaaacaaaaaaaggcagggtttgcaatgctagtgtctgataaaacagactttaaaccaacaaagatcaaaagagacaaggccattacataatggtaaagggatcaattcaacaagaagagctaactatcctaaatatatgtgcacccaatacaggagcaccaagattcatgaagcaagtcctgagtgacctacaaagagacttagactcccacacattaataatgggagactttaacaccccactgtcaacattagacagatcaatgagacagaaagtccacaaggatacccaggaattgaactcagctctgcaccaagcagacctaatagacatctacagaactctccaccccaaatcaacagaatatacatttttttcagcaccacaccacacctattccaaaattgaccacatagttggaagtaaagctctcctcagcaaatgtaaaagaacagaaattataacaaactatctctcagaccacagtgcaatcaaactagaactcaggattaagaatctcactcaaagccgctcaactacatggaaactgaacaacctgctcctgaatgactactgggtacataacgaaatgaaggcagaagtaaagatgttctttgaaaccaacgagaacaaagacacaacataccagaatctctgggacgcattcaaagcagtgtgtagagggaaatttatagcacgaaatgcccacaagagaaagcaggaaagatccaaaattgacaccctaacatcacaattaaaagaactagaaaagcaagagcaaacacattcaaaagctagcagaaggcaagaaataactaaaatcagagcagaactgaaggaaatagagacacaaaaaacccttcaaaaaatcaatgaatccaggagctggttttttgaaaggatcaacaaaattgatagactgctagcaagactaataaagaaaaaaagagagaagactcaaatagacacaataaaaaatgataaaggggatatcaccaccaatcccacagaaataaaaactaccatcagagaatactacaaacacctctacgcaaataaactagaaaatctagaagaaatggatacattcctcgacacatacactctcccaagactaaaccaggaagaagttgaatctctgaatagaccaataacaggagctgaaattgtggcaataatcaatagtttaccaaccaaaaagagtccaggaccagatggattcacagccgaattctaccagaggtacaagggggaactggtaccattccttctgaaactattccaatcaatagaaaaagagggaatcctccctaactcattttatgaggccagcatcattctgataccaaagccgggcagagacacaaccaaaaaagagaattttagaccaatatccttgatgaacattgatgcaaaaatcctcgataaaatactggcaaaccgaatccagcagcacatcaaaaagcttatccaccatgatcaagtgggcttcatccctgggatgcaaggctggttcaatatacgcaaatcaataaatgtaatccagcatataaacagagccaaagacaaaaaccacatgattatctcaatagatgcagaaaaagcctttgacaaaattcaacaacccttcatgctaaaaactctcaataaattaggtattgatgggacatatttcaaaataataagagctatctatgacaaacccacagccaatatcatactgaatgggcaaaaactggaagcattccctttgaaaactggcaacagacagggatgccctctctcaccactcctattcaacatagtgttggaagttctggccagggcaattagacaggagaaggaaataaagggtattcaattaggaaaagaggaagtcaaattgtccctgtttgcagatgacatgattgtatatctagaaaaccccattgtctcagcccaaaatctccttaagctgataagcaacttcagcaaagtctcaggatacaaaatcaatgtacaaaaatcacaagcattcttatacaccaacaacagacagagagccaaatcatgagtgaactcccattcacaattgcttcaaagagaataaaatacctaggaatccaacttacaagggatgtgaaggacctcttcaaggagaactagaaaccactggctcaaggaaataaaagaggatacaaacaaatggaagaacattccacgctcatgggtaggaagaatcaatatcgtgaaaatggccatactgcccaaggtaatttacagattcaatgccatccccatcaagctaccaatgactttcttcacagaattggaaaaaactactttaaagttcatatggaaccaaaaaagagcccgcatcgccaagtcaatcctaagccaaaagaacaaagctggaggcatcacactacctgacttcaaactatactacaaggctacagtaaccaaaacagcatggtactggtaccaaaacagagatatagatcaatggaacagaacagagccctcagaaataacgccgcctacctacaactatctgatctttgacaaacctgagaaaaacaagcaatggggaaaggattccctatttaataaatggtgctggggaaactgtctagtcatatgtagaaagctgaaactggatcctttccttacaccttatacaaaaatcaattcaagatggagtaaagatttaaacgttagacctaaaaccataaaaaccctagaagaaaacctaggcattaccattcaggacataggcatgggcaaggacttcatgtccaaaacaccaaaagcaatggcaacaaaagccaaaattgacaaatgggatctaattaaactaaagagcttctgcacagcaaaagaaactaccatcagagtgaacaggcaacctacaaaatgggagaaaattttcgcaacctactcatctgacaaagggctaatatccagaatctacaatgaactcaaacaaatttacaagaaaaaaacaaacaaccccatcaaaaagtgggtgaaggacatgaacagacacttctcaaaagaagacatttatgccgccaaaaaacacatgaaaaaatgctcatcatcactagccatcagagaaatgcaaatcaaaaccactatgagatactatctcacaccagttagaatggcaatcattaaaaagtcaggaaacaacaggtgctggagaggatgtggagaaataggaacacttttacactgttggtgggactgtaaactagttcaaccattgtggaagtcagtgtggcgattcctcagggatctagaactagaaataccatttgacccagccatcccattactgggtatatacccaaaggactataaatcatgctgctataaagacacatgcacacgtatgtttattgcggcattattcacaatagcaaagacttggaaccaagccaaatgtccaacaatgatagactggattaagaaaatgtggcacatatacaccatggaatattatgcagccataaaaaatgatgagttcatgtcctttgtagggacatggatgaaattggaaatcatcattctcagtaaactatcgcaagaacaaaaaaccaaacaccgcatattctcactcataggtgggaattgaacaatgagatcacgtggacacaggaaggggaatatcacactctggggactgtgttgggggcgggggagggggaagggatagcattggaagatatacctaatgctagatgacgagttagtgggtgtagcgcaccagcatggcacatgtatacatatgtaactaacctgcacaatgtgcacatgtaccctaaaacttaaagtataattaaaaaaaaaaaaaaaaaaccagcatagggtccatatacagaggctatctgtggttcatttatataacagtccgtcctctggccccatggtattttttgcttgttttggtttttgtaaaatatacataacataaaatttaccattttaaccattttaagtgtacagtgtaatcagcaatcagaagttgtgcatctaccatcattatccatttccagaactctttcatcatcccaaacagaaactccatagcataacaaaataactctccattttcccctcccagcagcccctggcagccctctattctactttctggtctttatgaatttacctattctaggtagctcatgtaagtgaagtcatagaatatttgtttttgtatgtgtttgtgtctggcttatgtcacttagcatagtgttttcagggtccatccatgttgcagcatgtatcagaacttcattcctttttgaggctgaaaaatattctattgtatggatatagcacattttgtttagtcatccattgatggacatctgggttgcttctaccttttagctttggctaataatttgtctatgaatattggtattcaactgtctgtttgatttcctgcttcgagttctttggggtataacctaaaagtggattgttggatcatatggtaattttatatttaactttttaaacgacttcgaagttgttttccacagtggctgtgccattttacattcccatcagcaatgcacaaggactctattttttctgtatcctcaccaataattgcatttttccttttattttttggatagtatccatcctagtgggtatgaagtagtatctcgtggtttcgatttgcattttccttatgactagtggcattgagcatattttcatgtgcttattgtccatttgtatatcttctttggagaaatatctattcaagtccattgcccatttttgaattgggttgttttttgtggttgagttttaggaattctctatatattctttatatcaatcccttaccatatatatgatctgcaaatattttctcccattctctggttacctttttattctcttgatagtatcttttgatgcacaaaattttgataaagtacagtttatcaatttattctttgttgcctgtgcttttagtgtcatgttgaggaaatcattgccaaattccatgtcatgaagatttccccctatgttctcttctaagaattttacagttttagtcttgtaaatcttgtgagagaaaaaaagaattttacagttttagttcttgcatttaggtttacctcaagagaatctaggaaacaattttgtgtgtgtgtgtgtgtgtgtgtcagaaacatctcattttaagttttattcaggtgcacttacgggagagccaaagtaatagcttcctttagtttatctagtacctcgttgctcaggttctcactgaaaagtgagacttacaggtgactcagtagcaaatattggaggtgaggagtgtgttggagccagaatataaacattcctatcaaatgttggatcttctttaccagtgtgggaggttggagcactaggagcttgtcttaccagactgagaatacttcacccttctgagttccaaaggtaaccccaagatttaataaagaggtcttgtaccttatgtgggggcagttgcccatctgctataggcgatatttatgttctcccaaattcatatgttgaaatcctaactcccaatgtgatggtattaggagataaggcctaggcattaagagaaggcaaagccctcatgaatgggattagttcccttataaatgagaccccagagacattgttttctccttctgtcatgtgaggacacagcaaaaagacagtcatctatgaagtaggaagaggaccttcaccagatgccaaatctgctgtcatctcgatcttgcacttcctagcctccatgactgtgaggaataaatatctattgtttataagccacccaatttatggtattttgttatagcagcctaagtggactaagataccatcccctctcattgaagtgtttgctcacagttgtgataacctcagagacagaatcttggtaagatttagtaaggaggattttatcaatataatgccaaagctgaatttctggtggaaataatggggcaggcatctaggtcatatctgcacaagttcgatcacagggctatttgagtatcccataggtggctgggaaaaaatatactcttcaccctcaaaagtgaaggcaaattgtgattaactctcctacaaaatatttcccaattggagcatgttaggcaagtctataactccatgccatttatctatgttgttttgaatgtcatccattaaggtgatgatatctagtagaagtgctccaataaaaaggtgctcttatttaactctctatagttagcttccatttattaatagtggctttacacataggctataccagaggattgacaggtgagatggtaagaatcagtacacgttatttaaataagctatgatagcctataatccttcagggtcttgccttagcttgtactgtgccgtatttaccacctgccctggtaggggaaagttaactggttcccaccaggtagtgcccaccaataccataaaagccttaggttctatggagttacgagctgattgaagaagtccattcaaataaggaaaggggatagtctcaggggtacaaccagaatcaaagcatcttttagcagaactggatcaattttaatagttaagtaagtaattgctcctttacataatcatcctcctggacagggtgaggagtgaggggattcctttagagcatgagtgattcttaggattagggagatttgggcacccatgtccaacaaagccagccaatgttgtagagccaaactacagttaatatggtaaaagggtgattgtctactggaagtagccaccttctgcaaccaccagatccctatgtgggtgtgggtccctgccactggaggagatcaggagcaggcttcccaagtgaggctgactttgaatacctgctgcagattgtaatctaaccctagtaaatgttaatacttgcttcaccaatgtatgagagaacatccaatttgggcccctttgtcccttagggtccaatgtaaccccttttgtttactcagggttcaagctaaaccacggacctggctctacgtggtttgcttggtctagaagggtgcagcataactgttgatagtaattttgatttaggctagaaggggttatagtcatagaattaacaggcaacacttgagtttgtctttcatgtatttctactaaatccagtgaagctatgaactcttcagttgttttagcattagccattattgcccaaaaagaggacttacacttatcaggcgccctcctgagaaataagtcgttagacaagggattgaattccgtttcctctggacttgccaagtcatcatgctgcaggtcatctgttgcctgataaacccacttcagcatccccagctgatgtaggagatctttgaccttggttaacattttccattgacagtcttcccaggcctttataaggcctagtataggatggaaagcccaccaagccaagccgtaaaaatccacatcaacaaggtatatgtggactgaggcacaaagcctcttttgagggtcactcctaccttccatgcttattatgcgggatactttggcagtgacaccatttttttccatcttgtactatggcagccaattgtttaattcccctattaggtggagtttgctccctgccagatacattctgtatatatagtcaggcagcccctttttcattcagttcctgggtcaggtccttacggagagactggacataagggcaagaaagatgatgcattttctgctccaaaagagaagtggccctcttcttttgtttttctgtctttatgactttgccagtggttactggcaaagcagagggtaaatgatcctagtccctagcatgatgacaccatgctgctgctttcttctttagaggtcaccagttctcttccccaggatcttcccttccaactcatctcctgcaggagtttgagtttctacctcctctctgtgcaaaccctggtgaaaagcaaccaacagcgaggtccaacatgcacctactttatggtttggagcatcccttgagtaggatagccacttcctttggtgtcctggaatgtaactttccttgatttagtcacttgaaataatgctttagtcggctcagccaaaagatggagagctcaacatacttccaacaaaggactagaatgagagtatctaaagcataattgtcatgatagcagaggactactagctgcttgcaagtgtctcccaattgtgcttaggagaccagcatcggactgacatatctgccttatcagcttgtttgcctgccatagcagtgtccaaggacaaggatattctctcatctcagagtattctcatcacatatcaccagtctggacatggggaactctcctactatagcccattatgggatctggggtaacccacatgtggtccagaggtatgtactttccctttttctattcaggcccacaggtgcctacctagtgcctttctagtgggagatccaggtgatcaggctgaccttccctgggcagcttggtgcctctctctcaaaagtcagttctgatggcgaggatttactcaaatactggcactaccacttgtccaggctcatgaggcatgggggagaccatagaaaatatagagtgtaattcagtacagaagaatgccatgccaaagttatgcgaacgtgttccaaattctgagtcccaagcacttaaggtcgtccagggttgttttgacagttaatcctcctattgacttggtaggtcccatattgatttcctggtcatcaccaaaattccatccttgttgccacttgtaatgagttgagggatttcaggactgatcaaggaaagaaggaaaagatatgaccacagtagcacacaacaagctttttgaggggtgtgtggggtgttcagcaggcaacactttgacaggttagcatgagtgtagaggccagcacgcagaaggggaggaaggcaaggaaacttctcttcaagaaagaggaatatcagaggggcttacgtgtttagatgactaggcagcatgtcaggaagttgctgggtcagagggttctgaagggcagcagtgatgtggggtctttattactctggagttaatcttatctttggttagcagatgttgggggcagttttgtggggtatgcaagacaggcaggctctaaagggttaaaaatatgcttagtttggctatttaaaacaattggatgtgtaaaaatttgagtttggtactagcaggcttttgagtgaatgagttcccagcctgctaagaaaaaataaacaacataaggtccatatgcagaggctacctttggctcatttatgtaatagaaatatgaaatagtatggagccactttgaaaaacagtttgtcagttttctaaaaaattgaatatgcaaatgccatatgccccaacaattgtacaaattgtactcttggccatatatgccagaaaaaaatcaaactttctgtttatatgaaaacctctacatgaatacttatagcatttttattcatatagtcaaaaactgaaaacaacccagatgtccttcaacaggtaaagggttaaacaaactgtggtccatctgtaccatggaatactgctcagcaataaagaacaaactaaatatatgcaacaccttgcagagaatatgttaagtgaaaaatgccaatttcaaaatgctatgtactgtatggtttcatttacataaatttcttgacaaaattaaagaaatagagaacagattaatggttatgaagggctaaggacagagtccacactccgaggaggtggtgggtatgagggggaggtgggtgtggctactaaaggagagcaggagtttgcctagtggaattgttggtatcttgactatcagtttcagtatcctggttgtgatattgtactgcagttacccactggggaaactgggtaaagagtccatgggaacgctattatttcttttttttatatatatatacaaaatgtttaatgtgcatctggtcagagatggtaataaatgttataagtaaaatataagataaaaaactaaacagcatgtgcaagatcctctggttcataaggtgatcaggggcttggtcttgtgtcccacgactcccagtttagtgctctttgtcctgctagtaatttacttttaagtgtagtaaaatgcacttaaaatttacctttttgaccatttttaggtgttagttcacttttttaggttttaggttagttccaagaaggtccattaccttcttgaccatttttaggtgttagtccacttttttaggttttagattagttccatttttaggttttaattcagtagtgttaggtcaatctttagaactttttcatctgaaaccctacctattaaacaaatcatttcaactgaaaccctaaccattaaataaatcattccacctacccctgacaaccaccaatctactttctatctctgaacatgacttgaccaggtacctcatataagaggaatcatacaatgtttttccttttgtatctggcttattttacttagcgtagtgtccccaaaagtcatccatattgtagcatgtgtcacaatttccttcctctttaaggctgaataatatttaattggttgtatataccatattgtttttatcatctggcagtggacgttgggttgcttcctcattttggcttttgtgaataatactgaatggaacatttttgtaaaagtatatttttgagtccttgctcccaacttaatttttttttttttttttttttttttgcgatggagtctcactctgtcacccaggctggaatgcagtggcacagttatagcatattgtaatccctaattcctgggctcaagtgatcctcccacttcagcctcccaagtagctaggactacatacatgtgccaccacgcccagctaattattttatttttgtagagacagggtcttgctatgttgttcaggctcctattcttttgatacgtatctggaagtggaatttctggattatatgttaaatctgtttttacgttgttgaggaagcaccatagtgttttaaataatggctgcatcattttatattcccaacagcagtggacaaggtttccaatttttccacatcctcaccaaaacttgttattctttgttctttgttccttttattgggatagtagccattctaatgggtgtgaggtgatatatcattgtggttttgattttcatttctctattagtgttgttgaacatctttttaatgtgtgtcttgtccattttaatttctttggagaaatgacaaagtcctttgcacactttataattgtttttcattgttgttgttgttgttgtagaagtttttaatatattctggatatttatatatatatattttttattatactttaaattctagggtacatgtgcacaacatgcaggtttgttacatatgtatacatgtggcatattggtgagctgcaaccattaactcttcatttatattagatatatctcctaatgctatccctcccacctgcccccaccctacaacaggccccggtgtgtgatgttcctcaccctatgtccaagtgttctcattgttcatttcccacctatgagtgacaacatgcggtgtttgggtttttgtccttgcgatagtttgctgagaatgatggtttccagcttcatccatgtccctgcaaaggacatgaactcatcattttttatggctgcatagtattccatggtgtatatgtgccacattttctaaatccaatctatcattgttggacatttgggttggttccaagtctttgctattgtgagtagtgacgcaataaacatatgtttgcatgtgtctttatagcagcatgatttatattcctttgggtatatacccagtaatgggattgctgggtcaaatggtatttctagttctagatccctgaggaatcgccacactgtcttccacaatggttgaactagtttacagtcccaccaacagagtaaaagtgttcctatttctccacatcctctccagcacgtgttgtttcctgactttttaatgatcgccattgtaactggtgtgagatggtatctcatagtggttttgatttgcatttctctgatggccagtggtgatgagcattgtttcatggctcataaatgtagctgttggctgcataaatgtcttcttttgagaagtgtctgttcagatcctttacccactttttgatggggttgttcgttttttcttgtaaatttttgtgagttcttttagattctggatgttagccgtttgtcagaggagtagattgcaaaaattttctcccattctgtaggtttcctgttcactcttatggtagttttttttttttttttttttttttttttttttttttttttttttttttttgctgtgtagcagctctttagtttaattagatcccatttgtcaattttggcttttgttgacattgcttttggtgttttagacatcaagtccttgcccatgcctatgtcctgaaaggtattgtctaggttttcttctagggtttttatggttttaggtctaacatgtaagtctttaatccatcttgaattaatttttgtataagatgtaaggaagggatccagtttcagctttctacatatggctagccagttttcccagcaccatttattaagtagggaatcctttccccattgcttgtttttgtcaggtttgtcaaagatcagatagctgtagatgtgtggtattatttctgagggctctgttctgttccattggtctatatctctgttttggtagcagtaccatgctgttttggttactgtagccttgtagtacagtttgaagtcaggtagcgtgatgcctccagctttgttcttttggcttaggattgacttggcaatgcgggctctttttttggttccatatgaactttaaagtagttttttccaattctgtgaagaaagtcattggtagcttgatggggatggcattgaatctataaattaccttaggcagtatggccattttcatgatattgagtcttcctatccatgagcatggaatgttcttccatttgtttgtatcctcttttatttcgttgagcagtggtttgtagttctccttgaagaggtccttcacatcccttgtaagttggattcctaggtattttattctctttgaagcaattgtgaatgggagttcactcatgatttggctctctgtttgtttgttattggtgtataagaatgcttgtgatttttgcacattgatttttgtatcctgagattttgctgaagttgcttatcagcttaaggagattttgggctgagacaatggggttttctagatatacaatcatgtcatctgcaaacagggacaatttgacttcctcttttcctaattgaataccctttatttctttcttctgcctgattgccctggccagaacttccaacactatgttgaataggagtggtgagagagggcatccctgtctgttgccagttttcaaagggaatgcttccagtttttgcccattcagtatgatattggctgtgggtttgtcataaatagctcttattattttgagatatatcccatcaatacctaatttattgagagtttttagcatgaagggctgttgaattttgtcaaaggccttttctgcatctattgagataatcatgtggtttttgtctttggttctgtttatatgctagattacgtttattgatttgtgtacattgaaccagccttgcatcccagggataaagcccacttgatcatggtggataagctttttggtgtgctgctggattcagtttgccagtattttattgaggatttttgcatcaatgttcatcagggatattggtctaaaattatcttcttttgttgtgtctctgccaggctttgatatcaggatgatgctggcctcatgaaatgagttagggagcattccctctttttctgttgattggagtagtttcagaaggaatggtaccagctcctccttgtacctctggtagaatttggctgtgaatccttctggtcatggacttttttgtttggtaagctattaattattgcctcaatttcagagtctgttattggtcaacatcttcctggtttgctcttgggagggtgtatgtgtcgaggaatttatccatttcttctagattttctagtttatttgcgtagagttgtttatagtattctctgatggtagtttatatttctgtgggaacagtggtgacatcccctttatcattttttattgcatctatttgattcttctctcttttattctttattagtcttgctggcagtctatcagttttgttgatcttttcaaaaactcagttcctggattcattgattttttgaagagttttttgtgtctctgtgtccttcatttctgctctgatcttagttatttcttgccttctgctagcttttgaatgtgtttgttcttgtttctctagttcttttaattgtgatgttagggtgtcaattttagatctttcctgctttctcttgtgggcatttagtgctataaatttccctctacacactgctttgaatgtgtcccagagattctggtatgttgtgtctttgttctcgttggtttcaaagaacatcttcatttctgccttcatttcgttatgtacccagtagtcattcaggagcaggttgttcagtttccatgtagttgagcagttttgagtaagtttcttaatcctgagttctagtttgattggactgtggtctgagagacaaaatttgttataatttctgttcttttacatttgctgaggagtgttttacttccaactatgtggtcagttttggaataggtgtggtgtggtgctgagaagaatgtatattctgttgatttggggtggagtgttctgtagatgtctattaggtctgcttggtgcagagctgaattcagttcctggatatccttgtgaactttctgtctcgttgatctgtctagtgttgacagtggggtgttaaagtctcccattattattgtgtgggagtctaagtctctttataggtctctaaggacttgctttatgaatctgggtgcttctgtattgggtgcatatatatttaggatagttagctcttcttgttgaattgatccctttaccattatgtaatggccttctttgtctcttttgatctttgttgatttaaagtctgttttatcagagactaggattgcaaaccctgcctttttttgttttccatttgcttggtagatcttcctccatccctttattttgagcctaagtgtgtctctgcacgtgagatgggtttcctgaatacagcacactaatgggtcttgactctttatccaatttgccagtctgtgtcttaattggagcatttagcccatttacatttaaggttaatattgctatgtgtgaatttgatcctgtcgttatgatgttagctggttattttgctcattagttgattcagtttcttcctagcttcgatggtctttacgatttagcctgtttttgcagtggctggtaatggctgttcctttccatgtttagtgcttccttcaggagctcttgtagggcaggcctggtggtgacaaaatctctcagcatttgcttgtctgtaaaggattttatttctccttcacttatgaagcttagtttggctggacatgaaattctgggttgaaaattcttttctttaagaatgttgaatattggcccccactctcttctggcttgtagagtttctgctgagagattctctgttagtgtgatggggttccctttgtgggtaatgtgacctttctctctggctgcccttaacattttttccttcatttcaactttgatgaatctgacaattatgtgtcttggaattgctcttctcgaagagtatctttgttgtgttctctgtatttccagaatttgaatgttggcctgccttgctagattggggaagttctcctggataatatcctgcagagtgttttccaacttggttccattctccctgtcactgtcaggtacaccaatcagacatagatttggtcttttcacatagtcccatattttttagaggctttattcgtttctttttattcttttttctctaaacttctcttctcacttcatttcattcatgtggtcttcaatcattgataccctttcttccaattgatcgaatcatctactgaagcttgtgygtacgtcacatagttcttgtgccatggttttcagctccatctggtcatttaaggacttctctgcattggttattctagttagccattcatctaatctgttttcagtgtttttaacttctttgccatgggttcgaacttcctcctttagctsgtagtagtttgatcatctgaagccttcttctctcaactcgtcaaagtccttctccatccagctttgttccattgctgttgaggagctgcgttcctttggagaaggagaggcgctctgatttttagaattttcagtttttctcttctgttttttccccatctttgtggttttatctacctttggtctttgatgatggagacatacagatggggttttgttgtggatgtcctttctgtttgttagttttccttttaacagtcaggacaatcagctgcaagtctgttggagtttgctggaggtccactccagaccctgtttgcctgggtatcagcagcagaggctgcagaacagcgaatattgctcaacagcaaatgttgctgtatgatcgttcctctggaggtttcatctcagaggggtacccagctgtgtgaggtgtcagtctgcccctactggggggtgtctcccagctaggctattctgggatcagggacccacttgagtaggcagtctgtccattctcagatctcaaactccgtgctgggagaaccactactgtcttccaagctgtcagacagagacatttaaatctgcagaggtttctgctgccttttgttcagctataccctgcccccagaggtggagtgtacagatgcaggcaggcctccttgagctgcagtgcgctccacccatttcgagcttccaggctgctttgtttacttactgaatcctcagcaatggcgggcacccctcccctagcctcactgctgccttgcagttccatctcagactgctgtgctagcaatgagcgaggctttttgggcgtgggaccctctgagccaggtgccggatataatctcctggtgtgccgtctgctgtgaccattggaaaagcgcagtattagggtgggagtgacccaaaattccaggtgccatctgtcacagctttgcttggctatgaaagggaattccctgaccccttgcgcttcctgggtgaggcgatgcctcgccctgtttcagctcagtcggtgggctgcacccactgtcctgcccccactgtccaacaagccctagtgagatgaacccagtacctcagttggaaatacagaaatcacccgtcttctgcatcactcacgctgggagctgtagactggagctgttcctatttggccatcttggagctctccccttctggatattaactccttactagatatatgatttgcaaatattttctcccattctgcaggttgccttttcactcttctgatagtgtattttgatacacaaaagtttaattttgatgtagcccaatttatccatttttattcttttggtcttatatctgtgatataagattgctgaattcagtatcatgatgttttatcctgtgttcactgtcaataattttacaattttcacccttacctttaggtcttttatacactttgagttaatttttgtttatggtgtaaagtaagagtccaactttattctttttgttgtctatttttttctaattttattttattttaggttccaggatacatgtacagaatgtgcaggtttgttacataggtaaacgtgtgccatggtggtttgctgcacctatcaacctgtcatctaggtattaagccccacatgatgctctccctacccccaccccttctgacaggcctcagtgtgtgttgttcccctccctgtgtccacatgtggttccaagtcttagctattgtgaatactgctgcaataaacatatgtgtgcttatatctttataatataattatttatattcttttgggtatatacccagtaatggcattgctgggtcaaatggtatttctggctctagatcattgaggaatctccaccctgtcttccacagtggttgaactgatttacattcccagcaacagtgtaaaagtgttcctatttctccccagccttgccagcatctgttgtttcttgactttttaataatcgccattctgactggcatgagatagtattgggtggttttgatttgtgtttctctaatgatcagtgaagttgagctttctttcatatgtttgttggccgcataaatatcttttttttttttttgagaagtatctgttcatgtcctttgccctctttttgatggggttgtttttttccttgtaaatttgtttaagttccttgtaaatttgtttaagttccttgtaaattctggatattagaactttgtcagatgggtagattgcaaaaattttctcccattttgtaggttgttcactctgatggtagtttcttttgctattcggaagctctttggtttaattagatcccatttgtcaattttagcttttgttgcaactgcttttggcaatttcatcataaaatctttgcccatgcctattttctgaatggtattgcctagattttcttctatggtttttatggttttgggttttgtatttaagtatttaatccatcttgagttaatttttgtataaggtataaggaaggggtccagtttcagttttctgcaaatggctagccagttttcccagcaccttttattaaataaggaatcctttctccattacttgttgttgtcaggtttgtcgaagatcagatggtagtagatgtgtggtgttttttctgagatctagattctgtttcatttgtctatatgtctgttttgggaccaataccatgctgttttggttactatatagccttgtagtatagtgtgaagtcaagtagtgtgatacctctagctgtgttctttttgcttgggattttcttggatatatgagctgttttttgatttcatattaatttttaagtagttatttctaattctatgtaaaatgtcaatagttctttgatgggaagagcattgaatctctaaattaccttgggcagtatggccattttcgtgatactgattcttcctatccatgaggatgcaatgtttttccatttgtttgtgtcctctttcatttccttgagcagtggtttatagttctccttgaagaggtccttcacatcccttgttagctgtattcctaggaattgtattctctttgtagcaattgtgaatgaagttcattcatgatttgactctctgcttgtctgttgggggtggtatagcaatgcttgagatttttgcacattgattttgtatcctgagactttgctgaagttgcttatcagcttaaggagcttttgaactgagacaataatgttttctggatataggatcatgtcgtcagcaaacagagacaatttgacttcctctcttcctatttgaataccctttatttcattctcttgactgattgccctggctggaacttccagtactatgttgaacaggagtagtgagagagggcatccttgtcttgtgcctatattcaaagggaatgcttccagcttttgcccattcagtatgatattggctgtgggtttgtcataaataactcctattattttgagatatgttctgtcagtacctagattattgagagtttttaacatgaaggacattgaattttatcgaaggccttttctgcatctattgagataattatgtggtttttgtcattggttctgtttatgtgatgaattatgtttattgatttctgtatgttgaaccagccttgcctcccagagatgaagccgacttgattgtggtggataatctttttgatgtgctactggattcagtttgccagtattttattgaggatttttgcatcaatgttcatcagggatattggcctgaagttttctttctttattgtgtctctgccaggttttggtatcaggatgatgctggcctcataaagtgagttaaggagaagtcgttccttttcaattgtttggaatagtttcagaaggaatggtaccatttcctctttgtacctctagcagaatttggctgtgaattcatctggtcctgggctttttttagttggtaggctatttattacagctgcaatttcagaacttgttatttgtctattcaataactcgacttcttcctggtttagtcttgggagggtgtatgtgtccaggaatttattcatttcagtttcattcttttgcatgtggatataaagttttcccagcacccatttgtttgaaagactgtcctttctgcattgaattatcttggcactgttatcaaaaatcacttcattgtatatgcaatggtttatttctgggttctccattctattccattggtccatatgtgtgtattcatgccagtacaatattgtactgattactgtagcttaataatatcttttgaagtcaagaagtgtgtgacctccaactttgtcttatttttcaagattgtttttgctattcagggtcccttgcaattccatatgaattttaggatgtattttttccatttctgtaaaaaaacaccattgtgattttgatggaaactgcattaaatctgtaaatcactttgggtagtattgacatcgtaacaatattaagtctttcaattcatgaacaggaaatgtctttccattcatttgtgtcatctttaaattctttcaacaatattttgtagtttattgtttataagcctcttacctgcatgcttaagtttagtgaaagcaggctttcttgtctcattcacaatcttaaaggtaaagctttcagtctttcaacattgagtatgatgtttagtattttcatgaagatttttgcatctatattcaacatcagcaatattagcctataattttctttggtataagggtaactctggctaacacgaaatgagtttggaagcatgccctcctttttgatttcttgaaataatttgagaagtgttagggggaaggggtggctttgggcacagcttcatcagacttaagtgttcctgcctgccagctctgaagagagcagtggatctcccagcacagcgcttgagctctgctaaggggcagactgcttcctcaggtgggtccctgaccccatgcctcctgactaggagatacctcccagcaggagtcgacagacacctcatacaggagagctctggctggcatctggcaggtgcccctctgggacgaagcttccagaggaaggaacaggcagcaatctttgctattctgcagcctccactggtgataaccaggcaaatagggtctggagtgggcatccagcaaactccagcacacctgcaacagaggggcctgacttttagaaggaaaactaacaaacagaaagaagtagcatcaacattggctgggcatggtggctcatgcctgtaatcccagtactttggaaggccgaggcgggcagatcacaaggtcaggagttcgagaccagcctgatgaacatggtgtaaccccgtctctactaaaatacaaaaaattagttgagcatggtggcgcccacctgtagtcccagctcctcaggaggctgaggcagggtaatcacttgaacctgggaggcggaggttgcagtgagctgagatctcaccattgcactccagcctggaggacaaagtgagactccatctcaaaaaaaaaaaaaaaaaaaaaaaaaaaaaaaccagcaaaataaatagcatcaacatcaacaaaaaggacatccacacagaaaccccatctgaacctcaccagctacaaagaccaaaggtagataaatccacaaaaatgaggaaaaaccagtgcaaaaaggctgagaattccataagccagaacgcctcttttcctccaaaggatcacaactccttaccagcaagggaataaaactagagggagaatgagtttgatgaattgacaaaagtaggcttcagaaggtaggtaataacaaactcttccgagctaaaggagcattttctaactcaattcaaggaagctaagaaccttgaaaaaaagttagaggaattgctaactagaataaccagtttagagaagaacataaatgacctgatagagctgaaaaacacagcacgagaactttgtgaagcatacacaagtatcaatagccaaattgaccaagcagaagaaaagatatcagagattgaagatcaacttaatgaaatatagcaggaagacaagattagagaaaaaagaatgaaaagaaatgaacaaagcctccaagaaatatgggactatgtgaaaggaccaaacctacatttgattggtgtacctgaaagtgatgaggagaatggaaccaagttggaaaacactgcaggatattatccaggagaacttccccaacctagcaagacagaccgacattcaaatccaggaaataagagaacaccacaaagatactcctcaagaacaacaccaagacacataatcatcagattcaccaaggttgaaaggaaggaaaaaatgttaagggagagaaaggttgggttacccacaaagggaagcccatcagactaacagcagatctctctgcagaaaccctacaaaccagaagagagtgggggccaatattcaacattcttaaagaattttcaacccagaatctcatatccagccaaactaagcttcataagtgaaggagaaataaaatcctttacagacaagcaaatgctgagagattttgtcaccaccaggcctgccttacaagagctcctgaaggaagcactaaacatggaaagcaacaactggtaccagctgctgcagaaacataccaaattgtaaagaccatcagcactatgaagaaatcgcatcaactgacaggcaaaataaccagctagcatcataatgacaggatcaaattcacacataacaatattaaccttaaatgtaaatgggctaaatgccccaattaaaagacacagactggcaaattggatagagtcaagacccattggtgtgctgtattcaggagacccatctcacatgcaaagacacacataggctcaaaataaagggatggaggaatatatacccagcaaatggaaagcaaaaaaaagcaggggttgcaatcctagtcttaaaacagactttaaaccaacaaaggtcaaaaaagacaaagaagggcattacataatggtaaagggatcaatgcaacaagaagagttaactatcctaaatatatatgcacccaatacaggaacacctaaattcataaagcaagttcttagagacctacaaagagacttagactcccacagaataatagtaggagactttaataccccgctgtcaatattagatcaatgagacttgaactcagctctagaccaagcctacctaatagacatctacagaactctccaacccaaatcaacagaatatacattcttctcagcaccacattgcacttattctaaaattgatcacataattggaagtaaaacactcctcagcaaatacaaaagaatggaaatcataacaaacagtgtctcagaccacagtgcaatcaatttagaactcaggattaagaaactcactcaaaactgcacaactacatggaaactgcacaacctgctcctgaatgactactgggtaattaatgatcctgaatgactactgggtaattattgaaattaaggcagagataaataagttctttgaaaccaatgagaacaaagacacagcgtttagagggaaatttatagtaccaaatgcccacaggggaaagcaggaaagatctaagatcagcaccctaacatctagaactagagatgttctaggtctagaactagaatctagatctagaactagatcaacaccctaacatctagaactagaatctagatctggaactagatcaacaccctaacatctagaactagagaagcaagagcaaacaaattctagcagaagaccagaagtgactaagatcagatcagaactgaaggagatagagacatgaaaaacccttcaaaaaaattaatgagtccaggagctgtttttttcaaaagatcaacaaaatagatagaccactagccagactaataaagaagaaaagagagaagaatcaaatagacacaatttaaaaagcattaattctttaaatatttgggagaattcttcagtgaagcctctagccctgggcttttctttgctgggagatttttgattcctgattcaatttctctacttaatattagtctgttcagtttttctttgtgatttagtcttggtaggttgtgtgtttctagggatttatccatttattctgggttatccaatttattggtacattgttgtccttatgatcttttttatttttgttgcatcggttgtaatatctccttttctgtttctgattttatttattcaagtcttctctttttatttcttggtctagctaaagttttatcagttttggaaatatttttttccaaaaaataaacacttcttagtttctttctttttttttttttttttttgagagagactcactctgttggcctggctgcagactggacgaggctcaagcagtcctccaaacctagctcccaagtagctgggactacaagcatgtgctattttctaaatgtttttttagcgatgggggcctctctatgtagtccaggctggtctcgaactcctggcctcaaacagttctcctgccttggcctcccaaggtgctgggattatagacgtgagccactgcacctggccccacctcttagtttctttgattttatattcactatttcatttatttcttctctaacctttattattccttcctccactacctttgggctagtttgttcttttcctagttcctgagatataaagttaggtttttgattttagatctttcttcttttttagtatcactataaattatcactataatttatcactataaatttctcttttttattaacatttttaattggccagtcataattgtatatatttcaggggtacaatgtgatgttttgatatatgaataaaatgtggaatgattaaatcaagctaattaacatatccatcacctcatttagacatcatttttgtggtgagacacttgaaatttactctcttctcttcagttttgaaatatgcaatacattattgtcaaccatggtcaccatgctgggcagaagacctcaaaaagtcattccttttatctagctgtatctttctaccctttggccaacatctccccattctctcctatctcagcctctgataaccacaattttactctctgtttccatgagtttgattgttttagattccaagtgtaagtgagaagatatagtttttgtctttctgtgtctggcttatttcacttacatagtgtcctccggttccttctacgttgtcacaaatgacagcatttatttcttctttaaggtagaatagtattccattatgtatgtatatatcacattttctttattcagtcatctattgatggactcttaggttgagtccatatcttgactcttgtgaataatgccagaatgaacatgagagtgcagatatttcttcaaaatactgatttcagttcctctacccagaagtgggattgctggatcatatggtagttctatttttaatttttgtcaaacctctgtaccattttctgtaatagctgtgctaataaatttccttcttaatactgcctttgctgcatcctacatgttttggtatgttgtggttttgtttgtttcaagatactttccaatttcccttttgatttcttctttgacccattggttgtttaagagtgtttaagttttttaatttccatatgttttaactttacaagtttcctttatgctattgatttctagtttcattccattgtgaacagaagaaaatacttggtatgattttaatcttcttaaatttgataagctctcttttatgacctaacatgtgatctatcttggagaatgttacatgtgcttttgaaaagaatgtgtattgtactgttattgggttgaatattctgtatatctgttaggtccatttggtccacagacttgttcaagtctgctatttgttttttgattttcctctctgattgttctatccataattgaaagtagagtatcgaagtaatctattactgtatttctgtctgtttctcccttcagttccatcagtgtttgctttacatatttaggtattttgatgttgaatgcatatacatttataattgttatattttcctgatgtattgatcctttcgtcattatataaaattcttcattgtctccgtgacattttttgacttacagttcattttgtctgatattactattgccacacctgctttttttaagttacaatttgcatggaatatctttttttatccctccactttcagcctatgtgtgcccttaaatctaaagtgagtctcttatagacagcatataataggatgtttttcttaaactattcagtcattctgtgtatttttattggggagtttaatccatgtatatatttcaagtaattattgataggggaggatttactgttgccattttgttcattttttctgtttgccttgtagggattttgttgttcttcttttcatttcttgctttcttcctttatgttttgttttttttgtttgtttgtttgtttagtttttatattagtatgctttgatttctttcacttctttcttttttttttaacttctgtaggtatttcctttgtaactacaatggggcttacataaaatgtctaacagtctaacactctgtcttaagcatgtaacaacttaacttcaattatgcacacattacacattttcttcttctctatgttattcatgtcaaagtttacatttatttatattgtatattcattagcatactttataattattctaatacttttttaaactttatactacaattaaaagtgatttacccacaaccattacagtaatatagtattctttattagtttatatacttaccttcaccaacaacttttatacttttttatgctactgtgttgctatttagcattctttcattttcattttcatttccctttcaatctaaggagaagacttccctttagatttcctgtaaggcaggtctgttggtaatgaactcccttagcttttgtttgtctgggaatgtcttgatctctctttcgtttttgaagaacagttttgctacatatatcattattggttcatagttttagttttccttcagtgctttgaatatattatcccactctctactctcttctgtcctgaaagtttttttttgctgagatgtctgctgatggtcctaatggattttcctgcatatgacaagttggttttatcttactgctttcaaaattctctctgtctttgacttttgacaattttattatcatatgtcttagtgtggatttctttagattcatcgtgttttggtcattttggcttcctagatctggatgtccatttccttcctcagatttagggggttttcagtcattacttctttaaataagatttctagtccttcctatattctcttgggactcccataatgcatatattggtctgctaattaatggtgtcccataggtcctttaagctattttatttttttattcttttttctttgtgtccttctgactggataatgacaaataatctgtgtttgagtctgcttagtcttttttctgcttgctctagtctgtcgttgaactcctctattggattcttcagttattgtattcttcagctttaagacatctgcctgttcttttacattttctgtctctttgttgaaattttcattttgttcatggattgttctcctgagctgcttgagattttccatgatggatatttctaattctatgtcgggtaattcatatattttcattagagtcagtttctggagttttagcttgtttctttgttcagattgtgttaccctttttctgcacgtcagaagaatccactctcaccccaagtcatatggattggccttgtacaggagaagacattcaccagccaaccaagccagagcttctgtgggcctttcaacccattgtcctagtttaaactgctgtctttgttattagtgtcccccaggcatccagagtatgtccagtttcatcagtgttcctagacaggtggcacaaaagccattcccttggtagctcctggagaatttagaatgctgtgtgcatgttccaactcttttcccttcccagggagaagctgggaactgggattttccccctaccctgtgttgagccaggtacaggagctgtggtacatgcctacatgctagttgaaactgccactttcttctctgtagccctcaggatactatcacatgccagaccctttcaactctttgaaacaggtgagamagaagccagtctttcaggtggcacctggagaagttgggatgttaggtgtgcagtccaacttcttccattctgagatagaagctgggaatgggggtttcctcctgatcctatggcactgtgctgggagttgggattatgatgagtggatgtttctgctttttctacagatgttttgtttacaatctggttggtttcatacttatccagggtgcagaagcctctccatgagttgctggatttctcataaagggaattgatccttgtgttgcaattaaatcagtgtatccattgggggaaggacagtccagggcttcctattctgccatcttgctgatgtcactcctctcccttattatttcataaaactacatgtgagtctataattatctcaaagtaaaatcataatttgattgtttaaaagaacctcaagtttgctcaagtctaaaatgtctccttcagctgagatttttctgctggtatctttactcttcccaattatgagcatgtccaggctttttaatgtcatcaaattacagtactcatgagattttcccacctactaagccaatattttcttggcacaaggaaaacattggtaatcaattactccagctaaactaacccacttttccccccatttttgtctatttgaggttctggtgtgggatgtataaccgctttgacaaagggctgcagcccaagcagagtatgctagagagcctcctggaaattaagaaacagagagcaatgctggagacagatgtgcatgaactagaaaaggtgaggagaaaagtcccaaagagagatcttcttgccccttctgggtaggtccagcctgcttggagttgaattgatacttgtggaaagctgactggctggcttttttatactctttggcttttcatgtgtcccgtgtctacaaatctctgagcataactccttttcttacttcccaaaatgtggtaaatatgtcactcaactagataaacaagtgaatttgttccctttatctctttttggatctggatggaatgaataggaggaacaagagggaatgactagggaaatcacatagcatttgttatccatcaagagaataagtataacatcttgggtatactgataagaacagtgcaattgctgttttccaattaggaaaatcttacaaaagaagattcttatttccttcccatgtaaactgcaaactctgcttattgagtgaccatgttggacacttgttttttaattacaggttacagaagtcaaaaagtatttcttgttgatttcataaactgagctgcttatgaaatgtaggaatccctaagggtttgtttgaaggacaggggaaaggtacctcttagaaaagaattattggaaatggtgtgctatttaggaactgggtgtgaacccactttaagccagataaggcatagcttttctgctccctgtaagtaaacaaatgtcattttattgtgaaaataaatgtgttgtgattacatcagatcccaaactttttaatgtcctcttgggaggcaacagccagttacttggttccattttttttaaaggtggaggggggcaaactaaagcataagttaaaatcgtaggaaacatgcatccccgagaaggcccagtcctaagtagattagatgtagtagagaaacttcttaacggctcctcttttagctactagcagattcttccacaaggccagggaaggtgccctattattgacccagccctctcacttatccctgcctgactcttgagagagaatcagattcatttcacatatacccagatcactctagaaagacttccttttgaagtgtgtatgtgtttttatgtatgtgtgttattaactttctttttttaatacagagcagaaaaacaaagctgctgataatatcacccagacaaccctgttgacttttttttaaaggcaatataagtgttaagttagaaaatacagaatacaacaaggtaaaaaatgaaaagtttaaaagactccccccaccaccttcagaaaaatgtatgcatttttctgaagagaaggtccataattttcatcagattttcaatggggacgtatgaccccaaagaatcactgttgtgaagtatcagtgaatcattatattatctctgaaagtgaaaatatctgttagaggtagcatgatgtagacgacaggtcatagactttggcatcaggcagatgcagggtcagatcccagttctttactttgtacatgtgcgaatttgggtgacttacttaacttctctgagcctcagtttcttcatttgtaaaatatagctaatacctaaactaataggtttattataaggataaaaggaaatactgtgtgtaaagtgcctagcacatagaggtattcaataaatattagtgatgttttcccctgccctctccccatctcatgaacaaaattgcacttatcataaaagatgacttttatagatataagacctttgacattcttcaatggtagggcttctaaagtactatgacatgtgatgagggaaagatgttgtgggggagggggtgagcaaaaggtcatttgctaccattataagtgacagcaataggatctctgcagatcaaggtaatgtttgcctagtttttctcctgtttctaattcttctcaaccctttcttgctcctgaggcagaaactaaaagtccgtgatgagccaccagaagagatctgtacctgctctcaattaggaaacatattatcccagcatctgggaagtcctttgaccaatcctcttggctttatgggtatcaatggagacctgaataccctgatggagaatggcaccctatccagggaaggaggcctccgagctcagatggatcaagtaaaaagccagggtgcagacctccaccataactgttgtgagaytgtgggcagccttagggccataaatatctctggggatgtgggcatctctgaggccatgggcatctctggagacatgtgcacctttgaggctacrggcttctccaaagacttaggaatctgtggggccatggacatctctgaggccactggcatctctggaaacttgggtatttctgaggccaggggtttctctggggacatgggcatcttgggggacacaggcatctccaaggccagcaccaaggaggcagactactccaagcatcagtgagttagttactcatcttccatgctaggtatacctacagcagctacaatgattcttgtcccagagagggctatgctgcttttccaattggtttaagtgggtgaagccagggcacccctctccccacttaagtctggaagggaattactttactgattaagtgaccaatatgttcatattaagcagtacagagtgtaggcaagagaaagaatatgttattgttctaaaatgggatttaactatagaaatgttgcctctcagctgagacacatattaagctggttctactgtctgttttccttaatgatcgacctgccctattttctatcctcactgcagtaatgtgaaagtgaagtggaaatattgtcacaatggtcaataatgacccttttgagggtatggagagatggtatacagcaggtaactgtgaattgcagaataaattgaaagaaaattttactttcaggtatgcttagtcatgggatgttagctaacattattgccaatggagacatacaatattttcctgagaaggaaatcaaaatgatgcttaattgttagcatgagtgcatgggtgcttggtggtttgaaacatgtaaggaaagttttcttaagttacaacacttgctttccccaacccacaccccagctaggtcttgttataatacttagccaattccttttttcatagatagcccataggtaaacttgaatccactacagtctaaaattataaatttcaaattaatggggtttgaattagtaacattaattgcatcagtttaggaagtaactgaaaatctcagtgcttcagactcagactgagacatggtctgtgtgcccatctgggtttgtgcaaaataggaccctttttaggtctttttatgaagacaagtggttttgcttatctagatatcacatgaggtttgtagattttttagacacaattggcactacttttaaatctggtaggtttatcacctttttttttttttttttttttttttgagacggagtcttgctctgtcgcccaggctggagtgcagtggggcgatctcggctcactgcaagctccgcctcccgggttcacaccattctcctgcctcagcctcccgagtagctgggactacaggcgcccgctaccacgcccggctaattttttgtatttttagtagagacggggtttcaccgtgttagccaggatggtctcgatctcctgacctcgtgatccgcccgcctcggcctcccaaagtgctgggattacaggcgtgagccaccgcgcccggccaggtttatcaccttgtgctaatgtacagttttgaaaaaagtccattctgatagcagatccagatacttctggggaaaaggatgtatttttatttaaacaccagtttttctcctaggggttgatacacttgatgggtttttcatctgtcctattggatattcagtcatgattttgctacttccacatactgagagtaggataggcctcagtcagtttgggtcatgctctgtatattctcagcaattccagaactcttaatgccaacagaatccaggtcttcacccaaaatctgttccaaatactctatatttggcttaagctaaaacattagatgacttaaagaggcatcccttgattatcacatccagttgtgcacatagaaatctctaaaggattacctcattaggtgctttcctttgaaagaaagaggtgccttttaagggtttaatttaaatataggagaggagtgccaggatagctccttgatttcttatctctagctgtaaactgtagacccaaaacatcctctttagtggaagaactctaaatcattttggttgtctttttttatatgtaagcaggagtcatttttctatttacttcctcttggtaaatttttaattttttgtttttgaataactcctaatttatttgggtctttcccattaataaataagggccatattttacttacatattcttgatagctgccttgatcctataattttaaagcatcaagacgatttcctttttttttttttttatctctctggtcctcctctttccatgctttagtccttgctttatataacctaaattatcagatgttgccagttgtcatttgacttcttttgggaaaaaaaaatggggtttgtgcacaccgttttaatctggaggctacatctactcctggctttgtgaaggaagttgccaaaaaggatgatggtaccaatctgcctccagtgagccattctggatcttgctcccagatctttctcccatatctcaatctgtattttgcagttcattaactagcatgatgttctggatagagtgtgtttagttttcagggaagctgaaagtaaaaaggtaaatggcaagatgtagtagtttttgcaaattctataaaaaactaaagagtcttgatttattcctaaagatctgtacagggacagtacatagtacctaatcttatgtcttagatcaaaaacaaaattagtcaatagtgaaaggaaggtcttttcaaaataattctaaactaagaagtagtaaaccacaaccctggtatttccaaaagcgaaaacaacatttttaaaagactggattattttgttaattatctaaggccatgggatcaatctcagtctcaaaatctgtgaggtcaatttgtttggtctttgatatttttattccccaacatgccacattattgcttacgtataaaatatacagaacttaaaaaataaactgcatgaaaatcaactatttattctcaacaccaaacaccttttagttttacagttggatttaaaaatctgagagaagaaaaagatggaatccaggtatttacacactattaaaagcagattagctatctataggtaggagcccagcaatagtgaggagactctttaaggcaagttgccaggaatactagaaaagatgatctattaatggctttcacttcatactctgatatagcacctatcctgtgaaagaaatgtgactcccttcacccactgtcctacctttccagttccccaagcagaaattccattctcatgtgactactctacttaaataggaaggcatttaaccacctgccactgtcatccactaatctgacctctgcctactttctacacaagtttcacaggcctggggttactgcttatcttttctatgcatgaggcaggctctgttcctgtgcttgtgaccatgctcagattctactgtggccactgttttaaaaattcattaattatttacttagtttatggaatgacagatttatcacagtaataaataaaacaattttaagtaacaaataacagctaacagtttgacgttttaaagaataaattcacgaataaggtttgctttatgaaagaaaacctgaaactctatatagaactaactacaagaatctaaagcttatggtgcatatattagacatgtgtatctttggaaagtacccttagaaattatgttcaattaccagcaagtcagttgtcattgcctgccaacatgcatgaaacaccttttgtctaagatacccctcacacttcactggaagtgagacctttctcagaacacttctagccaaaaggaatccaagtctttttaagaggtgcttttcaaacctaattggtaactatttaagcttggtcttaatttagtagaaagagaagtttaataactaaagatgatcatgtcagttctttgttacatactggcttttattaaacacccaactcttcttgatggtaattaggctttgatatactattgggaaatctttctatgagagtatttcattaagtgtcctttttctaaacaattgtgtagggtaatgtaaattacctttatgttaaaatatccttctcaaaaggggtttactgtactccagattggtttatacctaggaagataattctcactttattaatttccaatgtgtatgatttagtgatatctaaaccaaatctttaccccacctttaggcgtctcactctgagaattctttgtatgatacagacagatatgattccaaccaaatctggttgctttattctaagtgccaaatctaaacctgcctttctatgtacacatttaaaaacaaatagaaagacaaggcttaacccttacatgttattcctttttttttttttaaatatactgtgaagaaatggttgagctgtcaggcaaaaacagacaaatggaaagatgtgaggtcataatggactcttgttttcttgtccttttaaaagcagttgtgatttcaaagtatttgatggtggcatagaaacttttccaaagcaaaaaacaaaaacaaaaaacttacttttcaagccctataaaacatgtcttctctgattccctggctgtgatactgacagtctttgccttccccttaaataggaagtactagtattgtcaccagtcttggcagcccttgtctcctttacatgtcaatgcaagtaaaagcatgttacactctctgcgatttgtgactgttttcataaaagagaagtgtgctttgaaagcagctgtctccatgcacacatatgtttatcgtggcactattcacaatagcaaagacttggaaccaagccaaatgtccaacaatgatagactggattaagaaaatgtggcacatatacaccatggaatactatgcagccataaaaaatgatgagttcatgtcctttgtagggacatggaggaagctggaaaccatcattctcagtaaactattgcaaggacaaaaaaccaaacatcacatgttctcactcataggtcgaaattgaacaatgagaacacatggacacaggaaggggaacatcacacaccggggcctgttgtggggttgggaggggggagggatagcattagtagatatacctaatgttaaatgacaagttaatgggtgcagcacaccaacatgacatatatatatatgtaacaaacctgcacgttgtgcacatgtaccctaaaacttaaataataataataataataataataataataataataataataaagaacatattacaaaaaagcaaaaataaaaaagcagctgtctcatttagacccatgggtcttgcaggagctgaacaaaaatatgctcggaagttggcatgtgtgaaaccagtggcttccatattaagtctggtgtcctgtctcttggtgctttttaaagcattgggggtaacctaaaagcttttttctcttccaaagctttattaacccttcaaccattttcatggctttgtactcttaactttttagagggctctacaccagcctttacagaatcccagttgtggagaaggaggtgggaagggtcggaggaagagagtaatacagaaatatacctggccagttcaacaaaaaaagtatatacctatccatgattaccagcattccggttgtttaaaatttcatgtgctccttgagattaaattgttcacaataaggtccaaaagtcttttccaagtggtactggggctaatatattttctttttaaggcttttacactggtagaaactgtttccttaagaatgctgtgagttgtgtattttctttgtcaacatttttctctgttgtgatatgtagtcctgggttttctcttcttttagagagtgaaggatgacgggtggtattctctccccttaatatatccctgaggcagatcagtccttatctctcttttgcttcttttgctgaagcaacactggatttctcacctgtcaggtgagaaacatacaccaaagtcatagataatcagtgttcaaagacccatgtcctctggtcccaattcacatgcatttggccataccagttcacataaagtgccgccaagtctccacttcacttgcatttgcagacagggtggtgtcttcattttgtgaatgccaatgagaatgcagagcacatattctgtttctgaagcagagcatgttgtatattatagtttgacaatgcctctggcttaggaacagctaacaagttcagtccttctggaatataactcatagtatagctatttgtgtgtgtgtgtgtctgtgtatgtgtgtatgtgtgtgtgtttactagaactttagtagcatctggtctcataggttatttgggcattcagatgaagaagatttgtcccagaaattagaaactcttttagtgctaagcctcttactttgatattgtctagctaagtttaatgagtactttgggacatgccaagccagagatacaaaccaaagtgaagcaattggccttttctctgggatatattatcaggcagctttaaaagtaagattcaagtatatgaccagtgttatctgtaatatgttaatgtcagccacatacctgcatgaagatcatgcaactgatgtataattcagaattgaaccatataggttctttgagaacctgactttttattagctccaggt

SEQ ID NO: 93797 - DNA, 37261 bp, Homo sapiens
cctaaatacgcatggcattttagttcataataaaggcaccatttccaaccagtggatttatatgtaacctagttggtggggtaaataaaatagtgtggggttacctgtaagattgttaggaaaagaaaagatgaatttgtagcactatttacactgaaattaattataattgtatcaaagattttgcattaaataaatccatacaatttctgaataaagcatgaattaatttagttaagattctggaacgaaaaaggcctttcgaaggagaacaccaagacagaaatttgataaattgaatcacacaaaatttattttctctttgaccaaaaataaatcaataaagccaaaaaataattgacaaattggagaaagacattttcagtacaggaaagcaaacaactaatgtccttaatttacacaaagttttatacaggtaaacaaagtaacaaatgataaactcaaataacaaatgcaaaatgccaataaacttctgttccttataaattacacagtctggttgggcgcggtggctcatgcctgtaatcccagcactttgggaggcbraggcaggsrgatcacttgaggccaggagtttgagaccagcctggccaacatagtgaaatcccgtctctactaaaaacacaaaaattagccaggtgtggtggctcatgcctgtagtcccagctactcaggaggctgaggcaggagactcgcttaagcccaggaggcagaggttgcagtaagccaagatcgcaccactgaactccagcctgggtgatggagtgagactgtctcaacaataacaaaaataaataaaatttaaaaataaattaaacagtctaaggtattccattatagcagcacaaaacaggctgaaagagtcataatctgtgataatcttattgtttttattgacaggctctcttattaaaatacaagttatattagtacctggcacccaacaggcattaacaaatgtttattaaattaagttaaatgagaggattctggaaaagtagtttgaggctaaactagtaaggatcttgaaatgccatatttgagagtttggacttcatgctaaaggcattggtcacagtcatcaaagaagatatctgctctagaaaaataactgtaatggtggttggtgatgaattttaaagggagagccagttaaaaggttactgtggccaggcatggtggctcatgtctgttgtcccagcactttgggaggctgaggcaagcggattgcttgagccccggagttaagagaccagcctgcccaacatggtaagacccaatctctacaaaaattaaaatttaaaaaaattagccaaatgtggtggcacacaactatagtcccagctactcaggaagctgatgcaggaggattgcttcagcctaggaggtcaaagcttcagtgagccatgatcacatcactgcactccaacttgggcaacagagcaagaccctgtctcaaaaaaaaagagttctggtaattgctcaggtcagaggagactgaagcctgaactagggcaaagggactagaagagaaactgttttgaggtgccatcaacacaaattggtaataactaaaacctctatttattaagtgactatagtaggcccaaactctgtactatcttcacaacagccaagtaagattggtgttagtataccaattttgcaaataaaaaggcaaaacaagttgcagagaacttagataatttcccccaaagtcacacagctaaataaggggctcttctggattctgctgcagggctatctcattcccacctccaaggaatgaaggaaaaggagcgatgctaagtttccagctgatgtaattactcagattatttcctttgctgaaatatgtaaaggttttattggaatggtaatgaatgtggctttggacatgctgtgtatgagaatcctgtaatatagtaggtgattctgcatgaaacagaaactgactctggctaccttgctgaataggataattcttggaaggctatcagggctcacacagtcacagttaggctggaggtacaggcttcataaaaaggccaagaagtcagagagttccagatggctaggcaacggaaagaagtcacatatgtattcatttcacaaatagctaccgagtgtctgtgatggttaatactgagtgtcaacttgactggattgaaggatgcaatattgatcctgggtgtgcctgtgagggtgttgccaaaggagattaacatttgagtcagtgggctggggaacgcagacccacccttaattgggtgggcaccatctaaccagctgccagtgaatatgaagcaggcagaaaaatgtgaagagacgagacaggcctagccgcccagtctacatctttctcccctgctggatgtttcctgcccttgaacatcggactccaagttcttcagttttgggactcagactgggtctcctctccttgctcctcagcttgcagccagcctattgttggaccttgtgatcgtgtaagttaatacttaataaactcccctagttctgtccctctaagagaaccctgactaatacagtgtctactgtatgccaggcatttaagagcaatagggatacagcaataaacagactatatctccattttcatgtaacttactactgagtaggaaagccagataataaaacaaatgttaattaaatcaaaaatacaaaagggtagtaaattttacttattaccaaaaatggtagtaaataaaacaaggaaggggaataaggagttccttgagaagagggaggctgtaatttttaacggagtaatcagaaaagactgagagagatctggtcttcccactgctgccaccataatgaatggagatctccaaatgtccccatgttgttgttaatttcctcaagaatcggaggcctgggagcaagcatctgattggcaaagctgaaggcacatgcccacccccttagttcctctgaagtgagggagagggagaattggccttttaacttttttacagtaggtacctactttcaaacaacatattttaaaataagggattttccttaaaaaaagaagggcattttgactctagacaaccaaaatattcacagaaacgggggaaattgttaagggagagtcaaagaaacgactcatagaagaatgagggggaaaaatagaggctagcactctggagagccttgaacacattttaagaggtagggagacaaaaagggaccaggaaaggaggcaacaaagaaaacaatcatgacatagcaatgtctgagaatccaaggatagagagcgtttacaaggcaaatggtgacctttgagagagcagtgtgagatgacgtttggaagcagaagccagattgtaaatggagaaggaattaatggtgactgaagttaagtacagactaacttctgagcaagtgttacatatccataatttatattgttgtaatagtgttgtggaatcaggaggaccagagagaggccttggggtatatacataaggatatctttattgagtgcactcagacccagcagacttaacatccaaagaccgggcccagaacaaagacagcacttgacttttatacacacctcaaaaaggggtgtggaccagcctgaagccggcttacagtggcatgaaagcagggatacagaggcaggacaaagacagttaattaaactgtaacaggttcataactcaggattacacatgaccattgctatgcaacccagatgtccattatctaggtttgcctagtgcctagcacggcttattccatgaccttcactatagcgtccaggtggcctgctcagacagtttatgaccttcactctactgcttagataaaacagaatacctgaagtcaccagttacagagaacaggaattttcataaactcataccataaaacaaaggaaaatttgtttttcttctccctatgtggagggagtgctgggagagtctccagagcacattcctttgtgtcctggctccttagatagtattatcaagactttccctgggtctgggctgtgcccattgctgcctctggaacaagtcagcctaatacaggaaaacttacttctctttttaattttttctttaacttcccacctcaataggacttgcaaaacatattatcctgagacaaaagggcaggacttttgtgtagcactttgtcctcacttcacttgaacttcacaataactttgtgagaaaggtcttattcccctttagagagatggaagaaaatgatatccaatatccagtgtgggagaggactgtaactctcttcctggagtgcatcttattgacagagatcaaaacctagaaattcctctgcaaaggaattcagtgaaaaaaagaaatcataagcacgtacacagatttatctacaagattgtacactgcaataggaaagaagtgaaagcaagctaactccagcaagaggattggtacatccatgctatgaaaagacatgcactgattgccaaataatgttgcagcatgaaccgttcaagaaatgaaaagcgtcctacatgaaaaaaatacactgagtgcatgacaggagttttctagtccacaacatacttaggttcccagttgcaaatcaataaagtgacactctggtttatgtatcaaaagaaaagaaaaagaaatgaaaagcaaaaaaagggtttacattttatgaagtgaacagagcagaccacaaaacagaatatacaatatgattctattgtgtgtgtatgtaatttttttgtgggcttttctgtatttccgaaaattctaatataaaggaatactgcttttgtaataagatttttaaaagaaggtcctcagtggttaagtacttgtctgtggtcagagataactggcaaagaagaggccaaattttttttgagactgcagtctccggtgtaaaatgagggtgcaaggtgcatccccgctcctgatttttgaatcatcccttccaccaccttggaatgacttcttacgtagaacagccagcaagtggagaaacttgcctcaataatgcaaaactgtctccctaacttacttcctttcaatgttcaagcaaaacaaagccctctctacatccaacatgacagaaacccaacatgacagaaagtatgagaatggttggaaattgctgaaacagcaacagtaaagatttaatgagctctcaaagtacctctagatgtgcaaatatgacaacccaataaaaagaaacacacacataacctagagccttcaaaaatctagatttctgcctttccacaccttaacttggaatcattcaggtgggttcctaagcattctctcggaggtgaagaatcctccaaagaggagactctaggaggggcccaggtgtggcaatcttcaaaaggatgagggatgtccagaggagaggtggcgggagggygcacttaaaacacgcgaaaattggaaacgtgccttctgcagtcagttccttcggattttccggcatttagaagccagttctactccttcagcccgactgtatctgcaggtctcacccaagaccaagacccccgcccccacccctcctccacccggcctcgagccccgccccggacgctggacccgagcgtaacgggagcaggtgttcacatcaaaggtctgggtcgcgaaggcagagactccatgtgccgcagaaaaaactccacggacaattgggagactcctttcaaaaaaacaaaactccggarccacgcgactccgcgctcagggggcgtgggtacggcccaccacgagggcagggctcggcgccagctctcggcaaaactaacaatatttgttaggccctaaacaaaaaggccctaacagcgctaaatccattcacttcgggagtgtagcaacctgggacaccaagcgccgcccacgccccagctacgcgcctcagggacacatcgattgaggcgcggctactttcgcgcacgcgccttgcatgcccgtgcttcgcccttacagcagagcgcctaaaaccgctacggtggctctgctggggacaaattattcacgtcccactgttctgcaaacccaatccgggaggtatgacctggctgggacagtttaggaagatggccacgaaggcacctgggggagtagatatatgtwtttgagaatgagaggagtaaatcgctggacgaccatgagcaggaagaaaattaggcctccacctcccaaccagtggccctgagttggcaacttagacagcgcgcgccagcgccaggagccccgccttgggggcgtggccgcgcgctggtcggctggggcggggcctgcttctggcctcatctagccccgccccaggcgagggcgccgcacccacaccgcgctgcgcagttttgttctgctccagctgttcgaaggtgatccaggtgagtgctagcacctgcgggcagccacgagcaccgggccgccgggggcacttcagcctttgcgcagggcactccyatatttcagcctatgcgagctgaatagagacccgctgtctctaacctccccccacccttatcagtaaattagcgatctgaatttccaccctctctgctctccccttgccttgcatcttttccctggtggagtgggttgggagcgtctaagcgaggcccgacctatttatgtgtaactcaggaaaattctcaaggtcaacccttcctccattccttcctttcctctcctgctgtccccgggctctgcagtctgggggcacctttctgccttccggagaccacccgaccttgccctctgctgttccggcgcagaggatgagcgagccggacactgccgggggagtggttgtgcaggcctgatcagtaacactggtttcagaagtggcctgtgagcaatgcacccgctgcggtggggatgtgttgctagggacggtcgggagagcctctgaaggaattgtgtttgttttcctcctgcctcttagaatcgtttgtccatttgtactgggaaggtggtcatttcctaccgctgacttagagcaagagacgcctctaggcgggtgggggactcttcaggttcttccttggatttcagaaaatgccccttctttatctggggtggcagcacggagccgtagggctacagtagtggggcagttgcagggcggtggaaggcgctggagactccttagtgagtcattccccgaagttgtggcttctgctgatactttccttgagagtcacgagtttacaagctacataatagcgtcgggggcaagtaagtgtggaagacgaggtaaaggaaaagcagatactaggatgggtagaaggagaggcaggggttagaactttaattccttccctggggacaggagatgccctggaggggaaggcgcttccggctctgcaggtatgtgctgttgggcctaggtgtggtcctgcggaattgctgcagattttagatygctggtgggtaggagctgcagcgcttctcttgggaaatctgtagatcacctggagccagcagttctgggaggcaccccaggttattggtcagagttacaggctatattttatttcagtgaattcagagagcacattgagtcagatcaagaatgtttattctcataggagatgaatttaaggagttaaaactaacatataaaatagaaacaaatactttcatccctgggaagactttccgttaagcttccctcctgacacaatgttacggaaatagaaaactttgtcaagtgattttttttaaccaatgttactatatataaatctgcagggagactgtcgccaactatagaaactgcgctacaggggcctccttagattaaggaacaaaactggagaagggcagccttccgctttatttagatttcttcctgttggcttagagttctgaaaagacacaatcctggaagagatcctcctcgcctggagattagcaccgagaaggaacatacaggaaagaagggctttacccactattcagagaaatgctaaaaagcccctggagcagtctggaatgaggtggatgtcaaatcaatctgtcaaaagcaattcagtgcctactgcacatctatctgtatttaaacatattgtgccctatgtttatacttaaatcttctgaatctatatttagaacaccattaccgaccacaattgaccatgaaccatctagcattttaaagcaatatttgtttcgaagaatatactgctacggtttttgcagctcaatttattaatgctactgtaagcttaccatcttcctgaacaaaaaatttagcagttagcagcaagtagattatcgctatgtaaaataaaattcctgagtttctstcactcgctcttacagtacctacctgcctacctgyctctgaggagaaacgctgtaattaggcaacaggaaaattgtactatctttcaaatgcatttgcaaatgcctttaaggattttatcctttagaatcatagatcttgctgttaccttctgagttatttctagagttgatctgttcattaactggaacttgcgttctacgatttagttgccttatttccacccttcatttttttttatttttttaaagcaaaaattaatttttttatttttttattccaccctttaaaaataagtaagtgatattttattttataaataaatgagcaagcaatgggagcggttgtaccacagcttcattctaagtgtagacaggcatgaaaaggtcgaacccctgtttcaggcaaaagccagcagcctaggtggttccttcctttggggtggttggtaccctaacgggcattcagcagctgctacaaattaactacagtctgcctgcatttcttgtaatagaaaattaccaagtggtgtcaatgtgactcattcgagatttttttttttccttctggaagtcatagcttagtttctcaatgactcttggttcctatgtaatgccagttaagggacagctatatgacatgatatataaatgaagtgccagtttctgtgttactttgctccttgcaaacctatatgcctgaaagattggaggaagttttttccttctcgtaatctctacttcttttgtcatactgcagtgctgacactcattaaaaagaaaacattccttgtttggamctttcccaaagttttttttttttttttttctccttccaatttgaaacatctcaggctttagtcagtggcaaaattgaagttaattgtttgctctctcttcttgttaatgtattttgtactcaggagagggtctggggacatagaaatgtttcaaaagatgtcaggtgtggtcaaacttgcttttcaacctcattgagagacaatatagcaaaaggctgagagcacaaactggagccagactgcttgggggtgtggggatctggctgtgctctgtgatcgctgtgtgaccttgggcaggtcacttaacctttctggtactgcgtttcttcatctgcaaaatgggagtaatatcatagggatgctgtgaggatctaaatgagttaatactgatgaactaactgcttagaacaaggtttgccccktactaaatactgtgcacggtggtaataagtaataataattgatttctcctacttttcttcctctagtctatatcactacccttcagacacactggactcttttctctccttcatacaagtcaagcctttttctgtctccaagtctctgctcttgctgttttctttacctgtgttctctctcacatatcactttatgctcttcagatcctttgtcgcaatgtyacccttatgttttatggtatggtcctgctgtgtttttgtcttccctgactgcatgctcactcgtgctctctctcaatcgtgcgctctctctctctctccctccctccctctctctccctccctctccctccctccctcccccccactctcaactgtgtattctagagagtcaggaccttccttctcattcttgatcattctcatagtagccctgccccttgagtggaacatggcatttagtaaaggatgaataagggaaggaatcattctgagaaaatactgaagatgatagctatggacttgaggcaagcatcccatttaggtaaaatgctttgtccgacattgaatttatcatatcagcttcatttaatgcattatgagatgttgtctttatttttccttctgtatcccatggcttctcaccattcccctccccctccaccccgccctctgaggttgctgcctgcagaccatgggaaacatccagtgggttgtccctgggatcacatctcttgggaagctcagctccaaagggtctagcaaagcccagggcttctaggttaggtatctcccacagaaccttctgtgtcaagaatctgggaaagtttgtccttatacctgcaggggaacctggaatttattctgtcttgttataaatctagtattcttagattcctgaagaacagaattaccagttttttctcagaggagatttcatcaggcatgtgtgtttagtgccttattacacagaaggcacactccagagaagaagaaagcaggtaatttgcttatttggctttaacagagtttcaacagagttcgtgtgagtgcaagcttgtgctctataaccaagaaccattcactggaacttgagcatcctgctgatcttccctcccccactcccagccagtgcagccatgtattaagcaattgttttcagtaccaacagtttaccaaagtgttggaataaaaacgacatctaaaacttgaatattttatatggccaaactatggctatttaactatacagttgaatatatttggattataacatatttatctcttaaagggacagatcttccatcctcctaacatayagttagcttccactctccaaatattccaccagcaacattgatgaatattgaagactatggactgtgaggtactgtgaaagacccactctaggacctgcttgctgctatttgccttacttgaaccagtaatcaagtgctggataaataatatgatttctattcaactttttgtttttagcccttagggaacaatctactgaatatgcaatgcaattgtcgggggatagttacttttcattacctaggtttctgttccttcttttaagtgtaatttaaatctggctgtcatgaaggtttggcgctcaaacagattttagcrtctgtttaatgtagaagtggactggaactagcattctgaaaatgtagtctgaacccaaagaaatcccatgactctccttttctgtcctatcatagaaacagataattacatttttaaagtttttgtgtgtgggtgtgtgtgttgtcattttgaggtggggtttcaccatgttgcccaggctagactcaaactcctaggctgaagcagtcctcccacctcagcctcccaagtagcagggattacaggtgtgcactactgcacccagcttaagttttactttgtttctaatagatatataatattggatatatttatgagatacagtgtgatgttttagtacgtatatacattgtgtaatgagcaagaggattgcgtttatgggccaggcacggtggctcatgcctgtaaccccagcactttgggaagccaaggtgggyggatcacctgaggtcaggagttcgagaccagtctgatcaacatggtaaaaacccatctctactaaaaatacaaaaattaaccggggcgtggtagcacacacctgtagtcccagctacttaggaggctgaggcagaagaatcacttgaaccygggaggcagaggttscagtgagctgagatggcaccactgcactccaccctggcaacacagtgagactccgtctcaaaaaaaaaaaaattgtttttatgttacttccctctaggctctttaatttctccattgagcattgtgtgagctccgctgagcattgtatggagggtcagctgccctggctggagatggttttgaggcttgttccttcgtggaaacatctggatgcagaagttaggctgtacaactatccaggggagctttaagtgagccaagtggaccctcagcaccacctcagagtgttctaagctaccgtctggtgtttgggactcagggaagtccttttggtatgatcagactagccctttatgtgactatccttgtgtgttactctcattaaaatattgatttttgccatgtaaggaagattggaatagcacaggcagccgaataaggattttaatgaaacattggagaatggcttcaagttaatctgtgaatgctttgtcattgtcccatccctggacacattaaaaagaaaaaaaagagcagttgagaaattgcagtacaatttgaggagagcaatatcatacacagaagtagggactacttttgtcaaagctggattttatttatttgggagcaaagagagagagctgaaagacataatcttctctcccttaagaatctcattgtcatttagtaaaataaaaggtagtgtcacttcatggctcagaagtggtaaattatttgaggcaggtacccaaatccataaagcctgccttttgctttgtttgtggaatgctgattgtgtgctggggaatttctgatgggcagccaagaggaatttgggaagtagtgaaggagacctttaccccaggagtgttctattggatgtagttcaggaagctttctgggtaagccttgcaaccaaaggaaccctgccccagtaagatacgtcaaatggtggcagaagcaagaattagaggaaaggttgagcaacattttggtatttgaatagctgtgttcccaggaaactctgtcagtaaaatttctagaggttaagtaccttagccagatgtcataatgaacccctgtgttgctaactcaaatgctggaatggagcatgtgttttaggagttagaccaacactgcctcatcttaagcccaagtctgatcactcctaaactgaaactttgcaaatgtgtgtgttgtagcttacttaaaacccattgggtgtctgctaactctggctacactgaaaagtttttgctattctaccacccacggacgtcagagccctgctgcttaccagggcatgttagtctcctaatctacccctgaaaacctaccatggcccggggcttttctgctaccccccacgtcctataccctgcttgcttcaaaatactgttcctagttttcttcccctaacttgataatgtactccaaaacaatcatgtttggcaagtaatacactgataaatgtaaaagttacaaatagaagtgctgctgtgtttttaaaacattatagggccaggagcagtggttcatgcctcttatcccagcactttgggaggctgagagaggcaaattgcttgagctcargagttcgagaccagcctggccaacatagcgaaaccccgtctgtactaaaaatacaaaaaattagctgggcatggtggcacacacctgtaatatcagctactttgaggcagaaggattgcttgagtccagaggtcaagcctgcagtgagccctgattgtgccacttccactccagcccggatgacagaggggraccctgtctcaaaacaaaaacaaaacaaaacaaaaacccagccaggtacggtggctcacacctgtaatcccagcactttcggaggccaaggagggtggatcacttgaggtcaggagttcaagaccagccyggccaacatgrcgaaacccygtctctactaaaatacaamaattagctgggcatggtggtgcatgtctgtaatctcagctacttaggaggctgaggcaggagaatcacttgaaccyargaggtggrggttgcarygagccaagatcgtgccactgcactctgccactcactctagcctgtgggacagagagagactccgtctyaaaaaaaaaaaaaaaacccacattctagaaataattaggtttctaaagtattcttaaaaggggcatctgtggaaaccagccactaataacatatttaaaggagagagactgaatgcttccccctaagatgaggaaagaggcaaggatgtcggcacttgccactggtattcaacattgcattgcccctaaccaggacaatcagtcaagaaaaaaaaawaaataaaagacatccacattggaaaggaagaagtaaaactgtctctctttgcagatggtatgatcctctatgtaaagtattccaacgatcgtggatctgtctctccctcccctatgctcttgggccctggctctgtttctctcctggagtagaagcctgtggtgcagcaggattcaattgccttcaattgaacgttgcagaggactttcccctcggtgcttcccgtactgggggaagaggtgatttaacttctgagtaagggacaaacccagtagtgtgttagtagcaaaaagcatggacactggcatcagtctgcctgtattcagacaccagctgtgcactcatcagctgtgggacyttaggcaaattgttgaatttctctttgcctccatttcctcatccatagaatggkgataataatagtaactatcatatgggattgttgtaaggatggaaagtgttaaaatatctaaactctgttacagtgcctgccataaaagaagcactctaggcctggcgcggtggcccatgcttgtaatcccagcactttgggaggctgaggcaggtggactgcttgaggtcaggagttcgagacyagsckggccaacatggcraaaccccatckctactaaaaatacaaaaattagctgggtgtagtgacatgtgcctgtgatcccagctactctggaggttgaggcatgagaattgcttgaacccgggaggcagaggctgcagtgagctgagatagcacccctacactccagccttggtgacagagcaagaccctgtctcaaaacaaaacaaaacaaaagaagcactctatgggaccaggtcttatagttaggtattatatatgtagtagtgatattttcagttttgctgtttctgccagatgggatgaaaaattccatgagaagttggctggaagtcctactgattcattaaataggcctttcatttgaagtcatgtttctaatcattcagaagttgaggtatgcctgatccatggtattagaagggatgatcccagagaggtcattctgtagcataatragcattacttttgaaggatggagaacctagaactctgactcatttgactatgggaaaatctgatctggtgagtgaccatgaccatgaagtgagatctggtaacccaatggtggtcacaggatagagactctgaagatactgagctggcttacacacttgctttgttgtctcgaacctctgttaaagctgaaagaagaagtcagtcttctgctgggcacactgttagtgtgtaattgtgaagagcttagctggagcttgctcttcacaacagtctctgatctcatcagccccattctgttttcaggggtggtacagaaggagcacctcaggagcctccaaagatagtagtagaatataaccaccaagacaagactgtgactgtggttttgaatcagatagaatcaccacctcctgcaaattttgtttttgctcagaacagtggttcttaaaatgtggtccttgaccaacatcatcagcattacctaggaactagttagatatgataatactcaggccccacctaacatgactgaaccagaaactctgggactgaggtatgttttaacaaactctccaggtgattttaatgccaccaaagtttgagaaccactgatctaggatatagaacagcagcattctactgagtttctgtcttcatgcaagttgctataaaaaatataagcaaggagacacgctctctgtcctcaaagagcacatagtccatctagagaggtatactatattcaatgccacacaaaggaggccttcccagccgggatcctgatgcaacagccctgcccagtctctatgccattgccgtgtgttttccccagaagagttcccattcttggccaggtgcctgtaatcctagcactctgggaggctgaggcaggtggatcaccygaggtcaggagttcgagaccagcctggcctacgtggtgaaaccccgtctctactaaaaatacaaaaatgagcctggtgtgatggtgggcacctataatccctgctactcgggaggctgaggaaggagaatcacttgaacccagggggcggaggttgcagtgagcctagatcgtgccacttcactctagcctggggggaagagcaaaactttgtctcaaaacaaaaaaagagttcccactccctgaagctgttttttgtttgcatgtttgttgtcagtctcctgtcatcattcgaaggtcagggccttgagggcaggaccctttcttgttcactgctgcatccccacccctcagcagttcctggcatagacagcaagtgctttatatattctggttgaataaatgaattaagtgttctttgattcattatgctgtctacggtaggaaactctattttgcaatctaattagaccagccttttgccaaatttgaattattttaaacaaaatcagaactattgtgtaagagcatacaactgatttgtagaaaaaccagtatatcctcatttaggaactgttgcatatgtggacagacatgtacagttaccagtatttatttcttcatatttggaccaacatttattgtttataccaggtacatatctagtttatctaatttaattcttcaaaccacactgtgatataaatgggtagtattttccctgttttgtagagaaattagatacatcctaaagcttgcaggggctatgtatgaatacaggtctgtctgactcctcaattcctgctatctctagtcttgtagatttcccacaggaaaagatgaatcataaaacagtattgaagtccactaggagtaaaaacatttaggatctctacccttaaataagtgacaaaaactttctaatttaaaaaaatagataattcaaatttcttttaaacctttaatgttctcttgactgatctattttgacttaagactgccaacaaacagttaactaggagcagctacctctgcaattgctaataaggaaagtaagaatagaaactctttcatcctatttctgtctttccctacccatttattttgtttttgttttattgtgttatacctagtttgtgattattgctaggaagggaaaaatctggaattgggtacttgtttacttatttgcctgtgtcccctgctagaaaatgagtttcataaagaaccaacctctggctgttccctgttcgtctccagcactagcccagtgagtggcacatagtgggcactcagtaagcctgaataagtaaatgaatgcacgatcaccctcatgcagtgctgagcagtgtctggctgcagcaagagtttgaatgactgcagcttccggatgtccatagtcagtgctaaaatcctgcttccttctggctgcttctgcctttcacatgatagcatatattttaacatggctggctgctgagagttcagaaaaggaagaggatatatgtggttctaaactttgctattttaaaatggcagttataaattctaaaatgtatattcattatcatttagccaaacatccccgttgagtcaggtcaaggacagttaaccaaacattagcatatgtaacgtaacataatatataacatttactgagtccttcctatgtgtcaggcatcatratgaatgtttatagacagtatgtccatctaatcctctcaacaaccttccaaggttatattagtatctccatttaacaagtgaggaaactgaggtgctgaaaggtgttaagtaatattcccaaggacactcaactaggaaatatgagaaccaggttctgaatgcagacaatttgattccaaaactgcattcaactgcaaagctgtctcgtgaactgcacttagcagataagtggtggtactcaagccagaagtcaggtctgatctttcggttccatcattccatactgcctgttcctctgtcttctcaatgaataatgattgtcaagccactctaagtttttttagatatgtatttgctcattttggaaattacagaaaattacaaagaaaaatctataatctagccatctagaaataactatgcttatgattttaatactttcttaatttttttctattattaagaaaaccaagattattctacatatacttttattttcttttttccccactcaacctgctgtatattgagcctgttttaacctctttaatatttgtacacaccatttttaacagttgtataatgttctatttaacgggtatattatttatttaactggccctctattattggacatatgtagtatttctggttttgccatcataaatattgctgaagtaaatatctttgaaccaaatttgtttgcatttctgattgttacctcaggatagatttctagtaggattaatgagccaaagaatattaatattaaaaagaatattactggccaggtgctgtggctcatgcttgtrttcccagcattttgggaggctgagatgggaggatcactagagcccaggagttcgagaccagcctaagaaacataggaagatcctatctcttaaaaaaaaaaaaaagaaaaaatatacataggctgggcgtgatggctaacacctgtaatcccagtactttgagaggctgaggcagccgtatcagttgaggccaggagtttgagaccagcctggccmacatggcaaaacccccatctctactaaaaaataaaaaaattagccgggtgttgtggcgggygcctgtgatcccagctatttgggaggatgaggcatgagaattgattgaatctgggaggcagaggttgcagttagctgagattrtgccactgcagtccagcctgggcgacagagcgagactgtctcaaaataaataaaataaaataaaaaaattttaaaaatacagaaattagctgggcatgtcaatgtgtgcctgcagccccagctacttgggaggctgagttgggaggatcacctgagcccagaaggtcaaggctgcagtgagctgtgatagcaccaccatactccagccttggcaacagagaccctgtgttaaaaaaaaaaaaaaaaaattacctattgccaggctgtcctctagatggttctatcttatacttccctcaacagtgtagaagagggaaaactaggtacttttaactacagttatgtgttcactcatgatggagatatgttctgagaaatgtgttaggtgattttgtcattgtgagaatatcgtacagtgtacttacacaaacctagacagtataacctactacacacccaggctatatagtctagcctattgcttctaggctgcaaacatgtacagcatgttactgtactgaataccataggcaattgtaacatagtggtatgtatttgtgtgtctaaagatatctaaaaacttagaaaagatccagtaacaatatggtataaaagacaaaaaatggtacacctgtagaaggcacttaccatgaatggagcctgcaggactggaagttgctctggatgagtcagtgagtgagtggtgagtgtgaaggcctagggcatttctgtacactgctgcagaccttacgtacactgtatacttaggctacactacattcattttttaatattttatcttcaataataagttaaactagattactgaagcttttttactataatttttaaacttttgaatcttttgtgacaatacttagcttaaaacactaatacattgtaactgcataaaaattgtttctttgttttttgttttcttttgtttttttcttgagacagagtcttgctgggtctcccagcctggagtgcagtggtgcaatctcrgctcactgcaacctccacctcccggattcaagcagttctcctgcctcagcctcccgagcagctgggattacaggcactcatcacctcgcccagctaatttttttatatttttagtagaaacagggtttcaccatgttggccaggctggttttgaactcctgacctcaagtgatctgcttgccctggcgtcccaaagtgctgggattacaggtgtgagccaccatgcccggccaaaaattgtttcttcatatccttattctwtaagatttttttttctatgttttaaatactttttttatttttaaagaagcaacaccattcagttcagaacacccatactgactttgagctgatggcctttgtaggtttctaactggaagtgaaattttttctatttttaaaactttctttttatttcatagttactttttaagctttttttgttaaaaattaagacamaaacacacaccttatcctaggcctatacagggtcaggatcatcagtatccgtcttctgcctccacatcttgccccagtggaaggtcacatggacacacctgccatgtgtggagctgtcctctcctatggtaacaaggccttctggaatacctcagggaggacctgcttgcacctgttttacagttaacatttttttttaataagtagaaggaatacactataatrctaaaaagtatagtatagtaactacataaaccagtaactgtcacttaygatcattatcaagtgttatgtgctgtacataattatacatgctatacttttatatgactggcagcgcagtaggtttgtttacaccagcatcaccacaaacatgtggatgatacagtgtactacgatgttacaatggcacagtggctatgatgtcactaagcaataggaatgtttcagctccattacagtcttatggggccattgttaaatatgcagtccatcactgaaacgcatggctgcatgtggtagaaggtttcaattcataaatattaatttatactgctggtttatgactaacccaggaaactgcataatgattaacaaatgctacgatataaccaagtgaattgcaaagtcatctacacctgtattaaagttcagctcagaaaggactgtttggactgtgtgtatctagcactacgtagaagagaaagtcaagggcaaagttcccactctcaagaactttatcttgttgggttcatgaaagggtttctggtgacacagagtaggtatataatcagcaaaatgtggtctgcggttcaaatgagtgctcatgccagagattggttgggtgccagctatcagttcttccaccctgtccctggaagctatctgctacctctggggctggcacaacccagggtgtggctgcgactgcctagggtgtggccactgtgaactgagctgcatccccttcctggtgcacacccgcacacacaaaagtcactctctaaggagtgggaatatctatctcttcgccttgraatcttcagaaaataatgatgtagcaaatgatagtttttttgaatgttgatttaattaagctgattctttctttgaaagagaagatttaatgatttttcactccctattgcatttatgttttccacaactacgacaagagttttctctgtgttctgaattcttctttcttaagatttctctttctggattagtcataaaccagtctttcttaaatacattcagtttcttccctggtttcaatagatattgagggaagaaacggaaacctgaattggttagatgcatactttataccagacactgtgccagatgatagagattatttcaggtgtgtattcaggggacggggtgcgtggtggtggtcattctgaaagacacctgcagttgcagctcaaatcatttattccgtaagtatctatgagcgtgcacactgtgcttgacatggaagatgccagacaaacgtggtcctgctctgttttaagtgaaggttgttatggtgtataaagcaggacacctcacttggtaggagtgcaaggaggtatcagggagggctgttctgctgcccttctcgcaggcagcttttcaggcattgctyctgcacctatgcagacgtgtccatggctcgtgcgggggaccctcagggagaacagtcacgctgctgccccaggcacttgcactgtccctatgactgagtatgcatcctctgcaaaccactgctgtagcatcagactctgggtacccttactgtgaattcactgcctttccaaggtcctaactgttgctggctctgcttgtcatcatccagattcataacgccatacataccttaacaaagtgtgaggagagtaactttcactagggtgcaaatgcccatcaagtttaacctcacagattgcatttatactttaaaagaggagctcagtagtaaatattaatttgtaattatagattctaactgtggattgtagagcagttgctttgctgtgacrggcatctatgcaagaggcacttctcttatcttgccayctacctaccctagcctcttaaaattaagaaaaatagaagtcagtgactaagccaccaaatttgaatgtgttacctgggctagctggagtgttttgggggagaattctaaaacctgctctggtcttagctctgccctcatttactgagcctctatttccttttctataaagtggagctaataggagttttgtgaagagtaaaagtgagctgaaaagtgctgggctgacacaaggtagccctgcacatagccagggagcccagcatcctgtccaaagattagagtctgaaagctsactctactgatttgcaaactttaacctaaagcaaatatgcttaattttattgtccttacatttattgcttctgagagacacctttttttttttttaaggcaaggkcttgctctgttgccccatgctgcagtgaggkggkgcaatcatagctcactacagcctcagcctcctgggctcaggtgatcctcccacttcagcctcctgagtagacatgagagtctccctgtgtggcccaggctgcctggcctcaagtgttccttccaccttggcctcccaaattgttgggactgtaggtgtgagccaccatgcttaggtggcagctttattttaaatgacctgtttgccccagatgtgttgaatttaaggataggctggaggttcagtcatttttatttattttcaaagaggtgttcagaattcacactctgtttttcttttrataactactgtggcttcctcctcatgctgactttctacacttgggaagagaatgtgggcaaggaagcttggagggaagccagagactccttgctctctgcagctgcacagacaggccaggatctgctgacctgtggaaccagcccgctgcagtgtgtgccccccagcccccggaggggcagcgggcatgcctcagagagcagctcagagtgaagacggtagaaggggaaaactgatgagaattattgtgaatcatggtggggaggaggggttttaagaagttaggcctgttaggctgggtgcggtggctcacacctrtaatcccascactttgggaggycgaggtgggtggatcatctgagctcaggagttcaagaatagcctggccaacatggcaaaacctcgtttctactaaaaatacaaaaattagctgggtgtggtggtgcgcatctgtaatcccagctacttgggaggctgrggcaggagaatcacttgaacccgggagrtggaggttgcagtkagccgagatcgtgccactgcactccagcccgggcgacaagagtgaaactccatctcaaaaaaaaaaaagcagttaggcctattttgctgtgctaagagaaacttacttttaatgaactgagctgcatgcctaycccaaattctgttttaaggaagatgctctgaccacagtgtcagtttggctctaaagtttcaagggatactgaaagggaatattggaaccaaatgaatctgaatgggaatcccaggtctgtcactgtctgttttagaccttggaaacattacttaacctcttttgaaaataaggatttaccatcttgttggttggtttgttaggatgattagatacattccagatcagggtaactctcctaggttaaaagcagggactgaagccaggcaattaccagggatggaaattttaaagctgacggcagaacacacaccagagctgctggctcgtggaagcctttgaagtgatkatttgatgggcaatctgagttcctcaggagctgcccaaagcctcataggctcaggagccatgctctgctttcagagtactcaacctgggccttcccctacctgtgtgagatgtctgctgctgcacccgcacgtgccccaggatcgaagggaggcctcagagtcctgccctcacagtgtcccccatgtctgaaggcaaaaaacttggaatcactgtgcatatactattttggatgctcgctttcttgctttctcactttcttgctttctctctctctctctctccctctcctccctccccactccctctctctccctctccatccctctccccaccatgtcctgctcctctcactccctccctccccctccctatgtaatgtatactttagcattttrccatgttaaatattttttcaataatgtgatttttgttggctatattattctacagcaacgactactgcagtggtgtagataaatctcataatgttgatcagaatctcccaggcacaaaagagaaaaaaagatacatgactgtatacttttctgtgtatagactgcatagttgagtaatttttaaattattttatatggtactgtctttgatgacttctcagaaacatcagattgattcatacctttttttggtctctatttactcatttgccagtaataaagcatcttgctccctaaggcttcacaccatgaaatagccacagtgctgggggccgtcccaacgtgttctttcttccacagaygcaagatggctgtcctctctaaggaatatggttttgtgcttctaactkgtgctgccagctttataatggtggcccacctagccatcaatgtttcyaaggcccgcaagaagtacaaagtggaggtaagtgggaacacaagctggtgcccttgtaggcttgtctgggggccacaggcttagccaagaacttattttcagccatggagggagaggcaaggagctagttgtgagaagtggcagtttcaggactgtgttagcgattctgcttcttcatggtaggaaagaggcaagaaatacagggccctgctagggagtagtttccatcttgtttgactttgtctcttcggtagaaagaccaggaatgctgggattccaatagtacacttctgcttggagctatttgctaggaagagagttactgtattttccacagagggttaaatagcaatattgtttcatggtgtgccactttaaaaatgatgtcttatggtgattttcctgttttccaagtagaaaagaggtatgtggtgttgagattagcctggacttagacataggaaggtggtctattaaacacttcctttagttttaggtgatctagaagggataattaccaaagttgtccctggtgagtggttttaaatgtctgtttctgtttagcaacttaataattaaactcccttactagagcttcttttaagtttttatatttagtttcttcttttttttcccttccagtggacacttccattaagattctcacacactcaatttctrttcttctattaagggaaatcttaaaaggatgtggtatttgatgactcttaggaaggctctatttccctacagtatctttgtaatgcatctgaaatccaccattgatgcttaacgtcaatgaaaagcacggagtttggcgcaaagctgcctctttcccttgtgcaactacagcgcagacatacattcttattcctggatatttaatagaaacattgactctgcttctgagaattgagacccttgtcaccataaatatttaagcagaaattgaatggtcatctatcaagggtgtgaaagaagatactttggaatatattgtttttaaggttcattttaactttcaacactgaatgctcctcttgaccatctgatcagtatgtgctttgttgtgacagtatcctatcatgtacagcacggacyctgaaaatgggcacatcttcaactgcattcagcgagcccaccagaacacgtgagtgtcggccctgccgggcaccaaagacatctgcagagtgggtgttttctgtctaacacctcagcccttagtgygctgtatttgctgagtcatagtgatggtgacaatcatgggcacctcattaaaagtattcaaaaattatgtatgtgaacacattgactattaagcaaacttaagagtggttggaatggtgggatttcgggatattcttttcaaaaaatgtcttcatggttgcattacctactacagttttgcagcatgacccatctaaaccsatgttgactctcccaggcctagggagtgaagaggttttgaatgctgtaaggaaacccactctgactcaccaggaccttccacttccatttgttagatgtgaggtccttttactcagcatgttccaagtgacctctaatcccatgcagagcaaaggagggtggatgatagtgaccaggtcttctccctgcrgtgaatgtttatttttacccccaagcttctaacttggcaaggaagatgtaaagattcatagtgctggctgggtgaggtgggctcacacctgtaatcccagcactttgggaggccgaygtgggyggatcacttgaggtcaggagttggagacaagcttggtcaacatggcaaaaccccatctctacaaaacttagccaggcatggtggcacgcacctgtaatcccagctactcaggaagctgaggcrtgagaattacttgaacccgggaggcggaggttgcagtgagctgagatcatgccactgcattccagcctgggtgacagagacactccgtctcaaaaaaaaaaaaaaaaaaaattcataattctacacaggcatacttaaaaagggcactttttaaaagtttctttctgtcaattccaggttggaagtgtatcctcccttcttattttttctagctgttggaggtgtttaccacccggtaagttttccaggaggtgttcatctatttggatagtagttcactgagctattatcagggacagaagaaggaaataaacatttaatgaatatcttcagtgtctaggcactgcatatttaaaaggattttattcaattatttcttacagagttctttaaaggagatgggattttcctcatattttacagataaggaaaagcctctcatatactatttaaacttcacaaggtcaaatagctacagagtagaaggattagaatttgaactcaggtctgtctggttctaagtttcatgtctataagagttcatttgttatagtaattcattcacacaacaaactttcactcaccacctggggtaaagcagtgatcaaagcagacaaagacccctggtttcatagagcttgcctttttgttgtggggtgtggggtggtcacagagaagaagcaacctaagtaaattacatcatgtgttaggaggtggtgagtgcagagaagaaaacaaagyggggaaggtggaaaggggatgtggagtgggataattttgaatagggtggtcagggagsggggctttgctgagatgatagttaagcaagtataaaaggaggtgagggagcaggtgctgcacgagtttccccaacctccagccagaagacaagcaaggcctgaggcaggcacctgtctggtttgtttggtgagcagtgagaagccaatggagccaggagaggggcagcaacagagggcagaggggtgatgaggcaggtcactggggacttgcaggcctctgcagtatagatagccctgtgggatggagatttagtctgcacttaaacatatctaaataaagcaagtttatcagcctctaattaattgccatttgggtcttgtcttagacagaagtgttccccttttctgaggacagattatctcctgaaaycaarttctgaccagagtggcccttcagacttctggttctaagcctttcctaaccatctggttcatcctgaatgccttgtacttttgttaaaaagctgccagaatggcatatctactgcttatgaccttgaaggcctgcatttttttcaaagaaacatctactgctcttgtatctcttagaaaatgtatctttctggtgcctctaaagatccccattcctagcaagtgactagactagctgatctgaatagctcaggtctctagattagtcctcatttkgtgtccccactccatccccattcctatcacacatccctggatcccattccttatgggtagttctgaaaaataagagctagtytggggacaagcacctaacaattgttcctaggttgccagtcattaggcaacattatagtaaagaagggcctggcagagactagagctgctatatcrtgacttgagggactggygttattttcatttgtttcaccctcctgttgacatttaatgttacccaaaatcaactcaaacaaacaaaaaccctgatgcagtaaccttatccctaacagtagcactgctgagtgggaaagacactggggaaggcggccttctcacatgctgtcttctgtgttctctccttgcttattttaaccaaggaagtcaccccagcatgacagccaaagggatggatttttcatctaagtttttattctctcttctcaaggacattgggaacagggagacttttccctcgaagaccatgtattctgggagaagcgctccccytctttctagtggagctacacccccagtgtagcctgcagaaccacctgagcccagccctgccagtgactgacttcacatagaacagcagctgagtcttcagtcaatctcatgctcagagrcccatttgagaaaacggcatttcccctagtcctgactttggggcagttctcttttctggcctgccctgagaccggctggcccacatgtccttctcttgctctgacacaagttccccaagatgcccagggcaagtggggggattccttctatcccacctgtctagaaggccaatactcatctcccaggtccacaagccaagccattcatagaagaatcacagatattttattttcctgctgaaactaacttaattctacctaatttgggtggggagtagttggccaaatcatgaaattgttaactttttgctaacatattgtgtaatcaaccttaggtgttaaaaaaggtttgcttgtttctttcatgcaaatactaatgtagcccttttttcttagcgtatagcttctggcctgggcttggcctggattgttggacgagttctttatgcttatggctattacacgggaggttagtatatattgacatttgccaaggaaacaactttaaaattttaaatcctatgctggccaggcacagtggcttacacctgtartcccagcactytgggaggycaaggcaggcagattgcttgagctcaggagttggataccagcctgggcaacatggtgaaaccctgtctctacaaaaaatacaaaaattagccagatgtggtggtgcacacctgtagttccagctacttgggaggctgaggcgggaggattgcttcagcccagaagtttcaggctgctgtgaaccatgattacactactacactccagcctgggagacagagcaagatcctatctcaaaaaaaaataaaatcttatgctactatatttttcttcttgggaatttgagaaaaggggaagtcacttgatatttaggtgaaaggtctgttttctttttattaatctttcaattgtaacgaaacttatttttattgagcattttctatgtgccaaccactactctaagaactttgcatatgttatttaaccttacaacaattctgtaatacagatattattgcattttacaaattaggaaactgggactcagcatgattaaagctctaggtcacagagctactaagcgtaaactagtaaactaggaatcaaacccatgcagtccgactccagagcctcaccattactatacctgctatatctgagtaaggaggaggaaaagccatttttagctgtamttctttgaaacagagggaactccttccaaaggtcctagagcaaagttgctgtaattattatcccataattttctaagatccaagcaatactactgtggcacgttacttggcatgtggtatctgacttgccaacagcttcaggctaaagagttagttaacctcctaaggccagtttgtctaatgtacaacctcagatgcgatgatagaatggcttgcgaatgttgaaagcatcataattctggagcactcctggtaacttctgttctttcttctttttcagaacccagcaagcgtagtcgaggagccctggggtccatcgccctcctgggcttggtgggcacaactgtgtgctctgctttccagcatcttggttgggttaaaagtggcttgggcagtggacccaaatgctgccattaaagaattataggggtttaaaaactctcattcattttaaatgacttacctttatttccakttacattttttttytaaatataataaaaacttacctggcatcagcctcatacctaaaactcctgactcttaccactcatttccgtttgagtctgtatctgaaatcagtagcctagtcctactagatgagaaaggagccacaagtattgtgccctctcctcacccttccagcagatgcttctgtagtatgtgaggttgagaaaaagtctgattgtggtgatgtaggtatagtcatgccacagtgatgaaaaattaaagaaaaatcttctagctctcaggatatgcattatcacttgctacagatactccaaggccaaaggaatgcttgagcctaaaagatcaagaccagcctgggcaacatagcaaaaccccatctctacaaaaaaatatacaacagttagccaggcatgatggcacatgtctgcagtcccagctacttgggaggctraggtgggaggatcacttgagcccaggatgtcaaggctgcagtgagttatgatcacactgctgcactccagcgtgggtgacagagcaagaccctgtctcaaataaataaaaattaagtttctattaaagattgtttctgttgcttaaaaactgaagcaatagactaaatgtaagatgaaggttaacagagatgaatgtaacttgctacatttagaaacaaagatctgattgcctacgtacaaatgaggaagacttagaagatttcagttggtttagagaacactgccaagttggcagaatgagatagttactccaaaacactgatgtggccataaactaccttaataggaaatatagtgtctagacctgcgctgcccaattggccacatgtggccatctaaatttaaattaatttaaataaaaaagcagttcttcagttgcactacccatttttcaaatgctcaatagcctgtgaggatgagagacagtatttgaacccagtcctgactctaaaatccatgcattttccattgtaccagtttattgcttaagctccgaagatgaagcatttaaggatagaatgccatggccagccattgaagatggtcagccttggccaaatggccacctggagcccttggggcatttgatgaggaggctggaccagtttagcacacactccagtgttagttcatgagaaagtttcaccagtggagagcaaaataaggaaaatgagggactgtttttcataaagctttgacttgtactttttacattaaaatgttctttatgaaatgatggtgacgatgaatggtagggatttttggtcctggcttgaaaaaatgatataattgagaatttacaataagacagggttttggtttttgcttcataagaaacacatctagagaggccagagaacttgccgaggtttcctttctcactgcagagaacagcaggcatcagtgaagcagggcagggaagacctggagatgaagctggcttttcacctttaaaagtcttaacagggtgtacttttcaaactacagatggtccccaacttatgacagttcaacttaacaatttttcaacattacgatggtgcaaaagcaagactcaggctgggcatggtggctcatggctgtaatcccagctctttgggaggctgaggcgggcagatcacctgaggtcaggagttcgagactaacctggccaaaatgatgaaaccccatctctactaaagatacaaaaattagctgggtatggtggtgcatgcctgtaatcccagctacttgggaggctgagtcaggggaatcgcttgaacccaggaggcggaacatgtagtgagccgagatcacaccactgcactccagtgtgagtgacagagcaagactgtctcaaaaaaaaaaaaaaaaaaaaaagcaatattcattcagtagaaatcgtactttgagtaccaatacaatcattctgtttttgactttcagtattcaataagtcatatgagatattcaacacttcattataaaagaggctttgtgtcagatggttttgctcaactgtcagctaatgtaagtgttcggagcatgtttaaggtcactaggctaagctatgatgttcagtaggttaggtgtatgaaatgcaatttcaacttacaatattttcaacgtgtgctgggtttctcaggatgtagccccatcataagttgagcgtccgtaatgtgatcccagtttgtcattttgctattgcgcactgggttcagatggagttttgtaaggaagctcggtacataaagggcgctgtggttgaagtgcagaaccgagagctctgcctttcagtgccctacttccccactcactgcacttccagggaaccctagggcttggcagaaccagttggtaaagactgcttagagaataactcttacaagctagtcccttgtcttgtggagaaaaacttggcataagtgtttctaccattaactatttaatactaatctgttggcagtgtacattccaaagagtccatttatttgtataagggaaacacattctgaattttgctagatgaaaatcagacagccataccagcctataaatgcctaattgatccatagtgaaccttaagtattcccaccttcaggtgcctgtgtgcccttgggcaagcttattagcctccctaagcctcagcttacacagctgtaagttgggaatatgaaaatacttttatcatataaagttcatgaggatcaaacaataatgcatgcacagtgcctaccaggggtcttgtagccacacaaattgtggtaggaagcacgagagccaactgctgatgtagcttgttcagcaaaagtcagcaaccgggttatcttctttatgttctaaggacccacagagtttgcccagctttctatttcatccctaatagcactcgcctccaaaggtgctctcctaacttaataaaaaactgagtagtctcagttccttccctcttaagcagcactatccaacagaaccttctgacatgatggaaatattctgtctgcactgtccaataaagtataacccctacccatgtgtggctgagctgaatgtggctacagcaactgatgagttgaatttttaattaatttaaatgtaagtacatacatatggctaaggctactatacttggatagcacagctcttaaagcagcagttttcaaccttggctgtctgttaagctcatctgggtgccttttaggagtccaggccgggtgcggtggttcatgcctgtaatctcagcactttgggaggctgaggcaggtggatcacctgaggtcaggagttccagaccagcctgacgaacatagaaaaaccttgtctctactaaaaatacaaaatatacaaaattagctgggtgtgggggcgcatgcctgtaatcccagctactcgggaggctgagacaggaaaatcgcttgaatccaggaggcggaggttgcagtgagccgcsaatgtgccattgcactccagcctgggcaacaagagggaaaagagagaaactccatctcaaaaaaaaaaatccagatgcccagatcaattaaatgagaatcttggtatttttaaagctctcactgggcaattctaatgtgcagtgaaagtggagaaccattgctgtaaaagcagtgcttgagagactcttgtgcttatgagtcacctgaggatcttattaaaatgcagattcagattcataggtctgaggagggaattgagagtcttcatttctgtttttggagacaaggtctcaccctgttgcccaagctgagtgcagtggcatgatcctagctcactgcaactcaaactcctgggctcaagtgttcctcctgcctcagcctcccgagtagctgggactacacgtgggccgccacactcctttttttttatttgtagagatggggtcttactatgttgcccaggctggtctcaaactcctagcctcaagcaattctcccaccttggcctcccaaactgctgagattataggtgtgggccctaaatgtcctttaagtgttcttctaagagggaggcaaagggaagtttgactacacagagaagaaggcagcagggcagggagagattctgaagatgctaagctgctggcatctaagaggaaggggacacgagcaaaagaatgcaaggaatgccgctctagaagctggaaaaggattctctcctacagcctcttcaaggagtgtggccctgacaacttcttggttttggccaagtgaaaccattttgggacttctgacttccagaactgtaagataataagtttgtgttgttttaagctgctaagttggtggtaatttgttacagcaagcataggaaactaatatactgggttcagttccaggaaacagagagggtagcagaaagcacaggaattggagactcacacctggcttgaagttgccagtcaacttatagacttgctgatgtggaagacaaactgtttttcctctgctctcatacaacaatcaacacagaagacttctgtgaccaaatgttggagttttctgttcacacaccaagcaggcaaatcagttctgcagtggacaccagctgggcatcctccagttcaattctgacactatctacctggagatagcatcagatcccacaggttgagggctcagtcccacaagactgcccgtgaccccaaccaactgcaagtccaggcttctggaacttgatcaactggcttcaagttgagggtcggttaattcgctacagtgactcacagaactgagacatgcatttactagtttattaaaaagaatatcctaggccaggtgcagtggctcatgcctgtaatcccagtgctttgggaggctgaggttggaggatcacttgagcccaggagttcaagaccagcctgggcaaaatggtgaaaccctttctctacagaaaacacaaaaattagctaggcctggtggcacatgcctgtagtcccagctactggggaggctgagaggtgggaggttcactcgaacccaggaaggtcgaggctgcagtgagctatgatcacaccactctactttagttcagtgacatgacagagcgagaccccagatgatggagtgagaccctgtttctgggggaaaaaaaaagagtattttaaaggacacaaataaacaactaaatgaagggatacatacggccaggtctgcaagggtcccaagcacaggagcctctgttcccgtggagttggggtgcaccaccttcctggcacatgcacatgttcttattcaccctcctataaacctccacatgttcagctctccaggagctccctgaagcccgtcctcttgggcctcttagacttcattagagaggcatgactgaagcacagacaccatgtagaaatgtgactggactaaaggggtatgatctaatacaaaggaggctgagcggggaaacccagcaagggtcttcagattcctggcttgtgcggcatttttcctgcagggcagcaggcaggaccccttctgaaatgaaggtcttatgacccataatcagaaaagtggtggaagattagagcccagccttgggcaggtaaaaaggagggcagaagggcagagagggacattctgttttctgaggcctaaagtgccccaacattgtaacaaaaaaccgtaccaagggacttatgagccaggaaccatggatgaaaagatatataattttatatataggcacaaaatatcacacttgcctgggaccaagatgtctccaaatctgtttcttcatttgaaaatcagagataatccctttcttaggcttagtgtattaaatgagaaggaatgtagcagtaggaacagtgagtacttaaatgttgcttccctttcccctgctgttttctcttgcagaggtgtccaatcgtttggcttccctgggccacgctggaagaagaagaattgtcttgggccacacataaaatacactaacattaacgacagtcgatgagctaaaagaaaaaaatattgccaaaaaaaaaaaaaaacccacgttttaagaaagtttacaaatttgtgtttggctgcattcaaagctgtcctgggctgcatatggactgtgggctgcggattggacaagcttgctttagagggactatcagaaacttatcttctcccaggcagctcctactgcttaaggtgcataggatccccttggacacagggtaacgctattggctttgtccagtatcacatatgtgtcctctgtgcaaagaaataccaagaaaggctgatttggttgttcttatgctctaaaactacagtacttgctcatcataatacataattagatccaggcccagtgacaacaagcatcccttatctctgactactaaattagctatgatttataaactcttctcctgaaaggaagagaaggaggcagagtgaggcatgactgcaatagtctgaaaagccacagtgacctgacaactcttcagggacaggcactgcttatccgggtgagaatgaacatggagcctaaatgcttacctggaccataaagttcatcactgcaaccaaacctgttcttttgttcttactacaagatcaaatccccctgctttgtgcttct

SEQ ID NO: 93798 - DNA, 21401 bp, Homo sapiens
gaagaaggagaacctgaaggctgcgcaggaggagtatgtcaagcgagccctggtaaggataggcaggaggtgggcagggtgcctgggtggatgggactcggagaagagcccttctcactccacccctctccctgcttaggccaacagccttgcctgtcaaggaaagtacactccgagcggtcaggctggggctgctgccagcgagtccctyttygtctctaaccacgcctattaagcggaggtgttmccaggctgcccccamcactycaggccctgccccctcccactcttgaagaggaggccgcctcctcggggctccaggctggcttgcccgcgctctttcttccctcgtgacagtgktgtgtggtgtcgtctgtgaatgctaagtccatcaccctttccggsacactgccaaataaacagctatttaaggggragtcggccgtccgtgtcttgtggtgtctaatgcaggggagggcctggggaggtagcagagcccagaagaagaaagagcccctgttctctgttttttctgggcagaaaaggagtgaaaggtggaaggaccttcctgctctgttttatacttggccagggcttcaagaaaggctgagagcttgtgacattttcttccagccactgcaggctctgccccttcacctaacagcataagatagggctaacagttggggagtatggttgtaactgctcatgtcttaggaggcttcagcctcagcacttttaggtccagaactcaaggggggcagaagacccctgtgacaaaaacccactaactagctcatgagtgacatgagccaggcaacataatgggtgttttatatgagtagatgctgttatttttaatttatacctaaggctcttttgcccaagattgaactgtttcttggtggaaaggattatcaatgcatatctctttttttttttttttttgagacaatctcactctgtcacccagactggagtacagtggcacgatcttggctcactgcaacctctgcctcctgggctcaagcgattgtcctgcctcagcctcccaagtagctgggattacaggctcacgccactatcgcctggctaatctttgtgttttttagtagaggtggagtttcatcacattggccaggctagtctccaactcctgacctcacatggttcctccacctcagcctcccatagtgctgagatgataggcgtgagccactgcgcccagccaatgcttatctccttaatctacactattgagttttctgttttcccatctttttttttttttctttttgagacagtttcgctcttgttgcccaggatggagtgcaatggcacggtctctgctcactgcaacctccccctcccgggttcaagtgattctcctgcctcagcctccacagtagctgggattacaggcgcaagccaccacacccggctaattttttatttttagtagagacgaggtttcgccatgttggccaggctggtctcgaactcctgacctcaggtaatccgcctgcctcagcctcccaaagtgctgggatgataggcgtgactgcgcctggcctgttttcccattttaacaggagatggaattagagagggcttcttagtctcctttgggctgtggaatcccataaaaaccttgaattgtttccaatacccccttggtaatgcagatacagaagttaagctgtagagctcaggctccaggtgaagaactgtgtctctgtagctgctgctttccatgaagctagaatgagcgtgccatgccattactttgagcctttccccaatgacccaggctggggtgtacagtaactacatcagctctctggacctagagaatctctgcagtgattcaggtagaacggagttacctagaaccttctaggagtataaaaacttggtcctaggccgggtgcggtggctgacgcctataatcccatcattttgggagaccaaggtgggcggatcatgaggtcaggagtttgagaccagcctggacaacatagtgaaaccttgtgtctactaaaaatacaaaaattagccgggcatagtggcgcacacctgtagtttcaactacttgggaggcggaggcaggagaattgcttgaacccaggaggcagaggtaatggtgagccgagattgtgccactgcactccagcctaggcaacagagccagactccgtcccaaaaaataaaaataaaacttggtccttcccttttctgcttattttgcttttattgcttacatctaaaacaaaaccaatcactattatccctctaaactttggattaatttgtctgcctagctcattcaactctgggaaacaaacactgaagtaaagcaaataaaaattgaaggtcggtagaagatggcaaagggggcattccaaaagggaacatgtgcagagtctcagagactggagagattgtttaaagatcaatagtttcagccgggcacggtggctcacaactgtaatcctagcactttgggaggctaagtccggcggatcacgaggtcaggagttcaagaccagcctagccaatgtggtgaaacccccgtctccactaataatacaaaaattagctgggcatggtggcgcgcgcctgtagtcccagctactcgggagactgaggcaagaagagtcgcttgaatctaggaggtggaggttgcgctgagccaagattgtgccaccacactccatcctgggcaacagagcgagactccgtctcaaaaaaaaataaataaaaaagactagagaagcagagaacgtcatataccagtttgggggatttggacttttatttatttatttattttgagacgaagtctcgctctgtagcccaggccggagggcagtggcacgatctgggctcactgcaacctctgcctcccgggttcaaaccgattatcctgcctcagcctctccagagtagctgggattacaggtgcacgctactgcacccggctaattttttgtatttttagtagagacggggtttcaccatgttggccaggctggtcttgaacccccaatctcaggtaatccgcctgccttggcctcccaaagtgctaagattacaggcgtgagccaccatgcctggcctggacctcttaattttatgataatctgagttcccgaaagagtaattgatagaaaaaaaaactacacctgaggacacaactttctgagttcaaatttctttttttttgagacagcatttcactctgttgtccaagctggagtgcggtgtcacaatttcggctcactgcaacccccgcctcctgggttcaagcgattctcctgcctcagcctcccaggtagctgggactacaagcgcatcaccaaacctaattattattattttttattttttaggatagacagggtttcaccatgttggtcaggctgatcttgaattcctgacctcaggtgatccacctgcctcggctgcccaaagtgctgggattacaggtgtgagccaccacacacagccaggttcaaatttctttcttttttttttttgagacagagtctcgctctgttgcccaggctggagtccagtgacgcaatcttggctcgctgcacgctctgcctcctgggttcacgccattctcctgcctcagcctcccaagtagctgggactacaggcgcccgccaccacgcccagctatttttttgtatttttagtagagacggggtttcactatgttagccaggatggtctcgatctcctgatctcgtgatccgcccgcctcagcctcccaaagtgctgggattacaggcgtcagccaccgcgcccagcccaagtttcttattctttttgtttatagactgggtctcactctgttgcccagcctggtcttgaactcctgggcttaagtgattcgcctcggcctcccaaagtgctgggattacatgcttgagccaccacacctagccccggattcaaatttcagtgtaacatccccaatccactgttatacaagcaatgaacaagttatttaacccctctgagccagtttcctcctcttaaaaaaggcacaaaacttaatagaaagcaactaagaagccaggcacggtggctcaagctggtaatcccagcactttccgaggccgaggagagtggatcacctgaggtcaggagttcgagaccagcctgaccaaaatggtgaaaccccgtctctattaaaaatgcaaaaattagctgggcgtggtgacgggtgcttgtaatcccagctactcaggtggctgaggcaggagaattgcttgaacccaggaggcggaggttgcggtttgccaaaatcgctccactgcactcccgcctgggcgacaagagcaaggaaggctctgtcttaaaaaaataaataaatgaaaatacaaaaattagccaggcgtcgtggcacatgcctgtaatcccagctacttgggaggctgaggcaggagaatcgcttgaacctgggaggcggaggttgcagtgagccgagattgtgccactgcactccagtcggggtgaaaaagcaagactccgtctcaaaaaaaaaaaaaaaaaaaaaaaaagaggccgggcacggtggtacacgcctgtggtacagcactttgggaggctgaggcaggtggatcatgaggtcaggagatcgagaccatcctggctaacacggtgaaaccccgtctccactaaaaaatacaaaaaaattagccgggcctggtggcgggcgcctgtagtcccagctattcaggaggcagaggcaagagaatggcgtgaacccgggaggcggagcttgcagtgagccgagatggcgccactggactgcagcctgggcgacagagcgagagagtgagactctgtctcaaaaagaaaaacggaagcaactaagaaatgtcaagagtgccattttggaatcagagaagtcatgctgactgaggcacaggcttggcgtgggaaaagtggactccaatctgttaacttctgaagttgtccacggcaaatatttctctgacggcacaggaagagatctgaacttggcttccctcatccattgaacaagtattaacaagtatctatatatgcctaccgtgccaggccttattctaaccactggggctgcaatatttaaaaagacaaagttggatcctccaaggactgtggtggggaaggctgacaaaacaagtaacaaaaatgtgtaacattaaaaaaaaagtgtaatgttaaaaaaaaaaagtgtaataaagttacaaagcctagccccagctcggcttgtttccctagctgaaatgggggatggccgggcgcggtggctcacgcctgtaatcccagcactttgggaggcccgaggcgggaagatagcttgtgcccaggagttcgaggtcacagtgacctatgatagccccaccgactccagcctgagcgatagagcgagaccctgtctctaatttagaaaaaagaaagttgtggccgggcgcggtggctcacgcctgtaatcccagcactttgggaggccgaagggtggtggtgggtgggggcgcggatcacctgaggtagggagttagagaccagcctgaccaacatggagaaaccccgtctctattaaaaatacaaaattagcccagcgtggtagcgcatgcctgtaatcccagctactcaggaggctgaggcaggagaattgctggaacccgggaggcggaagttgcggtgagccgagttcgtgccattgcaccccggcctgggcaacagcaaaactccgtctcaaaaaaagaaaagacagttgtttaaacatttttatgaaatgatatgggaggggactggtctagggtttctaatagcctccacatcgcccagcggcagagcccacaaaactgccactggccgccaccgggttcctccacctccttcccgatctcaggctggagaagtggtgcaggggtcgctgcgaaaggagaggagcgtgtatgacgccacatccggcgcgcggcggaactggcctcctttgcttccgcggcggggccggaagtaggagcggcggcggcggcggcggcggcggtcgaaagcggagtgaaagagggaggcagggagccggagagccggaaccggagtcgcagcggcggtaatagtgcgagactcctctaagtcaccgtccttagcgcgggaccgcggggttcgacgggagttagcgggggtgcggccaggccgttggacgccggggggtcctggggccgatgtgaggggaggcgggggtgggggagccgggccggctctagaatcgagttgtccgctccgagccccggacggacactgatccgcgggctcgtcttggcctttcccaggagacccctgtgcggtgcggagggggcggcggccccgactctgacccgcgccgggggtgggccatggcggagatcagcgacctggaccggcagatcgagcagctgcgtcgctgcgagctcatcaaggagagcgaagtcaaggccctgtgcgctaaggccaggtgagctcgttggccctggggaagggaggccaagccgccgcccacgggttctggcctggggcaaacccaactgagaactttgggcttgcctcgttctggaagctttcccagagaggagcaggatggagccgctgccctcgaggaaaagctagcctgctcggggaagacagagtggataaagacacttaaagtttattagacgatgtgtttccagtggagtaagagtgttacataaagtacttaggaaactcaaggaaacaagtccatctgtcgggggacggaagcttgttggaggggggccgaactgtgggagaggcctcgaataaggaggtggtaaaagagtcagccaaaaaccaaaagtttaagacaggaaagttaaagaccctgtgatttataaaagtcttctaattacaacaacccttaaagattggtggtattgtactcattttacaggtgggaactttcatgttcaaagttacccacaagtaaggaatggggtctgaagccagctcttagtgtcctgtcctttttcaggccataatgcaaaaaggtggagttggatcattcacgttcagggtgggagcctgagaaatcgtagcaagtaagccagggtagaattaagcacgatagggaggccagttcagagttctgtgggaagtaggatgatgtagtggttaaggctctaggttttgcagtgtgagatggctctaggtttgaatctgaactctgccgctttctagctgtgttagtaatcttaagtgtctttatttgtaaagcagaattaatagtacttaataagatgattgtgaagattcagtgagttggtgctggagatgaggttagcacagtgttttggtacagcatacgtgcttgataatcaccaggtattctatttcttttggaagagggcaataatgagatgggctaaagccatcagggagggcttttgagtggaggtaggccttgaaggatgaagataatttggctagctgatggaggcagggccagtgagggaagggcattccaagcaggacgaatgtaacagtggaggccctgagatgcgtggggaacagtcaggggtttaattacctgcctcctctggggaactgtgtgattgtggcttctaccaggctggagaattgtggcagaagagcccacagaattaccctacgtttattgaacagtaaacattggcctttacagggccactatttggcctggcccggtactggcaaaaaacttctatccatctcttccccccagcaatcctatgaggttggaatcatttgctgcattttatcgaataggaagccatgactcgtagaggtctggtgacttaactgaggtcacccactgaggacgtggcagagctgggtcctgaatctgtggccctcaggctctttgcctggccctgcctcacatagactacctgcagccagacagggcctgtgaggggatgatgagcagggtcggcctctttttcgccacctgtctgtggcttttctcttttgccagctgaccagaccagccccatggtgtttttagttgtcccctttccctcagtcctgattggcatttttaggaacttaaacctgttgttgcctggcactattctttaacctcgaagtattgtctccctcacgggccctggatcagtgtggtggtgatggtagacaaagcttagatagcatgctggagtttgcagaatagcaggaagtcgtatattcagtctccatggctccttgcaacagcctaaggaatacgcagggtgggctgagtacttagccccatttcatagcagaggaaactgagcctttgagtagataatgtcttgcccaacatcacgcagctagtcggaggggaagttagttttgcatccaggtctttgactgtgctccgtggtcactgagagccaggcagaggcatttagattttgatgtggggtgtgaggcagcaggaagccatggaaggctgaggggtggagggtcctgcccagttgaaactgagtggaactaggaggtactaggccaaggcctgagttggccgctgttgtcccaggctcagtctgaagcagggccatctctgatacctggttatggcctcctggggacccatcagagacccaggctgaggctggtggtgtcaagagcaccagcttgcctagagggcacagacatgcagatgaaaccagtggaagcacagaggtccgcagtgtctgagctgaaattgctgctactagaaatattagcacagtaggagagctgagcttttgaatcaggtggtcttcagtatgaatctttgccttgtcacctagaagcaatatgaccctcgtcaagtcactttctgattttttgaagtgataatgacatgcagttgagagtccgggtatccgggcacagggcctgctgcgctggtagccgttactgcaggcaggtcctgatagggctggggaagtgctgcaagtggcagaactggggctggaatctgggcctgattcccaggccacactggggttgcgctggcactgaggggggctttgcagagagcacgggccctgcatgtgacctccctgggcttcaggttttcactcagggtctgtggaaggggctggcataaattctcaggaaattgggcttctgggttccaatttagccactctccagcttggtgaccttgaccctcccgcttttctgtaagctttggtttctttttttctttttttttttttttgagacagagttttgctgttgttgcccaggctggagtgccagtggcctgatcttggctcactgcaacctccacctcctaggttcaagtgattctcctacctcagcctcccaagtagctgggattacaggcacgcgccaccatgcccagctaatttttgtatatttactagagacggggtttcaccatgttggccaggatggtctcaatctcttgacctcatgatctgcctgccttggcttcccaaagtgctgggattacaggcatgagccaccgcgcccggcctagcttcggtttctttactgttacgtgaggctgaagagaacctccccagtctgttggaaaggtcactatgagcagttgatggggaaggatgttcagcacaagaagcagtgcaggtgggagagtccgggtactgatgtggcctcttggaccaccgccagtgctgccttctgttcccagaaagccagggcagacctccttcgtgctgcctctgccatacagagcaaggggcataagtgaatcctcctgtccactgagctcaggaaactcattctaagggaagagattggcagaaagaggggggccaggcgagttgggcctcccacatcagaatatcttgataaagagtcagaccccagagccaggcttccctggttcatatcccacctgtgtcactggcaccaagccagcctccttccctgcttcaatttcttcatctgtgtaccgggaatcatcatagtacctgcctgccaagctcttaataacatttgtggcacacagtatgagctcgaatgttcactgctgctattaccaggcaaaatttggaaatacagtgttgcttaaattgggtatctataggctgggtgcagtggctcacatctgtaatcccagcactttgggaggcaaaggtgggtagatcacttgaggtcaggagttcgagaccagcctgggcaacatagtgaaatctcgactctactaaaaatacaaaaattagctgggcgtggtggtacatgcttctaatcccagctactcgggaggttgaggcaggagaatcacttgacccaggaagcagaggtttgcagtgagcaaagatggcgccactgcactccagactgggcaatggagccagactctgtctcaaaaaaaaaaaaaaaaaaaaaaaattgggtgtcttacctggcaaagtgatttcatctcctgctcactcaagtagaagtagactgcactgcaaggagaaataaaaaatatttaagtcctcatagtcataaagaaatactgaacacatggcaagagcacctcacttttttttttttttttttgagatgaagtcttgctctgtcgcccaggctggagtgcagtggcgcgatcttagctcactgcagcccccacctcccaggttcaagcgattctcctgcctcagcctcccaagtagctgggattacaggcacgcgccaccacgcctggctaatttttgtatatttagtagagacagggtttcaccatgttagtcaggctggtctcaaactcctgacctcgtgatctgcccaccctggcatcccaaagtgctgggattacaggcatgagccaccgcacctggccaagagcgcatcactttgaaggcgcatccactgtgggcctgccctgggcacctacccttgtgtctggatagcctgggagaagggctctgtgattggccaagggtgacttaagctctgctgtggagaggatggggagacccgcctcccaggagtgagtcctggatgcggaagagggagcggcagggggagtcagggctggaaaagtcccagcctgctcagaaggcctggaacgctgggataagaggttggactttgtccttttggcagcagggggccacggaagggtgttgcatgctgaagggccgtggtcagcctgttttggggagactgtacgcttcactcctgccccctggagcttccaggactgcctcatatcctcccctccccccaaaaaaggtcaggaattgggctgggctggcctggctgtggtgaccctggtcttctcctgtctccagagagatcttggtagaggagagcaacgtgcagagggtggactcgccagtcacagtgagtacctgctgtccctgcagagccaggcctggtctttcaggcacatgaagtttcctcttcatcttgggggctctataagcccaaccctaagctcttttatctgtcctttccctcaccttcaacggagcactgctaaaagaagtgggggttgctgtgcacgttggctcacacctgtgatcccagcattttgggagggcaaggtgggcacatcacttgaggttaggagttcgagaccagcctggccaacatggtgaaaccgtttctactaaaaatacaaaaattagccacgcgtggtggcacgtgcctgtaatcccagctacttgggaggctgaggcaggagaatcgcttgaaccccagagttggagattgcagtgagctgagatcaggccactgcactccagcctgggtgacagagggagactccgtctcaaaaaaaaacaaaaaaaaacaaaaaaaacaggccgggcgcggcggctcacgcctgtaatcccagcactttgggaggccgaggcaggtggatcatgaggtcaggagatcgagaccatcctggctaacatggtgaaaccccatctctactaaaaatacaaaaaaattagccaggtgtggtggtggacacctgtagtcccagctactcgggaggctgaggcaggagaatgacgtgaacccaggaggcggagcttgcagtgagccgagatcgcgccaccgcactccaggctaggcgacagagtgagactccgtctaaaaaaaaaaaaaagaaaggaaagaaaagaaaggggttatgggaagggactttggatttgttagtggagattcttggccagggcagaaggactcctatttggcgagtgattctgctcacatatctccagggctctgtgttagtaacttgattctgggtactttgtggggagtagagagaggaaggggccgggacatctacctggaaggacttagttctagctcttgcctacagaatagttggtactcagcataggacagtgggtatggttccagaccagactgacttggggtgggagaggagaattttggtcctaggaagtagaagtgcagccaagagtgataaagctcactaaagcagcgggtgtttggagggtagtccctggcaactcccactgcttgagttscaaccccactcttcctgttccccaggtgtgcggcgacatccatggacaattctatgacctcaaagagctgttcagagtaagagtgtggccaacactgtgaaatgtaacggggggatgactggaagacccctgtaattgagggtgggagccttaatttggggcgtggagtgggggcaaggggccccaagttagatgggtggttgtggaagaagggcctccgctggacagaaacaggtagggggtaggggactgtttacgacagggcaaaactttctacttccccacaggtaggtggcgacgtccctgagaccaactacctcttcatgggggactttgtggaccgtggcttctatagcgtcgaaacgttcctcctgctgctggcacttaaggtggcagtcccyggcttctgcacccccaacctgggcgacctcgggccgggcctgtcttagtccrttccgccctcatctcctatcgtgaccagccccaccttggagctgtgtcactggtgatggaccgattctgcttttgggggtggtcagagacttgatgggggttgaggccagcggggcagcattctgggaggggcagaggctcactgttgcgaatgtggcaggtcattgatgccactggtgggagaggcagtgtggggccagatgacaaagggcctgggtgccttgctagggacccggtctgtgtctggtaggtgaaagaagagccattaggttcatagttgagggaatgggtcagctttacattctctggaggggtcgtgtgggcctgggaggtggctgatgccacacgattcaggcaagaggtgccaggagtgtgctgggcagtggttgtgaggatggcaggctggcgggcacgaggaggtcagagarggatgtgtggagagaccgtctaggcgccagccctggcttggtggccacccccaggttcgctatcctgatcgcatcacactgatccggggcaaccatgagagtcgccagatcacgcaggtctatggcttctacgatgagtgcctgcgcaagtacggctcggtgactgtgtggcgctactgcactgagatctttgactacctcagcctgtcagccatcatcgatggcaaggtaagccagcccagggctccatgggacagggagaggaggggggcttcaggcctcagccccgtcctctttccctgctctcccctgtagatcttctgcgtgcacgggggcctctccccctccatccagaccctggatcagattcggacaatcgaccgaaagcaagaggtgcctcatgatgggcccatgtgtgacctcctctggtctgacccagaaggtgagggcatgtgggcaggggcaggcagggacagccaggaggggttgggaaagagagggagcagggctggtcttcactgtcactcgtcctccacctgccaaatggctggaaccctggaggaggagcagggaggtctgcatggcaggtgctttgagcacacagtggcttggggcatggcccagagggctgtggaggacaaccaagtcatggctccctgaagtgaaggggccttagaacatgacagcagcttcttcagaggtcagaaccccagaatggtagccccctgagacccctcattttgtgggttttccactagtgtagagcagagctgagatttaaagtcaggtcttctgaggaccagccagagttcctgttgtcacaggcacacaygcacaggcagcctctgctccagcgcagacacacacacacatacacatagcctctgctccatcacagccacacacacgcacacgaggcctctgctccatcacagccacacacatacagacacacacatgcagacacacacatgcagccgctgctccacagtcactccggacctccctgtgacaacacagggtgcccttctgtctctgggagtgcccctttcactcttatgtgctgtttggacggggattgtatgatcactgtgattatgagggggccccaggcattgggcgttctttctcctctggagcttatctgcccctacatttgctgtcctggtccccgccatcccacagaccatattcaggccccatgctctggtccyacgggcctctggtggacttggggaggggccaggctgctcaccctcaaggggcagcgctggcagccagagaagcctgaggacatccctctccatccctccctttccgcatcagacaccacaggctggggcgtgagcccccgaggagccggctacctatttggcagtgacgtggtggcccagttcaacgcagccaatgacattgacatgatctgccgtgcccaccaactgktgatggaaggttacaagtggcacttcaatgagacggtgctcactgtgtggtcggcacccaactactgctaccggtgagccggctgggccgggctgggatgggcgggcatctgagccgagctgctcctgaccctgctgccccgccttccagctgtgggaatgtggcagccatcttggagctggacgagcatctccagaaagatttcatcatctttgaggctgctccccaagagacacggggcatcccctccaagaagcccgtggccgactacttcctgtgaccccgcccggcccctgccccctccaacccttytggccctcgcaccactgtgactctgccatcttcctcagacggaggctgggcgtggggggggctgtcctggctctgctgtcccccaagagggtgcttcgagggtgaggacttctctggagaggcctggagacctagctccatgttcctcctcctctctccccmcttgaaccatgaagtttccaataatttttttttctttttttccttcttttttctgtttgtttttagataaaaattttgagaaaaaaaatgaaaaaattctaataaaagaagaaaaatggtttttgggtttgtgccagacttggttgggaatgcacagggttgctggcctgggacctggggtggacgtcagggccttgactgcctcagggccccgacctgccaagagggccaggctcaggccagtcagcttgcccagggcctccaggggccgctgcctgctggcttccccagccctagggagagggctctgttctcatgggcagccttatcttattaacagcatacacacacaggcacacacagaatcacaggattctgatttctccattttcctgaagaggagatgggcctagagggccagtggattttgtgctaggtcaggcagctggaaacacaggtctagatctgggcctgggtctcctagcaaagcctttgctcacccagccccgcccagggccaaacacaggagcccaatgtttcctgagcatggatggcttttgagttttattaacaaaaatactctggtcccagaacaacagactggtgtggcctgcaccagtgtgtgtgggggggtggggattgagcccctccagagcccatggggaggcctggtaagtggggatgctggtctgtggccccatttggccaggcagagccccttccattcacacggaggtgagagccgggaaggggaagccggccccagctggactcccagcagccttggttaggctttgaagccasaggggggtgggagtgaaatcaaggtgtgaagttgagggggtgggtgggcaggcccaaggcggccatttggtgtgggggatggggccggtggaggtgagggggctccagggctgggggaagggagcgggaggtttgtgatggaggcagaggggcccagcagtggttcagtacatgggtttggagcccacatccagatagcccccaggcgcggtgtatggtagagggaaggggcccccttggagaaagtgyggggcaaagggtaccgccggtggagccgctgggtacccggagccccctgacccgtgcggcagctccagaaatgcagccgagtagggggctgagcgcccggagtctggagcctccgggaagctggggctcctgacatggagagagggatgtcagagcagggcagagggacccgcagccccgcctggtcccctgtcccactcacctggtgggaaggtgactgggggccccatggaaagccgcagggtgcaggaggtaggcctcagcactggggccaccacacagaggtgccggggcagcggtggcttccccgggggctggggcctgttctggatctgattcacgaatgtctccacccagggtggagtcgcagggaccacctggtgtgtctggggagagggaagggagaggttgggctagggaggatccctgtctcaggcctggccccatcgccatcgggactacactcacctccgctcccataggcctctgtggctgctggctctgggccccgcagyttcctcttcacacgggcgtctcgctccctggggaacagtggtggtgatgatgatgatgatggtgatggccatggtgatggtaacagtacttacccggtgccaggcatttcaccctcccagggaccctgtcaggtaggggccatcattatacccattttatagatgaagaaactgaaggccagaaaattaaataactagaaagtggcagagctggaattttgtccctgctcaaatttgtccatgctttcctattgtgtttagtatcagtggaaactccttcccagtggcaaggccagggcacagtctcacctagctcatctttctgccccatctccactctcagcctctctctggaatcctcttctgtcccctcttcacgggctgaacctgtcctttttcttttcatttttaaaatttgagatggggtcttgctatgttgcccaggctggagtgcagtggcacagtcacaggtcacagctcactgcagcctccaactcctgggctcaagtgatctttccatctcagcctccgaaagtgctgggactacaggcatgagccaccaaacctatccttgcctcactgcaagcgcaagttcctcaaggaagtcctccctgacctccgagagcacacacccctccctcataacatccgtcacagttctgcttttgcatttgatggagtgactccttggttcatgtctgtctcttctgacaaactggaagctacttgagggcaggggccagctctgaggtgctgcacttggaacagttcccacggccttacggaacctttactgtccgacataacctggcttcccctcccctgcctgactcttagtcactccactgcagccacgccacaggcacagccccacctcagggcctttgcacgtgctgttcccactccctagtgtgctttgccagatgcccacctggctccctcccgtacttccttcagctctttctcaagtgtcttcttcccactgaggcctttccaggcctcttatctaatacctcaccccagtccttcctatcttttcctggtttatttctcttctcctttttcttttttttctttttttttttttttttgagacagagttttcttttctttctttttttttttttttttgagaggaagttttgctcgtgttgcctaggctggaatgcaatggcatgatctcgactcactgcaacctccacctcctgggttcaagagattctcctgcctcagcctcccaagtagttgggattacaggcgtttgccaccatgcctggctaatttttgtatttttagcagagacagggtttcaccatgttggcaggctggtctcgaactcctggcctcaggtgatctgcccgcctcagcctcccagagtgctgggattacatgcgtgagccaccacacctggtctctcttctctttagaatggcttcctaacagatgacattttatttatttctcttgtctgcttgtctactctccccactagaaatcagctgcatgagggccggggctttggtttgctttgtttgttttatctccagtgcctggaactgtccctggcacatagcaggtactatataagtatttgctgagtcagtgaatgaatgttttcacttaccactgcatttctgatgtccagcacggtgcctggcacacagtgagtgattaataaacatttgttgaatgcatgaacaaatgaatgaacaactcccacctcttacagtttctgccgttctcccggaagcctttggcaaagggattggctgcaatcttcagttgtgtgatctggggacacacatgcagggtcaaagcaactgcggtctgggcagggggccaccaccccctcaagcagggtcactcacctgtgggttctggtaggctgtcacggagatgaatgtggtctcggggaagcggaaggaggccatgcccccscagtgctggctgcagagctgggctgcccgaactaggtgtatgcggggttggtacttgtgcatggagtgcaggatcagctgggagggaggaaatgggagtgattccctgccctgcgcctcacccttggcctcccttccagcaccccccaaccctatcctggagtcccagcctgggcctcacgtggccgtgggggtccagcgtgctgttggtgagcttgacacgatggaaagacacaggctgccgcatccaatgtgcaccagtggcaggagagtcggggtgaatgtagacacggtcaggcaggcggggctctgccttgccgctgggctcccagcgccggccctgccagcggtagcgagccccatccaccggaatcacatccagaagaaacaagtagcgggcctcggggtccaggccagtgactgacactcggcaggcagggaacatgcgcctgtgcaagggaggggacaggagaggcctggagctacccactggccaggggtgggcccagcaccagtaacgggacataacaacgggctccccagagctgtcagagaaacatcaaaggaggtggaattagaacccagagggcaggctggaggctgtggctcacacctctaatccctatactttgggaggccaaggtgggaggatctcttgagtcaggaattcaagaccagcctgggcaacatagaaagaccccatctctacaaaaaaattaaaaaattagccaggcatggtggtgcacactgatagtcccagttactacagaggctgaggcgggagggtcacttgagcctgggaagtcaagactacagtgagccacaattgcaccactgcactccagcctgggcaacagggcaagacactgtctctgaaaaatgaaaaagggccaggcgcagtggctcatgcctgtaatctcagcactttaggaagccgaggtggaaggatcatgaggtcagaagtttgagaccagcctggccaatatggtgaaacaccgtctctactaaaactacaaaaattagccgggtgtggtggtgtgtgcctatagtcccagctactcgggaggctgaggcaggagaatcgcttgaatccaggaagcagaggttgcggtgagctgacgagatcgtgccactacactctagcctgggcaacagagcgagactccatctcaaaaaaaaaaaaaaaaaaaaaagaagccagagggcggaatcttagagctggaaggttttcttgtctcattttacatttggggaaacaggacagacgggttaagtgatctgtcacacagcaggttaggaacagagccatgactcctacccctcaaagcctatttgcagaagcaggggtgactaactttcttgctaggagcttcctgtccccaccctcctctcctcccctgatctccagcaccagaatctgcagctcttagatgaatttgctttagaaaaaatataccctgcctgcagtagggccgaggactttccatgctagggcttgagttcctgccccagataaagacctcatctaaggtcaaacactgaccgtgtccctgcctctagggtgaccctggacctagtcatatactgactcctattcgagttgcatactgatcccgaatcctggccagatttccctgatgctggtcaatgggctggcccttgaccccctgtccttgtctggatgctggtctaagccacacactaacctataacccagagggacttcctgaccctgccccagactgacccatgacccttgccatagattggtccctaaactcagccacagactccacagactggcccttaacccttgtcacagagtgactcctgattcctgccacagagtaacccttgccccaggccatagtcagattctaggcctaggcagagctctagcccctcgggaaccacccagtcctagccccctccccagggactctgcctttcccaagagacccccaccagaaacacggaccctggccagcccctcacctcccagctttggtgatgatcatttctgttcccacagagctgaactccttccatagctcccggttctccaggctcaggctgacccccgggagggaatggagggcctctggagctgatggggccggctcagtgcccatggcagggggcagaaggggcagaggtgggtgcgcggccagggtgcggggagcagcctccatcccggagaggaagcaatccagtttaggggtgtccagttctggaagccggggaagaatgaggagccagccgagggccacagcccccctattctcctacccaggagctggtcccaacgctcaccggggtagcggtagccctccgctagggcgggtgggaagctggagtcggccccaggttgggcgggccccaggcggtagccggcccccagggacgggtacaattctcgtggatggtacatgttgtagttccgtctggcctcaggtctcgctgcttagggcccccggtgctgcgagatgccccctttatagctcacagctcagccccttccagatccaggatcacagcccctcccctctttggggccctggagttgggctggggtggagacccctggggcctcgaaggggtccgagagggggtcgg

SEQ ID NO: 93799 - DNA, 22500 bp, Homo sapiens
ttctggcacactggtggccccaggaaaaggtccaaggtgtccccatcacagcccaatcctggaaagcaggaggcactcacctcatcatctgactgcaggtacatgtgggtgaactccagcagctcccgcagctcggcggtctggttgtggtagagcatggcctcctggaaggagggaaggacggggtggggggtgagccataccctgttgccagatggcaagaagccagggctcctaggatctgggcccactggccctcttctagctcaaggatcagagaataggtatcagctcacaagctcatcagatcatcgtggctgcttggaacactgggttaaggattctgagagtttggtgacaaagagtccctcaatcgattagcaatgtctgccactgacaaggaaggcaggagtggcaccatgtgccccatatttgccagcctggccctcaactccaacagatttcctccattggttacctagggtgttcctgggaaagagggacaaaggtcagcagtgagggtaatgaaggtagggaggggagcaggtaggagtggatgtgtaccttcatacctccctcgtctggacactgctggtgaggtggcagtatcactgccattttgcaggtgaggcaatagattaggaaagggccatggtcttcccaggaccacacagcagtggggctgggctctgaagccaggactctaacctcaactcatattctttctttccatttcccatcctgccttccatggaagccaggagtttattttttattatttatttatttatttttcttttgagacggagtctcgctctgtcacccagactggagtgcagtggcgcgatctccgctcactgcaagctctgcctcccaggttcacgccattctcctgcctcagcttcccgagtagttggtactacaggcgtccaccaccatgcctggctaatttttttttcttttcagtagagacggggtttcaccgtgttagccaggatggtcctgatctcctgacctcgtgatccacccgcctcagcctcccaaagtgctgggattacaggcatgagccaccgcgcccggccgccaggagttcattttttacaaagtgcatatccagcaagtgccccagaaagcartgcccacctcccggggctggaagtcctcctcttccaggccccagcgagcccggtggaaccggtaatacaccaggttctgctgcatgacrctgtccttggggtcgaagagcatgtagctggcggcgctgcgggcagcctggcgcacatcattcactgcagcaggacaggggtgaggaattgctctggcacttccccttcagagtcaactccatcttccagttcagtccagcacccctgctacccagccacctcccagaatacctaatgggctccttatcccacccaagcataatgccagctagcatgtagtgggcacttaccctatgccaggccctgactaactcatctaagcctcactgttattgtctttttattgtttttgaaacagggtctcactctatcaccctggctagagtgcagtggtgcaattatggtcacctcaagcttgatctcccaggcttaggtgatcctctcacctcagcctcctgagtagctgggattacaagcaggcaccaccacacccatctaattttttgtatgtttttgtttgttttgagacagggtcttgttctgtcacccaggttggagtgcagtggtgtgatctcggctcactacagcctctgcctcctgggctcaagcaatcctcccacctcagtctccccagtagctgggactacaggcacgcgccaccatgcctggctaactttttgtattttttgtagacacggggtcttgtcatgttgcccaggttggtctcgaactcctgggctcaagccatctgcctgcctgggcctcccaaagtgctgggattacaagtgtgaaccaccgtgcccagccatgcctacctattactgtcatccccattttacagtcaagaaatctgagtcacagagaggttagataaattgctcaagctcacacagctggagaatgatggctctagtgaattagaggcccttagcctctctgctatgtgtacccaggaagggtctcctggcccctgggttctcagcccctctgctctgactcctggctctgtctgaatcttggcatctccgagctgcaggaacactggaggctgtccattccagccccagtggatgccaggatctctccagtgaggagagccacaagtcctggtgccactttttattagtcataagaccaacagccccttgccctataagcctcagtttccccatctgaaaaatcggtccagtaatgccagctgcatggtgttggtgaaaggaccacataagataaagtgacttataaactctcaagtgttggccggtcatggtggctcatgcctataatcccagcactttgggaggctgaggcagtggatcacctgaggtcaggagttcaagaccagcctggccaacatggtgaaaccccgtctctactaaaaatacaaaaactagctgggtgtggtggcaggcacctataatcccagctactcaggaggctaagagaatcacttgaatccgggaggcagcggttgcagtgagccgagatcgtgcccctgcactctagcctgggcaagagtgaaactccgtttcaaaaataaaaataaactgtcaagtgctctgcagttgttggttgtctagtcatttgcccaaaagaccctcttcttctccctgaggctgctgtctgttctcactcagaagcctctcacctgccccagactcccagggtgccttccccatattcccaccacccctagactttcctcctatcacccagggtcctcaatactgaaggaaagctccccacaactctgggaggctcccatacagtcctctcccttatcacctcgtcccctgcccaagccagcccacccagggggctcacacttatagtaggcaaactgcaggtagtggtacatggtggccacgaacttgtccacgaagtagccacccacattgggggtcaaattggcctcacagtccaccttgcactgcagggactctgcaaagagatctgagggtgggaggcagcagtgagaggctggcattgcaatgaacatctccgtccccccagtggagaagactctaaatccaatctctgcctactaagccaagctgcttgtccagaaaatgtgttgctgttgcaatcacaggagagaatgtctgtaaagtgcttggcatactatatgacaagtgatggtgaggaagatgactgtgggctgggctgactcaccacccctgccactcaaccaccaccccaagccagagggagccagggcattctgggagagcagcaggtgaggtccagaaatggggcagaagtccaaacagagaagctaaaggacagtcttttttttttttttttttttttgagacagagtctcgccctgtcgaccaggctggagtgcagtggcgcgatctgggctcaatgcaacctccgcctcccaggttcaagcgattctcctgcctcagcctcccgagtagctgggattacaggtgcccgccaccacgaccagctaatttttgtactttcagtagagacggggtttcaccatgttggtcaggctggtcttgaactcctgacctcgtgatctgcctgcctcggcctcccagagtgctgagattacaggtgtgagccaccacacctggccaagtacagtcctttctgcccctgctcgagggaccccagggttagagatcccaagactaggtgtaatttctggttatcaactgctttctgcacacatctgctgggttacttctcaccgctgcacctttgcatctgcactgccctctgcctggaaggcctatgaacccaagcttcccaaaccctttagggatgtcactgcctctactcactgatccagccccttggacactcccagctggggcccctgcacccagcgtctttctcaacagacaaggccttcctcccggctggctcctccgcattcgcagtgctccacgtgcatgaaggggacatctgccttaccgggccctgtgggtgagaggacygcccaccgtggtctgggtggcagatacctgctatggccgggtagaagtccttgaagtccacctgctcatgggccccttcacagccggccaggcaccgggcaaagactgccaggtactctgacaaggcccgctccatgtcctccgtgctgctgcggaaatccccgctgttgtagagcttcacagcccggaggaacacggcctggaaggggcgtggcagggggagtcagggcgcccccaacatctcccctcctctactagccctcctctacaagcctcctcctgaccctccaccccacctcgtagggctgggcctctaggtccgtgagggactcgtcggcgacgtccagcatccccygatagtagttgagatacttggcggtcagctcgtgcttcgggttcctctggaggaaggtgtaggccgccgccaccgccttctccagccggttagcctggtcggggggtagggggtgggggagcgggtcagcaagaccggagctcgcggccccgagcgcacggcgggcttcgtgccttgggtgaagataacgctccttcgaccgatctgtggggagccacgacgcccagcccgagacaggtccccgggtgggggcgggctcccaccttgaacagcgcgtagtgcaggtactggtagggcaggcggctctggaagtcacgcagcagctgccgsggcgggtagggcacctggaaggcgggcagcgtccgcttgcagcgccgcaggcaggcggctcgctccaggacgcggccgaagagccgcagctcgcaggcccactcgtctgcgcggccgccgtcgggatcgggcttggccgcgggcgcggggccgctgcagttggcgtggcagaaggcctcgctgtcgcgcaggagccggtgcagccgcagcgccgcctccaggtagcgcgcgctctcgcgccagctctctccctcgtactgctccagagcgtgcccgtacgccgcggccagcggcatcaggtcctcgggcgggaagccccggaagctgtacttctcgtactgcgccccggcgctgcccagcagcaaccacagcagcccccacgccacccgagccatgcccgccgcgccgccggctctccggagctgagctggctgccccgcggacggaaggggacagggccgggccccgggcgggcggcgcgcccgctgggtcttagcgccgggcacgaggcggcaaggtggggcggggcmtgggtcacgacgtctcccctcttttcccagagggtccgatagtgtcgttaagtcctctccgtcggcccgggctcctgccttgggggtgtcccctaggtagagaatgcgtcggggagcgcttcccgccagagatgggaagcccaggaagcccctccccatgcaaacagtgcccccgcctgagatcaggacactgagtgagggccgcctcctctgcgctgcccatacgagaaggaagccctggagccgggccttccgtcgctgcgccctcctgcaccctccgagtgtctcccccgcccacgtcggaggcacacacctgctgtcacctgcacaccttgcgctgccaccaccccccactccatctccgtgcccgtcacatcccaagtcacaaagtccttctttcagtccagcttttgcgggaccaagctgctcttccctggagatgccttcccttggagtacagctggggtcacggatgagcacggagatgcctctcacactccgcggcttcaccacccacctggaggggactagaattcgaagtgcccgcgaaagaagcaaggttcatctccgcccggctttaggacccgggggctccggaaaaagtcattgaacttttttttttttttttcctttggtgtccactcagagttctcatctttcccgagcctctctccctggccaggccccaggtctcgcagccagggatggagatggggggagggggaacctagagttctttgtagtgcctccctcagactctaacacactcagcctggccccctcctcctattgcaaccccctcccccgctcctcccggccaggccagctcagtcttcccagcccccattccacgtggaccagccagggcgggggtagggaaagaggacaggaagagggggagccagttctgggaggcggggggaaggaggttggtggcgactccctcgctcgccctcactgccggcggtcccaactccaggcaccatgttccccgcgggcccccccagccacagcctcctccggctccccctgctgcagttgctgctactggtggtgcaggccgtggggagggggctgggccgcgccagcccggccgggggccccctggaagatgtggtcatcgagaggtaccacatccccagggcctgtccccgggaagtgcagatgggggattttgtgcgctaccactacaacggcacttttgaagatggcaagaagtttgattcaaggtaaccccggttgggcgyccccggattcaccactccgtcccctgaacccggggtcctgtttccttgttgcctcttttaagctctgcatcccaatactctaaccctagacagcacccctggggcctcccagacacccatctccccaaagataccctcctgcccccacttccaaaccctcacttctcaaaggatcccatttctttctcacaagctctccacatcccggaaaggactcgataatcaaggtgaactgccttgtgtagttaccagggctgtatgtaatgacctgatggagaggggtgttctgatctacagtgttggggggaagggggtggtccctgctgcttaagaaccctgggatggtctatcagcctggaccccgtacctttccacccaccctgactccccttctggttccactgttttcagtgcctttgtggtcagagaagagggaatagaacttttttttggagggggtgggagttttcagcggctggtgggcagggaaaaaggctggtgggtattataagaagacagccggctggacctgggggtagcgcgtggctccctgcggaggccctgtctacgtgtcacacagtcggacatgccaccctgggctccttggaggaatttcattcctccctctctggttctcctggaaccctcatctctctccattttaggtacaccaggccagaggcacaggccgcccatttttgccagccttggggtttgtaaggtggcctcctggtctgacccaggcctttggtctgccccagcaagtccacttttgttagcggggacagggcagggctgtatgccagcctcaggggtaaatctagggtcccagttacacacagaccccacagcacactgaaagaagtcagtgtttcttagaccctcctctgaaacacacaactcagcccacaggaaattagtggccatgactttagaggcaggcatatattggggtaagcctacaaactccaagagtcccaagaccctggttcaaatccaggctatgaccatggacagagaattttgtctctttaggcatcactttccttatctgaaaagtggagacaaaaacaggacctacttgctaaggctgatgttaggactccaaggacatggatgaatgaacgtaggcttctcacagggcctggcagtcctccagccagttcagcacacattaacattgaccctgaggaaaaccatatgacctgatgctgtggaacttgtagaaacttaatgcagagcttaagccttcataacaacactgagaaggaaacagtccagacttaaaacctgtctgcttggtgggcaaattcagatatagggtagtagccagaagtgcagccctgagcccttgactgctaggagtgaggcaggggttgggatttaggggatgtcatccctgatggggactctgggagcccagctcatgagtgttgagcttggaaaactttttgttttttagctggaggctcactctgtcgcccaggctggagtgcagtggtgccatctcagctcactgcaacctcctgggttcaagcaattctcctgcttcagcctcccaagtagctgtgattacaggcgcatgccaccacgcccagctaatttttgtttgtttgtttgtttttgttttttgagacacagtctcacackgttgcctgggctggagtgcaatggagcaatctcaactcactgcaacctccgcctctgcctcccaggttcacgtgattctcctgcctcagcctcccgagtagctgggattacaggtgcacaccaccacacccggctaatttttttgtatttttagtagagaggggtttcactatgttggccagactggtcttgaaaaaggcgggtgggtattataagaagacagccagctggacctgggggtagggcatggctccctgcggaggccctgtctgtctacgtgtcacacagtcagacatgccaccccagcctcgtgatccgcccacctcggcctcccaaagtgctgggattacaggcgtaagccacggcgcccagccttaatttttcatattttagtagagatggcgtttcaccatgttgctcaggctggtcacaaacttctgagctcaggcaatccaccctcctcagcctcccaaagtgctagaattacaggcgtgagcccccgcgcccacacaacttagaaaactttttttttttttgagacagagtcttgctctgtcccccaggctggagtgcagtagcgcgatctctgctcactgcaagctccgcctcctgggttcacaccattctcctgcctcagcctcccgattagctgggactacaggcgcctccacaattttttttgtatttttagtagagacggggtttcaccatgttagccagggtggtctccatctcctgacctcatgatctgcccgcctcggcctcccaaagtgctgggattacaggcgtgagccactgcgctcggccagaaaactttcttaacccatggccccttcaattaaaaaaaaaaaaatctcccatcctcactttacttctgaaaacttaaaataaattaaaagtgtatataattggctgggcacagtggctcactcctgtaatcccagcactttgggaggcccaggcaggcagatcacttgaggccaagagtgaccagcctgggcaacatggcgaaagccctctctactaaaaatacaaaaattagccagatatggtggtgcatgcctgtgatcccagctgctacttcggaggctgaggcaggagaatcgcttaaacccgggaggtggaggttgcagtgagctgattgcaccactgcactccagcctgggtgacagagccgagactccatctccaaaaatacatatgtataagtaaaaataaatacattaattaaaagtgtataactaaaaacaaacaaaagccatggcacttttagaataggcttttttttttttttttttttttgagagggagtctcactctgtcgccaggctggagtccagtggcacgatttcggctcattgcaacctccgcctcccgggttcacgccattctcctgcctcagcctcctgagtaactgggactacaggcgcccgccaccacacctggctaatgttttgtatttttagtaaagacggggtttcactgtgttagccaggattgtagaataggccttttcaaaatgtgaaaccagctcccaccccacctctgctctcccgtcttttcttggagagccaatagtataatggcaaattttagaactcagctgactacatattagctgtgtgaccttgggcaaggcactgagtctctcaagtctccattgctctcattaagaaaaatgagaacaagaatgcccacctcacaggggagacaaagaagatacggaatgtaaaatgccaagcatttaatcccatatagtaatgctcctctgcccctccgtgctgtacgtaccactccccacttgctgtcagcaaatagtagcagccatcaggcccgggcatcccacccaaccccgtcccagggcagtagcagcccttgtcctcctcagggacttgcctttcacaacagtccgttctcttaaggtgggcgtcacggccgacctaggagggggacttgaaaaggaggtgagaagtgtgtgtgcgtatccacacctggctatagggaggggggattgtgtgcgtgtgtgcaggcacacctgtgcatctgtgccaccatgggcagtgtgtgtgtgtctgaggtcactgtatcccatctgtccctccccccccagctatgatcgcaacaccttggtggccatcgtggtgggtgtggggcgcctcatcactggcatggaccgaggcctcatgggcatgtgtgtcaacgagcggcgacgcctcattgtgcctccccacctgggctatgggagcatcggcctgggtgagaagggctggggcacaggccgggggtggaggagaccacgaggcagaatcagggatcctggggtgagaaaactgaagtgcrgagatgaggagtgacttgcccaatgtcacactgtgcacgcagtatgaagagtggcagctctggctggggcagtagctgacatatatggtcccagagytttgggaggccgaggtgggaggattgcttgaacccaggagttccagaccagcctaggcaacatagtgagacctcgtctctacaaaaaataaaataaattatccaggtgtggtggtgtgtgcctgtagtcccaactactcagaaggctcaggtgggaggattgcttgaccccgggaggctgcagtgagccatgatcatgccactgaattccaccctgtgtgacagagcaaaacccctctttttttctttttctttttttttttgagacagcatctcactctgttgcacaggctggagtttagtggtgcgatctcggctcactgcaacctcagcctcctgggctcaagcagtcctccctctcagcctcccaaatagctgggactacaggtgcacaccaccacacgtggctaattttttgtatttttagtagagatggggtttcgccatgttgcgcaggctggtcttgaactcctgggctcaagccatccacctgccttggcctcccacagtgctgggataacaggcatgagccactgtgtctggccccctatctcttaaaaaaaaaaaacaaaaatagtggcatctctgtccctggtttgggtctcttggtgctgggatgagaggaaggggaataacagggccctggctgggatcgtggttggcagagcagaactctgagacctccacgctgctgcgctctcacagcggggctcattccaccggatgccaccctctacttcgatgtggttctgctggatgtgtggaacaaggaagacaccgtgcaggtgagcacattgctgcgcccgccccactgcccccgcatggtccaggacggcgactttgtccgctaccactacaatggcaccctgctggacggcacctccttcgacaccaggtgaggggctggaggggagccctgaggcactggggactgtggcatggggagcgggaatccggggcccagcctgcctctcccacctccacctcattttctgcagctacagtargggcggcacttatgacacctacgtcggctctggttggctgatcaagggcatggaccaggggctgctgggcatgtgtcctggagagagaaggaagattatcatccctccattcctggcctatggcgagaaaggctatggtgagggtgggcaaggacacaaggggaaattccgcagaagagggaaaaaccaggcctccacatacagttgctcaggttgtatactgcacgagggcatccaaccaaggactcaaggtgggatgaaatctacccttggtgctactaagaaggggtgctttggccgggcgtggtggctcacgcttgtaatcccagcactttgggaagccaaggcgggaggatcacgaggtcaggagatcgagaccacggtgaaaccccgtctctactaaaaatacaaaaaaattagccgggcgtggtgggggcgcctgtagtcccagctactcggagaggctgaggcaggaaaatgacgtgaacccgggaggcggagcttgcagtgagccgagatcgygccactgcactccagcctgggtgacagagcgagactctgtctcaaaaaaaaaaaaaaaaaaagaaggggtgctttattctgattcacacgaaggctcagtatgagccggtggtggccctggggaaaacccagctcaggycttactggaggagcaagaagcagggctgctgatgggcgggaaagggctctggagagtggggctagtgtcttgcatggtgcccactgggccttcctgagtcaagaaggagcctcggcttgctccccaattttatggttcaagccctatcccttccccagggacrgtgatccccccacaggcctcgctggtctttcacgtcctcctgattgacgtgcacaacccgaaggacgctgtccagctagagacgctggagctcccccccggctgtgtccgcagagccggggccggggacttcatgcgctaccactacaatggctccttgatggacggcaccctcttcgattccaggtcaggagggtcttgaggtgggagggcgggggctgggtgaaacgtggacgaagctgggggtcactctgagctgcctggaaggggagggcccctttgactcccttcctggccctcccgccttgtattgcagctactcccgcaaccacacctacaatacctatatcgggcagggttacatcatccccgggatggaccaggggctgcagggtgcctgcatgggggaacgccggagaattaccatccccccgcacctcgcctatggggagaatggaactggtaggggcgttccccagccaccacctcagctcctcctccgaactgcccattgtgtctaggccaccccctcccacagtgggattccaggcaccgctcrgcccctctcatcacaaaaacatgcatgcagcttacatctggtcaccccatctgattcctgccacacagactccatcggtttcctccagggcagcgccccacttcgccccttccgcagtggagaagggcagccaagtttggggagggagggtggttatggaaaaacagaaccagcatacccccaggacccagctgtgctgggagcctcagtgtcctcacctgtcaagtgggcaagccatgctgatccgcagggtaagttactgggagtttgcaagacggtgagtggaaaagggctttcttactggaaagctgccttcccctgccccctgccccagtgaaagtttgttagaattgactctggacaaacatcccgtcccatcctcctttggatcctcagggtcgggaaggggtatcaggtctggggacctccatggagagacctcaagtagcctctcctagtgctctgagctgaccacactcccccattctggcctcaggagacaagatccctggctctgccgtgctaatcttcaacgtccatgtcattgacttccacaaccctgcggatgtggtggaaatcaggacactgtcccggccatctgagacctgcaatgagaccaccaagcttggggactttgttcgataccattacaactgttctttgctggacggcacccagctgttcacctcgtgggtccgggggggggccgggactgggcaggtgggtgggcacaggcatggggagtcctcctcagtgcacccccgacgcctgctcctccctcttggtcctcgagcgccaggggagcattcaacctcttgctgctttctgtaagtccccatctcggagcatgtcraggagatgaaattctctgcttcgcaggggaagggaaggtgaagccaacagttgggggagaactgctctttctatttcacagaggggaaactgacgcagggagccatgagccctcgaggccacactttagggggcagaggcaagatgagaagggaaccccacgtctgcacagctgggcccctgcactctgctrcgtggcccaagtcaccagtgggagtaactccggaactgagggcttgttctgggcccacctcagagggagaggggtgtgcgctggcaggggacagggtggctgctgacctgggcatctgctctcccccaggcatgactacggggccccccaggaggcgactctcggggccaacaaggtgatcgaaggcctggacacgggcctgcagggcatgtgtgtgggagagaggcggcagctcatcgtgcccccgcacctggcccacggggagagtggaggtgaggggctgagaccataatccttttttttttttttttttttttttttttgagatggagtctgactctgtcacccaggctggagtgcagtggtgtgctctcagctcactgcaacctccacttcccaggttcaagtgattctcctgcctcagcctcccgagtagctgggattacaggcacctgccaccgtgcccagctaatttttgtatttttagtagagacagggttttgccatgttggtcaggctggtcttgaactcctgacctcaggtgatccacccgccttggcctcccaaagtgctgggattataatcatgagccactgcgctcggcccgagaccgtaatctgactggcatctgtcccttttgctcctgcccactgtgggtctgatgrctggtgggaggagtcaggaatgccttcaggatggctccttaaacatcccatgccccactctccagcccagccccaggaggggaaactggcctgtgggctgggaaacagtgaagccaggcccagacccyggcctgactaggacccctcccttctctcctgccctccctscagcccggggagtcccaggcagtgctgtgctgctgtttgaggtggagctggtgtcccgggaggatgggctgcccacaggctacctgtttgtgtggcacaaggaccctcctgccaacctgtttgaagacatggacctcaacaaggatggcgaggtccctccggaggaggtgggtgaaggttcagtcctaatagccatgcccacgcaatccccgcacccaggaagcatcgaggaagaagacgtcccccgtccggactgcccacccgccctggtgctcctgcctgcgctgagtcccacgcctcaggctcyttgtccctgctttttcctgggcacacatgcaggctgttccctacctgagaccagtcacagactatccccatgccacgcctccaccccagcccccaccaggaccccagcaccagtgcctttcccagcccttcctgagttacagggtgcgggggagcctgggaaaaaagaagaaaaagaaagcactcactggcctccacccggggcccctgcccctcccaaggccatgaccctcactgcccgctcccccggctctcccctgccccagttctccaccttcatcaaggctcaagtgagtgagggcaaaggacgcctcatgcctgggcaggaccctgagaaaaccataggagacatgttccagaaccaggaccgcaaccaggacggcaagatcacagtcgacgagctcaagctgaagtcagatgaggacgaggagcgggtccacgaggagctctgaggggcagggagcctggccaggcctgagacacagaggcccactgcgagggggacagtggcggtgggactgacctgctgacagtcaccctccctctgctgggatgaggtccaggagccaactaaaacaatggcagaggagacatctctggtgttcccaccaccctagatgaaaatccacagcacagacctctaccgtgtttctcttccatccctaaaccacttccttaaaatgtttggatttgcaaagccaatttggggcctgtggagcctggggttggatagggccatggctggtcccccaccatacctcccctccacatcactgacacagctgagcttgttatccatctccccaaactttctctttctttgtacttcttgtcatccccactcccagcccctwttcctctatgtgacagctssctaggacccctctgccttcctccccaatcctgactggctcctagggaaggggaaggctcctggagggcagccctacctctcccatgccctttgccctcctccctcgcctccagtggaggctgagctgaccctgggctgctggaggccagactgggctgtagttagcttttcatccctaaagaaggcyttccctaaggaaccatagaagagaggaagaaaacaaagggcatgtgtgagggaagctgcttgggtgggtgttagggctatgaaatcttggatttggggctgaggggtgggagggagggcagagctctgcacactcaaaggctaaactggtgtcagtccttttttcctttgttccaaataaaagattaaaccaatggccttagggtgtcttttggaccaggttgaggggcaggggggaatggctaggggatgaagtggggattgtgggaggcctttagacccagagattggggaaaaagttaaaccaggctgtttccatggcctcattagctccagacagcatgtccccaggtcaggggctccccatctggaggtttcctgcctgccctgggcctaacctggggtcttcgctgtgggaagggagccctgctctgtggagggggtgaatgtgtaaagaggggaggcctccagcagggtgtggagagatgatcctcatcctccaattgtccccattgaatgggaaagacaaggtccctgacctcaaacacaacctacaaagttcaaggattaaaccacacaagtcagattatcctttcccatagatcatttccaatactatgatattcccatctctccctgctcctggccaccacctgttaccacctgcccacccttctccctcttgctaggggaaaggtaatggagttcagatctccacagtgtcttgcaggaggacttcagccaccaaccaggccatctgtcctcgcttgcctggtatgacccgagcattgtgaggacggggtggggacttaggaaagaaaatgacaggactggactcatacagcaaactgcccccatcagcacttcttgcccagggtcccctaagagacgtgactgctccccacgggcaatgaccgacattctctggccccgaagcatccagaaagctccctgattgaagtctttttttttttttttttgagacagggtctcgctctgtcaccacagcgcagtggtatgatctcagctcactgcaacctccgcctgccaggttcaagtgattctcctgcttcagcctcctgagtagctgggattacaggcacgggccaccaagcccggctaatttttgtatttttagtagagacagggtcttaccatgttggccacactagtctcaaactcttgacctcaagtgatctgccaccctggcctcccagagtgctgggattacaggcgtgagccactgcgccggccaagaaagctccttgattaaagtctggaagtggttactaacccagcctcagatggtggccactccctcctcccaaaaacgaatggaacaggcctgaagcagagaaatgcagcaaaaggcatgggctttggtcagaaacattcaaatcctggctccagctcctagctatggagtttgggcaagttacccatcctgcctgagccatctggaagcaggaggagctgcacctacttgtggggtcattgtgagggtcaactggcaggcacccaagtgcccagagtggcacctgggacaccgcaggccttcagtaacatctgtattacctcccgcttcacatctgcagaataacagaactttccaacggctagccgaacactgcaggaagggtgctggtgatttcctctaaggctaagaaaatgctgaactggctcttcagggtcggcccaataacgcaagaccacagtgcacacatcacttgtttcaccttggcacagtctccctcaggtccctgctctaaattccccttttcaggtcatccactttagtggccccgacccataagaggaggggaaaggagagcctagggcatagggggacagccacacacgaatgcatcccctcagggatccctaaagagggggctctcagacagggttgcctcaaccccaccgatcccaaatgaatttcaagtttgatggctgaatcagaataaagtcaaaccactgtaggctagaacataccctttcagccccacgctgaaccagacagacacaatcaggctgtgctcggatggggtctcaggccaatttgtggtggttctcaaactgtgttcctagaagcatcccatgtgcccccagggccaagaggtccaggttctaccccsacccacatcccctgaatcagagcagcttttttttcattttaaaaattttgatctgtttcacacattatatttgtttgaacttcccatgtttaaaaattttgaagaaaatccctggagtagacaatccctagagcactgacatgctgtggtccaaggttcaccaggaacagtgcctgtgccctgccacatggcggggttccttcaagcctctggtgatgaaggtgctcagggaaaggaggacggaggggcgcggaaggacccagccactgctggccaccctggcctctgctctgtgttcacgggggagcagactctggggaggcgcccctcctcaccacggcctgcaggccgggctggagcctgcgccttcaggggccttgcatctccagctggaccccctggcacaggatgtgctgcagtagcccgttgaccacatccagagtctcgtccttctccagcacgatgtcataggagtccatgtagcgctcccgccgctcctccacctgcccggaatgagaggcagaagccagagggtccccaaatgccctgccctccgtagctcactctcaaagcccctggggctggggaggagagcattcaagcagcaactcccagctcccttttgagagccaaaggagttcaaggttaccgggcctaccctttggagacagacgagggatgggcatgggctaccacaattaacccttgggtcaatacaaaagaacagtaacaaggaataaaaacaaaaaaccagatgttgccactttgggaggctgaggcagaaggatcatctgagcccaagagtttgagaccagcccaggcaacatggcaaaagcccatctctacaaaaattggccgggcatgggggtgggtgcctgtagtcccagctactcgggagactgaggcagaaaggatcacttgagcccaggaaattaaggctacagtgagccaagactgagccatgacactccagcctaggtgacagagtgaggccctgtctcaaaaaaaaaaaaaaaaaaaaaaaaacagatgttgcctctaatccatctggactgaatttctttctttctttctttctttcttttttgagataggatctcactctgctgcgtaggctgaagtgcagtggcataatcttggctcactgcagcttcaacctcctggactcaagtgatcttcctgcctcagcctcctgagtaactagaactacaggcatgctaaccacacccagctaattgttgttgctgttgttgagacagggtctcactatgttgcccaggctggtcttaaactcctggcctcaagtgatccccctgccctggcctcccaaaataggggggttacaggcatgagccaccgcacctgaccacgacccatttttttttttgagatggagcctcgctctgtcacccagactggagtgcagtggcgcaatctcagctcacccaggagatggaggttgcagggagccgagatcgtgccactgcactccactaggggacagagtgagattccatctcaaaataaataaataaaataaaataaattttatttattttatttaggctgggcgtggtggatcatgcctataatcccagcacttcgggagactgaggcaggcagatcacctgaggtcgggagttcgagaccagcgtgaccaacgtggagaaaccccgtctctactaaaaatacaaaatgaaccaggtgtggtggcacatgcctgtagtcccagctactcagctgcctgaggcagaagaatcacttgaacctgggaggtggaagttgcagtaagccaagatggcgccactgcactgtagcctgcggaacagagtgagactctatctcaaaaaaaaaaaaaaaagaaaaaaaagctgggtgcagtggctcatgcctgtaatcccagcacttttggaggccaaggcaggcggatcacgaggtcaggagattgagaccatcctggctaacatggtgaaaccccgtctctactaaaaatacaaaaaatcagccgggagtggtggcgggtgcctgtagtcccagctacttgggagccagaggctcccgtgaacccaggaggcggagcttgcaatgagctgagatcatgccactgcactccagcctgggcgacagagtgagaccccgtctcaaaaaaaaataaaataaaataaaataaaaatagaaataaaaaaagagaatgtgttcaaaggcatttgttaatgggcattcaaagagaagaaagccatgaagagaagcagccctggtcctctacccaccttgtcattcaggaagccaattttgagaatgttctgcacaccaggaaccccatcggccatggtgaggtccccgatagagtctcccagcaggatgacattggttttgccctcaagttgctggaagtaaccasagttctcacacrcagagctgttcttgttgtatgtgtgtatsagctggcccttaaatccctggagaaaaccctaaataatgaagacaagagacagatggaagggctgcagggacccatgtggcaccagctctccactgtctctgtcacagagaaaagggaatcccaaaagtgatagataatgccaaaacttcactgtagcctaaactacggcccatgggccagacttggcctgcttttgtaaataaagttgtattgggatacagccaaactcatttgtttacatgatgcctatggctgcttttttgtgctataaaggcaaagttgggcagttgcaacagtgatgccacagcccacaaagcctaaatatcgacgacagggccttttacagcataagtttgtaactcctagtttaaatgaacaggagccacccaatattgcagatcatctgttctggtggatgcacgaagctgtgatataaatgccactcaggttacacatgtgctagtgctcagctgcgggccacatcctcactgcaggtcaacatgatgaaaattccaaccatcagttttatggggaaaaaagtcagaacgtggatgagttggagcagcccacctctggcttgggaaaaacaaatcaaagcccaagccctttaggacccagaatggcacataataatatgacagtgacatagggcagggcaggcccataaattaggtaccccagggcagagagttgactgtcaggcaaacaccaaagagagaggatcctttgaaagtttttttgtttttgtttttttctgaagacagagtcttactctgtcacccaggatggagtgcagtggtgtgatcttggctcactgcaacctctgcctcctgggttcaggcaattctcctgcctcagcctcgaaggagctgggattacagccacacaccaccacgcccggcttatttctgtatttttagtacagatggactttcaccatgttggccaggctggtctcgaactcctgacctcaagtgatccgcccgcctcggcctcccaaagtgctaggattacaggtctgagccaccgcgcctggccaaaaagtaacccataaacaactgcctgagggtgaagaagctagagtggcttccctccccttcttccccaggttagggttcatgcagagttaactgccctggctggtggtccccacccctcgtcctttcccagcccaaacaggatttggctcacatcttcattaaaatccatgtagttagacacratgtggatgttggggtggaacactttcatctgtcggataatttcttccaggatatcaccaatgcccgcagaaaagatgaaaaggggaatgttgttatggtagagtgtgttgaagaaggtcttatatccctccctgaaaagagatggaggaattctgaaatggcactgcctctactgctgttctttgtttcctatttgggttgttttttgggttttttgtgagacagggtcttgctctgttgcccaggctggagggcagtggcacaatcacagttcactgcgacctcgacctcccgagttcaagtgatccacccgcctcaacctcccaagtagctgagaccacaggtgcatgccaccacacctggctaatttttttatgttttgtaaagacggggttttc

SEQ ID NO: 93800 - DNA, 22272 bp, Homo sapiens
ctcacagtgggagggaggtggggggtgggcagaccaacaccacaagagagtgcatccaggccccggagctgctcagtagacactaccatgtgtagctggtgttctgtcagtgccagccacgggcctgctatgagcaagaaggcaagacctgccctccagaggctcacaggggctccaggcccctgtggatcatgcactcgagttggggaaactgcagacattctggaaggcccttctgaaggcaggccagcccccagcctgtccccttggtgtgtttctgggtcttttcagtgctgccttgctgagtgcttgcaggtttggattgtctttttgcattgactgaagccaaaagcagctttaggtagttcatctaaaggtagaaatgagtagatagacacaactcccaatacatgcctaagccaaagagaaatgcatttgactgactcgcagtcatgtatctcccagacacaatttgtgtggatcattctgagtcagtaagtgtagattaacctgagggtaggggtcattggaggggccagagggaaaccaagggtggcaggttcccaccagagccctgccttctgggattgatctgggtggggaaaattaatggtgtaggtgccaaacacaggggctaagctccctctaccatccacaggccttggacgatgccaacaagggtatcatcagagaactgaggaaaaccaactacgtggagaatctcaaagaaaaaagcgagggaggtgagttcctgaaactctgaaaaggcaacttcagcattctccctctgctttcttttcctctagtccgagacacatgcgacagcagctccccaatctgggggcttggcactgcccatcgtgcattctaatttcagtgccaccagcagccctagcctatctctggggcagtagagggtgaggattcagcccaccatgggctggactgtctggccccagagcgcactcatttctctcttcaattgattcatcaagtatatggtgagcacttgtcatgtacctggaaggtgttagattctggggagagaggcccatccctgccctggaggagcccatggccctttgggcaaggctgaccagtggagttgtcagctgctgggatcctgcacacaggtgctacaccgaggtggaggtgtgctgccatgagggtgcatgcaacggggcgtgggctcctctggggaggcagaggaggcttcgaagaggaaaaatcttctacctccaactccaaaagatgcccaggagttttccaggagagaagtgggagaagaaaggcatttttccagcagggaacagcagggccagaggcacagagacagaataacagtagctacactttgggggctcttactgtgtgctaggcactgggttaagcaccagacaggagtgatcttgttgggtctttaccccactaggaggtgtaggtgctgtggggggaaagggaggctgagtgaggtgagtgctctgccagagtcatgtagctagggaggggtgactcggggccccactctccccacctgcggcgctgctctcgggccagcagtgtgatgggcaggtgcagaggggcataaggtgcagaggctgcctgacagctgtgccttaccacattctttctcacaaggtctccagggagtaaacaggcctttggccccctgcctttgggctctcctttcctgcagggagggagtgagggaaggagaagcagaagatggctgagcagccctaccccactggagaggggcctagaggaacaggggtgttaagcgcagtagccgacccccattcatgcttcccgcaggccaggcattctttcaaagactgtgtgcacggactcatcctatctgtatctgttcaggaacactatgaaggaagtgttattagcttgactttatggaggacatggaggcagaggggttagaggctacagtggttttcagtcttgggcagtctgctctagaacccacgcgtcggcccgtgccacactgtttctagtgacacagacagccttttcctgccccagtctgtggagctctcactccagccagactgcagtgaacagagctggggctggaggtccgggaggacagagcccaatgcagattcttggctgcagccctccaggctgcaaggctgaaatcctttctggtccaggcagggcagcgggaggtttctgggcacctgagcagccagatgacagccctttattatccagcacctgctctgtggtggctggaccccctcagaggggctctgtctccgcccccacatgccctttgagctgctctgagaagccacaggagcaacagctgtggagagagactctgcggggaagcagccaacaccccagtctccctaccctggcctgcgtccttgtgcctggagaactgccgggcacgtccctctcagaacagcaggtggcagcattgcatctgttttcaccaccaaagggctgtgaccccctgagacctgagaccctctgcagatacctcagtaactagtggtttccaggaggagaatgtaagggagacgcagaaggggatgtaacttttctccataactgataaaaaaaaaaatttaggagcaaggatccctttgcttgtaaaataactcttcagctgaactttttgttagcagcgtatatctttataggaaacctatctttttccttatgttttttctatattttcataggaaacctcccaacaaataatgaatgtgcttcccagggacaaagagaaagtgtcagaatgaagatgctggagaaaatccttctgtcattttccagcacctatgctatttcttgcagggaaaagaggtgttctggggtcagactgtcctgggttcaaattctgtctcacttgcacacttgcagtgtgaccattgtgtgatttcttttctttctttttttttttttttgaaacggagtcttgttctgtcatccaggctggagtgcagtggtgcaatctcagctcactgcaacctccatctcagcctcccaaagtgctgggattacaggcatgagccactgtgcctttttttttttgaaatggagtctcccctctgttacccagtctggagtgcagtggcgcgatctcagctcactgcaacctccatctcagcctcccaaagtgctgggattacaggcatgagccactgtgcctttttttttttttgaaatggagtctcccctctgttacccagtctggagtgcagtggcgcgatctcggctcactacaacctccgcctcctaggttcaagtgattctcctgcctcagcctcctgagtagctgggactacagtcttgtgccaccactcccggttaattttttttttttttgagatggagttttgctcttgttgcccaggctggagtacaatggcacaatcttggctcactgcaacctccgcctcctgggttcaagcgattctcctgcctcagcctcccaagtagctgggattacaggcgcctgccaccatgcccagcttatttttgtatttttagtagagacggggtttcaccttgttggccaggctggtctcaaactcctgacctcaggtgatccacctgcctcggcctcccaaagtgctgggattacaggcgtgagccatgccgcccggccgtgtgatttcttttctatcgatctcaggtcccttgactgcaaactcaaatcaacggcagtgcgcattttcatgatgtctggatgggataagctatacagccctcacgtgatgcacaggacggagctgggctcagtcaatgatggttccctttctctgcttttggaaaggtgtgctgtcaacaccaatttaaagagctggcaaaaacagtcattctcagggcctttctctcatcggcctctcaaaagcacaggcctccacagagatgaacagtttctttcttttttttcttctttcttttttggagacgggtcttgctctgtcacccaggctgcagtgcagtggctggattttggctcatcacagccccaacctcctgggctcaagcgattcttctgcctcagcctccgggtagctgggactacaggcgccaaccaccacgcctggctaatttttgtatttttagtacagacagggtctcactgtgtcgcccaggctggtctggaactcctggcctcaagggatctgcctgcctcagcctcccaaagtgctgagattacaggcgtgagccaccgcacccggcctgacatgaacaaacttttatctttcttcccgcttttctcttatttttcagaagcttcactgtatgaagatagaataataacaagagagaaggacatgaggagagtgagagatgagcccgagaaggtggtgaagcagtgggaccatagtgaggatgagaaagagacagatgaggacgatgaggcttttggggaagctctgcagagcccagcaagcggaaagcagagtgtggaagcaggaaaagccagaagcgatttgggagcagttgccaagggcctgtcaggagaattaggcacaagatcaggagaaacaggcaggaagctactagaagctggcagaagagagtcaagagaaatttataggaggccttcgggagaattagagcaaagactctcaggagaattcagcagacaggaaccagaagaactaaagaaactttcagaagtgggcagaagagagccagaagaactgggaaaaacacaatttggagaaataggagaaacgaaaaaaacaggaaatgagatggaaaaggaatatgaatgaagccatcggtagagatgaggatcaggaagctggtgttcagagggatcatgggattttattaaactggattttcaagcgatttgtctgttataggaaaaatgagggttttacttctgctgctttccatcactattttgccattaaataggtgtctttcactcttgcaaaccctgagtctgtcactttgcctcttcacccctgcccattcttggaagagcatcgtggaagaaatgagaaaggtgccaagaagaaagggtttcaggagggtgaagatacgggcgctacagggaacaagaagtcacagggaggagaggggaaggcctgggaggagaggtgcttcccacacaccggtgactgactgagtccctccagtgcgcaggacagcggggaggctttatggatggaacagtggtggggcggccccagctgtcacaggtaggagaatgccgcaagccagaaccaagcgaatgctgggagtgaggccaaagataggggagtggcctgggagtcgggagggcagacagactccgcctctgacacctctgggtggcataatcaggtaaatcaggctctccaagctggcttctcctctgaacaatgggatacctgcctcaggggttgctgcgaggactgagtgcttagcacagcacttggacaggaaactcaaaaatccaacggagctctcagtggtttcacagaggaggtggcagctgaggatctggcctcagaggatgttaggatttcactccgttactcatctgtccctttggccattgccatcctggtctgtctccacagctcctagaaggaaaggtcggggctgagactgactttcggctggcacagggcctggacgaatgaggccagtgaggcatttcagatgcagagtttaccggaatgccagcaaattgcatgataatattttaatccaatgtggtaaaaaaaaaagtttttaattaatgcaaaagtccatgatgaataaaatatcaaaaattaaagacaggatccgactttgcacgaccctgcctcactcacttcctgctaatccacaggaccggggagggtgactgagttacccctcaacacgcagaaaaagctagtggccgctcagctcgcaggcgcagtgggtgggtgcgcgtggggagcaggcgcgcgcagggggcgggaccgggccgaggttcccgcgcgcggcgagagtttcgggttttggttcgcagcgcctgcgcgcagaggagacggcccgcccccagcccgcccgggtgcccgctccgccccccgggctatgtaaagcggccgggctcgggtygtgccaccgctggactcccgtgtccctccgcgcaggcgggcggccccggagcgctggtgccggcagaggcggcgacggtggcgcccctcctcatcatggtgagaggccgggcggggccgggcacggggtagcaccagggcgggaaacgagtgtcggggcccctcgggaggaagcgtcttgcaaacgaggacccggggctccgggttcgacttccagttttcttggtactcagggcggccctgaggtctgggagaagcggaggggttttggggtgccggagaggccgctgtaaagggaaacggtggtgtttctcaggagggaactcgggaccgcagaagctgctgcgcctctgggagcctgggtgggcctgggccgggagcccgggagctgctcccgaccccacgcaggcccgcgctggggcagccgcttcggcgccccctccccgggcccagtctcatcacgcggaaccgctgccccgcgcccgggtgcgggcgggaggtggagccagttcagaggaggggaccctttacggtaaaagctgccgtcccttgtggcttctagaagataggaaaacaagtggctccgagaggcgcttctgacacacagcacagcggcgggtagagctggatcctaattgcaggtgccctgtgctgccctgttctggacaggcacaaagaccacgactttgtgggggccgggagagggtagaggaggaggtggcaggcttggtgaaagagggcctttgtccagtgctctcctgccctgccccccaccagcccttctgtgggaccattgtacccgcatgccagacaagagagtattatctgttgcggccattgttgggggaagggaggcagtcttggggtaacccttctccactcccccccttctctgtgcactcagccgtggcagctgtggcttggcccagacacagagacccccacctccaaagaggacgtccttagtaggtgccaagcatataagagtgaggccagtcccagaaccgcaggctcctggcgcgccccgcatgcctccagcacgtttacctttccgaagtggcaggaatggggaaagcgcacgcttaggagagcttcagacaagcttccctcttcctcctccacgaccagaagcggaaaggtgctcccggaccgaaagggaaagaaggtccagcactgccccgcttgggaaggcacccacaaccagtctagggactaggggtaaggccggcggggagcccgcgaatgacctgggctgacatctcttcccctccttacacagaacagaggcttctcccgaaaaagccacacattcctgcccaagatcttcttccgcaagatgtcatcctcaggggccaaggacaagcctgagctgcagtttcccttccttcaggatgaggacacagtggccacgctgctagagtgcaagacgctcttcatcttgcgcggcctgccaggaagcggcaagtccacgctggcacgggtcatcgtggacaagtaccgtgatggcaccaagatggtgtcggctgacgcttacaagatcacccccggcgctcgaggagccttctccgaggagtacaagcggctcgatgaggacctggctgcctactgccgccgccgggacatcagaattcttgtgcttgatgacaccaaccacgaacgggaacggctggagcagctctttgaaatggccgaccagtaccagtaccaggtggtgctggtggagcccaagacggcgtggcggctggactgtgcccagctcaaggagaagaaccagtggcagctgtcggctgatgacctgaagaagctgaagcctgggctggagaaggacttcctgccgctctacttcggctggttcctgaccaagaagagctctgagaccctccgcaaagccggccrggtcttcctggaagagctggggaaccacaaggccttcaagaaggagctgcgacaatgtaggtggcaggktggggccttataagcccaccttgctgggcacagggtgctgcgggcaaaggaccatcattgtactcaaaggatggagcacgaagcagcaggaggcagagagaggctcacctcagcgggggcaggggcaagcggtgcgtcccagtggtagccttggggagttggcagcacattgggaacacgggggcttcccagagcgcctttcctcccaccacacctatccttctagccctcttctctccgacacccttttcccagcctgaatgtagaccactgtcccttgtcttggaggtgggaaaaacaaattactgtagtaacaggaaacatgtcctcttctaatgtaaccttagagggggaatcaagcccagtgttttccaacgcatttttagcagcagaatcatgttccaaaaaataataataataatcacatgaaattgtaagctgcaaaaaaattaaaactaggactattgtggcttcactggggatggttctcaggcctcggactactcaatttactcatgggtttgtggcatctgcagctccagaggacacaagtctcacacttaggccaaaacccgttttcagatggaaaaacatggacccaggagggatgtggggtttacgggctggaaccctggactctggccactctagcagggttctctcttggcatgggctttttgctccaatgataggtttgagataaagaagggtcctggtggctctcctggagtgacctgttggagaagtgccacccactaatccatctatatgcctttaggccatttctggttgcctccaattttatttatttatttattgtgacacggagtctccctctgttgcccaggctggagtgcagtggcgctatctcagctcagtgcaacctctgcctcccagattcaagcaattctcctgcctcagcctctcgagtagctaggactacaggtgtgcaccaccacgtccagctaatttttgtatttttagtagagacggagtttcacaatgttggccaggctggtattgaactcctgacctcaggtgatccgcttgccttggcctcccaaagtgctgggattacaggcgtgagccaccaccgcacccagccacccccaattttagatgatcttcatgcctgaaatagccccactctggtttgttgacattgtgtatattgcacagaagcagggaatttgtgcctgtatgggttctcagagagcttttttctcagctcctaaacttgaactctgcagtgaactgtggtgcttgcagtgacattggccaggagcaagccctgtacctgtgagctggtggctctgccctgggagtgactactgctcaaagttgcttttaatatttatttatgagacggagtcttgctctgttgcccaggctggagtgcagtggcatgatctcggctcactgcaacctccgcctcctgggttcaagccaattctctgcctcagcttcccaagtagctgggaatacaggcgcctgccaccatgcccggctaatttttttttatttttgtatttttagtagagacagggtttcaccatcttgaccaggctggtcggtagcacaaaagaaaggaggggcccttggcccaagatgggacgaatcaagcttgacaggatgattgccagatcttttttttttttttttttgagacgggggtcttgctctgtcgcccaggctggagtgcagtggggcaatttggcttactgcaacctccatctcccgggttcaagcaattctcccgcctcagccacccaagtagctgggattacaggcacccgccaccatacctggctaatttataaatttttagtagagacagggtttcrccatgttggccaggctggtctcaaacgccccgcctcaatttcccaaattgccgggattacaggtgcgagccactatgcccagcctattttatttgtaaaggaaaactggatttttctgcccaggattagagcaggagaaatgtaatgggccagcaaggctgctctcaggagaggccttcctcccctgtggagggcgagacatcctcatggggactcaattcagaacataacaggaaaaagcgagtgactccaaagacagccacaggtgtggagtctggaaatcaaaatcacagatactccactcctctttgtgtcttccagccccataatgtcaccccattatagtccaagacccttcctgtaccaggaggcccccccatwggcctgcaaggtgtgtattaaactgatggtgacgttgtgactgcttgtccagatgggcccctgagtgaaatggggcactactgatagttccctggtggtcctgggaacactggggtatatggtcaccctaactgttgtgctggattgatagatagggttggtcacttgcccgaggccgatggctggtacatggcagagctgagatattcactgtgttctggctgtttccaccgtaccatgttgttcccagccctctgttttctttccaccccacttcccatgacttgcttcccctttgagacgtggtgctagtaaatcttagattcccttggcctgtactgcctgcctctgttacaaatgccttagagtttggagaagagatggaaagatctatacaatgtaaagccagagaattttaacttttttttttttttttttggagacggagtcttgctctgttgcctaggctggagtgcagtggcactatctcggctcgctgtatcctctgcctcctgggttcaagcarttctctacctcagcctcccaagtagctgggattacaggcgcccgccaccacgcctggctaatttctttgtatttttagtagagacggggtttcaccatcttggccaggctggtcttgaattcctgaccttgtgatccacccacctcggcctcccagagtgctgggattacaggtgtgaaccaccgcacctggcctgagaattttaactttttattgctctaaagttgccattagtttgaccaactaaccaatgaatgagctgtagtgggttgctggagaggtgatgcttagtgtccgagtgttttgcrctgggcctcggtggtcctggtggcggatgttggtatgcccctgctcccctgccctgactgcacccgttttctcccggcagtcgtccctggggatgagcccagggagaagatggacttggtcacctactttggaaagagacccccaggcgtgctgcattgcacaaccaagttttgtgactacgggaaggctcccggggcagaggagtacgctcaacaagatgtgagtcttccccagggacacatgggggaggtgggaggttgggggagaaggggctgcagcatcttctgaagataggtaccggtgccaggcagggaccaaaaaccagatgrcagctcaagaaaaatggcatctcctcctcctagctcccctgtccccaggcgtagctgcatagacctcagccgcaggttctaaggagcctgccctggcagtactgccagcctgtgcattcacctgcccccaagcaccttcgccttctgcagattcatggagaatgctggtccacagtgggctcctgctctggtctctctgagcctgttttaccttccaaagactaggagtccttcgcccccagggagcctggtgcactgaggtccccatccctgtccccaggtctgaggtctggcctggccccagagtgagggagtttcatacgataatgaagcttattggctaatgggtacgagacctttctgcaccacacagctggcaccttacacccacagccactgacagtgatccctgaatgccaggcatgtcacccatatccacagtctccaacttccaagtgtccacccccaagcccactctcccacttctctgcctaggttagcacaatcgtttgtttgttcactagagtgtcctcccaaatggaagctcccctgagggcgagtttttaagtttcgttgactcctgtggttccagcaccctagcatagtggaatgaatatgtaacacctgagctaccatccctaaccatgccttcatttagcatttattaactacccatttcatgccagacactgttgggacaagggatcgtgagcaaaaatagaaaagcgtttatgctgagatgggatgggctgtctcaaagaatcagatagaagcagacatatcatcagatgggaaccaaagtgtaagagcaggtttccatcaagggcgagtctgacctcagtctgacctcaccctgtcctccagggcgctgtctgggtcccaggggaagctgagcggtgccaacagtagcagctgttgtgtgcgcggacacccctgtgggctgtttacctagtcactctcataaccacattaactctgaggtaggctctggttctccctgttttacgggtgatgaagccaaggcaccgagaggtcagccagcccgctgaggccggaagccagtgtgcagggagctgggctccctcaggaagtccggctgtcccygtgtggccctgtctgagcgccttcgtgtttctcacttgagcctggagcgcctatggaaggtgcgtgccgcagttgttagtggatgctgggcctataccgacccctgctcagctgtgctcacttctgttagacttccccttctctcctccaggagggaccctccytgggtcagctgttcctcaagagcctgccatctctagcttgggcccctctttctcactctccccaggtgttaaagaaatcttactccaaggccttcacgctgaccatctctgccctctttgtgacacccaagacgactggggcccgggtggagttaagcgagcagcaactgcagttgtggccgagtgatgtggacaagctgtcacccactgacaacctgcygcgggggagccgcgcccacatcaccctcggctgtgcagctgacgtagaggccgtgcagacgggccttgacctcttagagattctgcggcaggagaaggggggcagccgaggcgaggaggtgggygagctaagccggggcaagctctattccttgggcaatgggcgctggatgctgaccctggccaagaacatggaggtcagggccatcttcacgggrtactacgggaaaggcaaacctgtgcccacgcaaggtagccggaaggggggygccttgcagtcctgcaccatcatatgagtgttctcaccaccacttatgcccctrgaagggaaggggagagggaaacgtgccctctgtttgatccttgttttgtgacattttttttttttttttttttactcaaagttaacctacctgtaactttttaaaaacttgtaaaataactgaccctcccttcctgtccgccctcttcccctctaatgctcacrctcccaacacaaggtgggcagggaggcaccattcaggaacctggaccaaagctracgaggctgggccaagccagggatggggccacagccagaaccccgagccctacttccaggttcyggttagctcagccccagcccagcccagctgctctgcccagagctgggtgagtggggagacacctcagagccccgcaaaacccactgaccggaggcaaaaggcagtggggctgggggtagttttccatggtcacagagaactagtggtggctctgagaaggggaggacctctgggctttgattccatctccttgtcttttttctttgtttttagagacagggtcctgctatttcccaagctggagtgcagtggtgcgatcatggctcactgcagcctcgaactcctgggctcaagcaatcctcctgagtgatcccatttcttaatcagtgtagccccaagaaggctggggctatttaccagggtagaaaaaggagcttacctcccacctttggtcctaagtccctgccccctccccttcacaccataactaggtaacagtttgataactagggaagaaagcagaacagttaagcagccgccacatccccgctggctgggggcctcactccaggaaggggctggactggctgtcctttccagtggcctggctccgctgtgtggatggggagatcggggccagaggcagaaccctggtgaggaagctccagtcctgctctctacccagcccatcttgcctccatggtgcctctggaggcctctgggcctcctctaacaggggctggtgggcaccaagagccaatggagtagacccctggctggtaagggccaagtcccaccggttgcttctgggaaggggtttctaacactagtctgtgtgctgtggttcctggggtgccctccactgcccyctgttcagtaacagggccttgctaatcgggttgtcactcaacaaaagtgctttggatttaagttactatcctggctttgcccaacctcagcaacctgtaagactgataatgaaataaatcatgttaatcctagctgtgtgcagtctctcttacccttctgtgcccagctcagtcttccctagggctgggtgtattaggactggctttgtcccacagcttggggccatcggtcctgtctcccctctgctggccgggcacagctgtggtgaggttgggcagctgaacagtgttggctttcatgaggaggcagaaagcagaggctggcctcagactcatacagaaggtgggggttggctgggtacgagggatgtggagcacaaaagcctctcatcccccattaaccagggcaccaagcccacaggtgtccccagcccactggatcagaaagagttcagtaagaccggaagctcctggtaygggtttctcccagttctctagggaaggccacctgcaggtcactgaaacttcaagcaccagggaagatctaacatttgagtcccttccaggccatcagaggcctagtcagccacatgggaaacttccaagacctgactcaggcatcattccaccatggctaaggcaccagccggggaagacttgaaagaaaggggcaggagctcagatgaagagaaatcctaagttacctttctaggtcaaggcctgtccctggccatctctgaacttcagctagagcttcaagtctgtgcctggagctcctgggaaggctactcaccttgaacaccacgcttgacaggacagcatggtgcatgccgctgcatccgtgagcagtgtgtctcctgcatgcagaaagggagcagagaaggccaggggcttttgctaaaaatagtggccagaccagagctctggagccacctgtcccacctcaaatgggtctgggggtcaggaggcagggttttatctctgtctaccatctccctcgaacccacactgcaacaggaactgtgagagtctttgtaagtaaactgccctgtctaggtcagtacccacctgagctttggacgcacacagcttttagtacccacctgagctttggacacacacagcttctagtgatttctggggccccaccgtaaagtgagcatgctttctgaactcgcttctctgtgactgatgttaggctgggcccagaggcacagccggggcctgcctagcactcacatgctggacaggtctgggagaggcagagtgccccacctgcmactaggctgggtgcccacagcccgcatgcagcagcttgctgcaccccaagtccaggtcgggctcagctctggctcacagactggagacaatgcagatgccagagcaaagggccaggaagggtcaaaacattttattctctttttttttttcttttttaataaagttaaacagtaaaacaaaaattcacaagctgcctccctgtccacccccgcctccctcccctgccctcggtcttcggcattggttccctttgctccaccccactcacagagacacagggcatccaactgagaaaacgaaactgctctaagcacacggagacgtgatgaagggaggaggtgaactgtttccacattcaagattaaactgagtgaatctgcattttctgggttctgggtggttgcccttcattagccaaattgaaaaaagaaattccctggaccagatgctgaaagagaaaagaggggttggtagttggctatggattttctaaggaagatcactttgctctgattatggaaaagtcttcaagggctgcttcaaactcaaacacagagagaaactctatgggtatcaaacagctcaggctgtttttgggtgcaagagggagcacgtgactgtattatacatgggtagcttctgacctcagcattatctatatagtacctttgctcttgcagagaagccttggtactaggcagttagagatgcctccctgaccctgcagagatgcggtggctaaaggtcccaaggcaaggggtgcctgggaaccttcctgtcttcatccttagcaacagccgagtggatagatgccctgctagatgagaattcagctgcccccgctcatgggcccctctgactcccaaagagctgcctaagaggcaatgagtgtgttggcttgtgatctgggaactcccaagaacagcaggcccacctaccttcaaagctgaagccgccaggaccgccaaagaatgccttgaagatattgtttggatcaaaatctgtagagcagggcaagtaacatggaagggaagaaaaggtgaaaaattagaaatgttcgaagagaactgatgacactgagaacagatctccaaagctttcctggagagtctcactcccctcctttcccaacacttcagactgcaagtgagcaaacctgccccatcccgtgcaaaacatgctacctgatcccactcctaggacatgttcccttctccttccaactgctgccccaaaggaagctttctctgcttcagcttgcttcattgggctgttttctcaacaaatggaatgccatttgcacttacacaagactttccccatactctgtctccctataatgctggagcggctactaaaaaggataaaatgtatcacttaaatgttaccaaaaataaatataagagcaagatctaggatttactgtatttgattccatgtcttttactccgtagactctaggctagaaaaaaagctatggtttattagctgggcgtggtggctcacacctataatcccagtgctttgggagtctaaggtgggaggatcacttgagcccaggagttcaaggctgcagtaagctatgatcacaacactgcaccccagcctgggtgacagcaagaccctgtcttaataacaacaacaaaccaacaaaaacacctactaggtgcaaagtactaggtactttgcatacattacattacttaatcctagtaatgttttgtcagggtaagtatcattcccaattaatactcaacaaaacatatgtaggtggttcaagtaacttgcccacgatcacatggcagcgaaagcagcagaactggaaaatccaactcctgcctgactggctctgtgcacttttgcaaggccacagcatgtctggtggccccatccctgactgactgcccaagcttcacagaaggactgacccccaccaggtgatcccacagccacctcgtgcccagagtgagtttctctgcttgcatctgtgtgtcttcctgggctcctggcttagtgaatgaccccgagtcagctatgcctgtcactttccccaacacatctgaatagcaaccaactcctgctgagtctaccactaactaactccctgactgtgccctccaatcctttcctaccttttgtgtcttccttccatctccattctccttactccctccaaccccaacctcctcacccctatcacaaatatatttccagagccaaaatctggtccacagtgcccctacttaaaacttcacggctggccgtggtggctcaggcctgtaatcccagcactttgggaggccaaggtgggtggatcacgaggtcaggagatcgagatcatcctggctaacaaagtgaaaccccgtctctactaaaaaaaataaaaataaaaataaaataaaataaaattagccgggcgtggtggcaggtgcctgtagtcccagctacttgggaggctaaggcaggagaatggcgtgaacccgggaggcggagcttgcagtgagcagagatcgcgccactgcactccagcctgggcgacagagtgagactccgtctcaaaacaaaacaaaacctcttcactagtttttgactgcttatagatcttcttaactgctaggcagaggaacatgtttattgtggtgaacctaggtttattaaacacaaatacccccacactgaactggagaggactcagcattatctatatagtaccatcattcttattttaaattccggctgggtgcggtggctcacgcctgtcatcccaacactttgggaggccaagatgggcggatcacacaaagtcaggagtttgagaccagcctggccaacatggtgaaaccccgtctctactaaaaatataaaaattagccgggtgtggctgcaggtgcctgtaatcccagctactcaggaggctgaggcaggagaatttcttgaacctgggaggtggaggttgccgtgagctgagactgcaccactgcacaccagcctgggtgacagagtaagaccatgtctcaaaaacataacaacaaaaaaaaattaaataaataaataagttgcaatggaaggccaggcacagtggctcacgcctgtaatcccagcactttgggaggccaaggccagtagatcacttgcggtcaggagttcaagaccagcccggccaacatggtgaaaccctgtctctactaaaaatataaaaattagctaggcatgggggtgggtgcctgtaatcccagctgctcaggaggctgaggcaggagaattgcttgaaccctggaggcagaggttgcagtgagccaagatggcactactgcacccagactgggctcagtcttaaaaaaaaaaaaaaaaaaaaaaaaaaggccgggcgtggtggctcacgcctgtaattccagccctttgggaggccgaggtgggtggatcacgaagtcaggagttccagatcagcctggccaatatggtaaaacgccgtctctacttaaaatacaaaaattagctgggcgtggtggcgcacacctgtagtcccagctactcgggaggctgaggcagaagaatcacttgaaccctggaggcggaggttgcagtgagtcgagatggtgccactgcactccagcctgggtgacacagcaagactccgtctcaaaaaacaaaacaaaacaaaaaacaaaatcccaatagattttcttagtggaagagatggtaggtctgttcaccattcacaggtcaggtcctctttttttttttttttttgagacaagtcttgctctgtcgccaggctggagtgcagtggtgcgatctcagctcattgcaacctccgcctcccgagttcaagcgattctcctgcctcagcctcccaagtagctgggactacaggcgtgcgccaccatggctagctaatttttgtatttttcatagagacggggtttcaccatgttgggcaggatggtctcaatctcttgaccttgtggtccgcccaccttgttctcccaaagtgatgggattacaggcgtgagccaccatgcccagcaaattttttggcagacaacttagagtgaagactgactgaattaattaattaatttttgagatggagtcgcactctgtaacccaagctggagtacagtggcgcaatctcagctcactgcaacctctgcctcctgggctcaagagtttttggtgcctcagtctcctgagtagcttggaccacaggcatgcaccaccatgctcagctaatttttttgtattttagtagagagtacaatttttttggtattttgtatgttgcccagggtggtcttgaactcctgagctcaggtgatctgcccgccttggcttcccaaagtgctgggattacaggcgtaagccaccgcgcccagctcacaggtcagggcctcttatctctgacagcccacagtgagcaacaatattgacaataggtgtgctttatatcatgctaaatctttttgggaaattaaaatctgtgagtgtttataggaatgtatgacatacataaatgtcagcatacactttgcagtgggtaaaaaagaacttccagataataggaaaatgctcatattccttaccacatacagcccttatggcctgtgagctctgatccagctacttgccggccttccaccaccacctgcctctagcaccctatccctttatcttccctagaccaagccccctgcagatccccaaagaggccatgctttgcttttttagtggggagggatggagtctcactctgttgcccaggctggagtgcagtagcgccatcttggctcactgcaacctccacctcccgggttcaagtagctgggattacaggtgtgcaccaccacacctggctaatttttcttttttctttcttcttattattttttttaattgagacaaagtcttgctctgtagcccaggatggagtacagtgggacaatctcggctcactgcaacctccgcctcctgggtgcaagcgattctcatgcctcggcctcccgagtagctgggattacaggcgcccaccaccacacctggctaatttctgtattttagtagagacgaggtttcaccatgttggccaggctggtctcaaactcctgacctggtgatcaacctgctttgacctcacaaagtggtgagattacaggcatgagccaccgcgcccagcctaatttttgtatttttagtagagacagggtttcaccatgttggccaggctggtctcaaactcctgacctcaagtgatctgcttgccttggcctcccaaagtgctgggattacaggcatgacccatggggccatgcttttctgcacttccaagccttcccttgctagtgctcgcctcctcagagctcactgcacactgtgaacctgccacatttgactgcatttgtttgactccatgtctattactgtttggaccagggatcagatttggcccaaatagactctccctctggagcatctttggaaaaaattctaacattctacagctgtcaaattcatcccaggctgccccagccaactcaccacccatattcatgccctcctcatctaggtcctgtccactgtcatagcgagtctttttcttgggatcagagaggatagtaaaggcctctccaacttccttgaacttcttctcctcctccttctgaacctcagcactggctccactatgccgatctaaagtggggagtaaaagaacaactcagtggaaatcaaagtttcaagaaaacaaagtttaagagaaaaactactttctgtctaattttggaatttggcacttcccaaaatttggagggtccacaagtctgcaacaccttattctcagctgaaggacctctccaaggggtcccctctggactgagtgtggcagttggcctgccctgcgggttcttcccactgagcccactccccgcacctactctacctggatggtgcatcaaggcccgtttccgataagctttcttgatctcgtcctcagaggcattcttgtccactcctagaatcttgtagtaatctttcctcttactcttcttcagttccagctgcgcattttttaggagctgtttgtgttctacaggaagacatctggcatcagtggacaaatctgactctggttttttcctcaccaggtctcagcccagctgcctgggagttagaggccttgttaaccatgccagggacttttacggtgctttcttctggagattagaaaaaaaatctactcggccaggcacggtgactcatgcctgtaatcgcagcactttgggaggcctgcatcaatgagagatgcaggtaaatgagacagaaaagggaactctaaacacaggtttgcttctatttcggtagcacgaaagaaagggaggggcccttggcccaagatgggaggaatcaagcttgacagaatggatcacccgaggtcaggagttcgggactagcctgtccaacatggtgaaaccccatccctactaaaaatacaaaaaattagccaggcgtggtaccatgtgcctgtaatcccagttattcgggaggctgaggcaggataattgtttgaacctgggaggcaaaggttgtagtgagctatgatcatgccattgcactccagcctgggtgacagagcaggactccatcttaaaaaaaaaaaaaagaaaaagaaaaaagaa

SEQ ID NO: 93801 - DNA, 223587 bp, Homo sapiens
  misc_feature (1)...(223587): n = A,T,C or G
tcaacaaagtgctttgaggacatacctcaaaatagtaaagggcatatatgacagacccacagctaatgtcacactgaatgggcaaagactgaaagcctttcctctaaaatttggaacaagacaaagttgcaacttttaccacttttattcaacatagtactggaagtcctgaacaacaaatgggtcaatgaagaaattacatagaacaattaggtaggagaaagaaataaaaggcatccagactggaaaggaaaaagtcaaattagctttgttcacagatgacgtaatctcatatttagaaaaatccaaagaccccatcaaaaaactattagaaccaataaatgaattcagtaaaagttgcaggatacaaaatcaatacataaaaatcagtagcacttctatacaccgaaactgaacagtcttgaaaagaaatcagcaaaacaatcccatgtataataactacaaagaaataaaatacctaggaataaatttaactaaagatttaaaaagatctctgcaataaaaactataaaacactggtgaaagacattgaagaggaaacaacaaaaatgaaaagatatctcatgttcatggattaaaagaattcatattgttaagatgttcatcacccaatgtgatctacagattcaatgcaatctctatcaaagtaccaatggcattcttcacagaaatagaaaaaacaactgtaaaatttgtgtggaacctaaaaatagcctaaataaccaaagaaaaagcaacagagcagctgggcatggtggctcatgcctgtaatcccagcactttgggaggccagggcaggtggatcacttgaggtcaggagtttgagaccagcacggccaacatggtgaaaccccatctctactaaaaatacaaaatttgctggtcatgatggtgcacacctctaatccaagctacttgggaggctgaggcaggagacattcaaccaggaggtggaggctgcagtgagctgagatcatgccattgcactccagcctgggcaacaagagtcaaattccatctcaaaaaaaaaaaaaaaaaaaaagaagaagaacaaagctggaggcatcacactacctgacttcaaaatatactacaaagctatagtaaccaaagcagcatggtactggtataaaaacagacaaatagaccagtggaacagaatagagaacccagaaataaatatacatatttgcaaccaactcatttttgacaaaggctcagagaacatgcattggctaaaggataatgtcatctataaacagtgctgggaaaactggatatccatatgctcaaaagtagaactagaccccaatgtctcaccatatacaaaaatcaactcaaaacagatgaaagacttaagtgcaagacctgaaaaactataaaactagtagaaggaaaaggtgggaaaatgcttcaggacattggtttgggcaaagactctttgggtaagaactcaaaagcataggcaataaaagcaaaaatagacaaatgagactacatcaagctaaaaactttttgcatagcaaaggaaacaatcaacagagtgaagagacaatctgcagaatgggagaaaatatttgtaaactacctacctgacaaggaattaatagccagaatatacaaggagctcaaacaacagcaaaaaacctgattagaaaatgggcaaaggatctgaatagatatttctcaaaagaagacattcaaatggccaacaggtatatttaaaaatgctcagcatcatgaatcatgagggaaatgcaaatcaaagtcaccctgaaatatcatctcaccccaattaaaatggctatcatcaaaaagacaaaaataactgatgctggtaaggatgctttgaaagggcactactagcacactgttggtgggattataaatggtacagcccactatagaaaacagtatggagcttcctcaaacaactaaaaatagatctaatatataatctatcaatcccactgctggttatgtattcaaaagaaaatcagtatgttggaaaggtatactgacatactttgtagtataaacccatgtttattgcagcactagccacagcagtcaaggtatgaaatcaacttaagtgtccatcaacagataaatggataaagaaaatgtggtacatgtacacaatggaataccatctggccattaagaagaatgaaatcctgtcatttgcatcgacatggatgaaactggaggttattatgttaagtgaaataagccaggcacagcaagacaaatactgcatgttctcactcacttgtggaaactaaagaaggtgatctcaaggaggtagagaatagaacgatagataccagagacttggaagggtgggaaagggtgaataaagagagattgattaatggctacagaaatacagttagatggaataagtcctggtgttgaatagcacagtagggtgactttggttaacaacaattcattgtatatttcaaaatagctggaaaagagaattttaaatgtttccaagacaaagaaatgatacatatttgagatgacggatatcctaattaccctaatttgatcattacacattgcatgcacgtattgaaatgtcacatgtacaccagaaatatgtacagttattatgtagcaatttttaaaatcttgatttaaaaaacttcccccaaaatttcaatgctacttgagaagaataatgtgaattcattgtcagcttcacattcatctaacagttaatattatgtttttaaattcatgttgtctctctaattctcacaattttcttaaatattgacattatatgccctattctatagtaaaataaactggtattctgaaaggtggagcagcttacccagggcacacagctactaggaggggagcccatgacacaggccccccatcctagcccagagctcttttaatgagcccccatgcatcctcagcatgggttaatttaccctgtccttagcagacagcagaacagaatagaatgaggctagcgttaataagctctgactgaggaggaggggagcagcagagggcctggttttggtagatgggaactgaggactgctgtacacagtcctgggcagccaggagtaacagggcagcatggacctgggccttagagagaggagaaagtctaagacgagacacgtgttggtgacagtgccagcttttacaggatctcccatcacccacctcttttttttttttttttttttctgattaaggaacttgctgtggatgaggtggttgaggccaatgtggtcaaaaaatattcaggaagcatattcatactgaacaagcagaccacaggtgcaacacttggggatcacaaagccttagccttccatggcacaggggaaagcagtggtttgaatcagagctgtttgagtgaaatcagtaacaaagtgcttcagggaagaaatctcattttcaagagcagatttcgagatgattcaaaattggaacatctgacagtggggtcctgcaggaacattctccagggcctgactagttgttctaaaccacaggtaggtccagggccttttggcaagctgtgcaaagatcccaagtcatttgcactcagtacttgatgagcaaaggcagccctgtcaggggcaatgataccagccagtgtgaaggacaactgtgcaaatgggagggtccactccatcctggtgacggagagggatgttttgttcagtggtctgtgcacacgtgcactttgttccagcttctgctggcgaaatcactttctgatttctgcattcttcctttgatcatgcccagtaagaactcaccctccaagcatgaaaaatccttccattactgaaaacctatgtgtcaggttttaccatgatatattcctacgaagtagatagtctcacctcccttttctagctgaggactgtcacctctggaaacaggaaggggcttgctcaatactgcacagctaagtcagcgactcccactgtgaccagccccgaagcctgagcacactagagagtttcagagccgaccatccctgggatggttgtgaatggcactgcctggcccacatacatgcgatgaagggcacaaaacttgcatttccggcataccaagaaatccctctcactctaagagtttccagacctgctcgcagctatacattgagaccaggagagcctcaagaggcccaaagcctgtgtcaaatgctcttccagaagccctcaggagagtcctcacccatttatggattagacaaactagaccacacactcctggagtgctgtagcacagctggaaggtattcaataaatcctcccttttcctgtcctcaccatttcccatgtatgacatgatggcctacaactaccatgggtgtcttggaattctcttgaagctggtctggggtgcaggtttcatcacactcctgctagagtcatagacagatgcactaagcacttacttcttgccagccatgctgctttgttgtttggatacatcatgtattcgagtgcttccagcagcgcattggagcggatattaccattatcccaatagaaatgagctacttgggaggctgaggtgggaagatcacttgaacccaggaggtcaacactgcagtgagctgtgatcacaccactgcactccagcctggatgaaaaagcaaggccctgtctcaaaaaacaaacaaacaacaacaacaacaacaaaaacaagacactgaaggggggaaagttacatcactggtctaatatattactcagaataaacagtagacatgagacgtaagcatgagcctttctgtcttcacaatctgagttcctaatcaatcagtcctttatttagcctcccttggaagtctctggaacttctctaggcctcacccctgtggtggtcctagtgaccccagagctccccttagtcacagagtgaagaactgaagcagcagcaccttagagtcagaggaagtcacaggcccatggacgcctaacgatatcctcagtattgggctggaagtgtaattagggaaacactctgacttgtgctatctctgcagcaggtttgggaattgtagccccatcggtgcttgtaagactaatgactgcacaagaaatcttccaaccataaaaactggtatttcctacatcctggaaaggatgctactctaaaactttgcctgctactccaaatgctattttttttaattgctaacaatttagatagcttctataatatttcaaaatttgtaataagctccctcagagcctaagcagagagaaacagaatctcatgacctcctacacttacctagactgtggtactttggccctgtcctcttatcttgactgagaatggcatatgattttgttttatcttattttagagagaaacatttagattatatgtcttttatctatgatctggttccgattttttttttccctcagaaagacagtgttcagttctattcttcagagcagaaaatcagtctcttaacaaatcatccacaaaatgcacttcgaaattctggagaaaaaaaagatgcattgtgcacagcctagcaactgtgaattgattaattctaacccatgttttttctcattaggtctaaaatcccaccatgctaactgcccattattttctgyactgyttattttctgcacaccaaataaaaggccttgacccttcaaggaataacccaatttctccagaggaaagatattatttgaccagaatatccttttacaacaaaataaggatcacaaccttaccatataaagctgttgaaaacaagactaagtaagttctgaatgtaaccaattagaatttctacaatatgtgggtgctgctgatcaaattgttaaagggttgtgtgcttgtggattagttttttttttcttttttcttctcagttttggctttagtatcgttttgttttgttttgcaagaatgaaaggggaagggcctcctaaccaacccaacagatcagttycggcaagcctcgaggctcrcggggtttatgcacactaacttcactgagccagggagcacggaagttgtgccactgtgcaacttgggttttctttatcctgcagtctttacctcagcagaaccgcacaccacagactccctccagctctttgtgtgtggctctctcagggtccaacaagagcaarctgtgggtctgtgagtgtttatgtgtgcttttattcacttcacacttattgaaaagtgtgtatgtgagagggtggggtgtgtgtgtcaaagagagtgaggaagagaaggagagagagatcaaytgattctgcagcctcagctccagcatccctcagttgggagcttccaaagccgggtgatcacttggggtgcatagctcggagatgcagtccccctggaaaatccttacggtggcgcctctattcttgctcctgtctcttcagtcctcrgcctctccagccaacratgaccagtccaggcccagcctctcraatgggcacacctgtgtaggtatgcaaataaatatttttgtattttctatgtagacataacaatgggatccagtactttgcttgcrtaataaatcacatattttattaaatcaagaattgtaagattccaggtaaggcaccagtaacctcactgacacagagaaatgtggagtctaagagtagacattgacactacatacatctatgtgaataaaaagcatactagtttaaattgggcataaaactcttccacctcattggcgattggaattttttcttcttgtataggtaactattatttcaggctattttagtctgaaatttttactgcttttcatgggctttgacctcatataaacacatctgagtttgaatcactgccctcctcctacccttctctcccatttcctactggctgtggaaacctggagcaatgtacttaaccctctccatgcttctgtgtccttattggtgaactgaagtgagtgagacccatctcatagggataccatggaaattgtgaccatgcatgtaaatctgtggcatgtgcacacagtaaggactcaaccatcttagcttycttccgtctctcagagaatccagatttggcgatcacctggagacgctgagcgttgatatggcttcttggctcatctgttaatgaagtgttttatttccaagaggttttttttgtttgttttttttggatgagagcaggaagtaaggtaagatctttgatattcacattgtagctctcataacatgggaattctcataatagtggtggcatttagatggtacagtccatggagccacatagactcagaactctgagtagtaagtaattgttcaatgagcagacctcaaaatacaatcctagcttgagaagccaggaaaataactctaggataagtctgatggccacatgctgcaaatggaaaatctggacacagattctgacacttaggaattgtttctggagacaatatggaaatatatctgaatttgtcctacttcctcaaaatcatggcctcaggtcattgtacatgttaggagatgcatctctacttccaaagtcctttttttttttttttttttttttttttctgagatggattatcgcactgtcacctgggctggagtacaatggtgcagtctcagctcactgcaacctctgcctccctggttcacacaattctcctgcctcagccttcggagtagctgggattacagatgcacaccaccacacccagctaattttttgtatttttagtagagatggggtttccctatgttggccacactggtctcgaactcctgacctcgtgatccgccccccttggctcccaaagtgctgggattacaggcatgagccaccgcgcccagcctccaaagtcttgttttaattaagacccagattccccaagactattttccagagacctgaaggcagaggtgtgtggtcctttgaaccatgcctgggagatcatcctcccccagtatttggtttccttaaataactatttgccaccttttcatttttctcaaaacaaaaccctactgcccatcaaatggaaatacacttgagaaaagctcagatgaaatcagttttacttctgggctcattgcaaactaaatgtttgagtttgggcaagttgtcagggctgagatccttggaccttcacttcagtaaaatggacaggaggtacacattcctttctctgccctgttcccagtgaggtcatagagggtaagaaggaggtgttggggagatttcaggatggggttgctctggtttttctattattgctgcatcaaaaattacaataataaccatttgttgtattatgattttatgggtgaaaaatttgttcgaacactggctggtgattcttcttctccaygtaggagtgaccgaggttaggaggtggtattcggatggtggattgatggatctgggactgacaaaaacagcttcactcacatatttggcaccttaggggtgagggaatggctagagggttggctcatctgggagtgccatcagagtgcccacacatggctatcttgggtagtaggctttcttacctggcagcttaggaatcccagagagaattccaaaagacaggaattagaagctgccaatctttcaagttttgggtctggaaacaggcacagcattacttgccatcttccattgctcaaagcattcacaagttcctccacccagactcaaagggagggggcagagacccttcattttgatggagagggtcaagaaatgtgtggtcatctctatcattcacagaggttcactttggttgcccatacaaattctcatggccccaagggcttggagactctgttgctgattaggtttgaggatgatttagcatccattttcccagcaactcccaacttcttctggttaactctgcctgggtgacttattcacctgttgtcataatagcaagaaaggtgggtgcaagaggagtccagtcttgtgatgaacacttactgagcactgcctatgtgctgagacaggggctgaaggtggtccaacttggtgcttcactgattgaagttggcttttgggggagacaggattagaaatgtgtgtgcaggggagtttattgagaagtgctcttggcaaaaagacgagcaagagaggaaggcagtggggttggcagagagaagscgggctgtgctgcagccataaaagaagtyccactgagagctctgggactaaaatagctcttcagagttgtcctgaagtaggtgcaggtcttggaattcccacatcaaacagtccctcgatgtgacctgaccacaggggagggctgtaattttgagacatctcccgttggtggagacagttctggcaagggactctgatgctggcataatccttcagaccaatggctccagaagctggggagcgagtgtctcctgatacgggatcctggggtgtacctgctggaagggttgtatgtgggaagcatctcaggaagcagtgaggtccgctctctcgcagctggtgggaagaggaagaagtgtgtggaagagaggagaaaagagaaggaattgttgattggagttcttctaactctacatttgttgccaacaccctaacaactttctgacaaaaagcagggttacatgacttcaaaccctccagcagaaaggtggtccccaaacatttccgcgcactcagttctcacatggccactgaatatgcgagaccctgctctcagagccagggatacacagatgaaggagaggaaggatttttagaatgtctgtcttcaggaaattcactgtccagtttagaggaaaacgaaaacctggagccttgtaaagattacagtcctttaaaatgaatgttgaactgggcccttagtgcccttgataataccctttctctaaaactctttaaactgccaatgccagagccagcagagcaccatgaagtgcagggcagaggctcatagcttggaagcrggcactgcagactccgctcataaagccacctggggaaggtgaagtaatagcctcaaaaagagtgtttaaaactttaagattttaggtcgtgtgtggtggctyacgcctgtaatcccagcactttgggatgctgaggtgggcagatcacgaggtcagcagattgagacctgcctggtcaatatggtgaaaccctgtctctactaaaaaaaaaaaaaatgtaaatatagatatacaaaaattagcaggacacggtggggcatgcctgtagtcccagctactcagggagctgaggcagaagaatcgcttgaacccaggaggcagaggttgcagtgagccgagatcacatcaccacgctccagcctgggcgacagagcgagactccatctcaaaaaacaaaacaaaacaaaaaaaaaaactttagaattctagaaacatttctacctgaatattgctagtcaaagaaggaagcttyagttatctcaaagattctgttgcattcacctgcttgctgaaagaacccaggccacagaaacttttctgagcaaaaggtgattaggcagctggatttctgatcatcccatctgagcaagaatgattcatcttttttttttttttaataaagacaaagtcctactctatcacccaggctacagtgcagtggtacaattatagcacactgaagcctcaacagcccaggctctagtgatcctcccacctcagcctcctgtgtaactgggactacaggtgcacaccaccatgcctgcctaattgttttatttttattttygtggagacagggtctcattatgttgtccaggctggtctcaaacttctgggcccaagcaatctgtctgcctcagcctcccaaagtgctgggattataagcatgagccaccgtgtccagccctcttcatttttgttagttgtcagctgtcttttaattgccattccaacataaattcttaccttgatcataaaaggatatccttgccttgatttgtaagatcataataacctaaaatatttatatcaccttcccaacacatggaagaagttcttccttcctatttttcttcaagatcaactgaactagttgggtttcatccatttttatgaagattattgttgagtaatcaaatttgcttcttactcataaagtttgttttgctactggtctccccaacacttctccgtgggggttgtaccttccatcttttctctgacttgaatgtggactaattggagtgatgcctggagaaagtcactacagccaagtgctcttcagccacacaaattacatttgcgagttaataattataataattgccaacatttattggacactgactgtatgataagccatcttccaaaagatttatgtgtactaacccatttaatcattacaatgaccttatgaagtctgtattatcattatccttgtttggtaggcgaaaaaataaagacagaaataagtaacttgttcaaggttacatagttagttaaaacttggcttattcctcgctttaattatgattatgttattgttgatgtgattaaatcagggtaaaatatttttcccatattgttttaaataacagctttattgagaaatataattcatgtatcataaacttcactcttttaaagtgtaaaagtggcatttagtatattcatgagttgtgcattgatcaccaatatctaattccagaacatttcactgctccccccaaaaatccaattctcttagcatttactccccatttccttctctctrtagcccttggaaatcaccactctacttcctgtctctatgggcatttcacataaatacgataatataaaacatggccttttgctacaggcctctttgacttagcataatgttttcaaggttcattcatgttgtggcatgtatcaaccctrtttcttcttacagctgaataatattccattgtatggacatacttggttttgttatttattcattgttgatggacatttgagttgttttcacttcttggtaattatgaataattctgctatgaatattcatgtacaagattttgtgtagacatgtgtttttatttcttttgggtatatacctaggagtggaatttctagggcatgcggtaataccatctttaacattttgaggaactgccaaactattttccaagcagctgcaccattttacatttctaccagcggtgtatgaaagttgtaacttctccaccttcttgccaacacttagttattcatcattttgctatcgccatcatagtagctgtggagtgagatctcatttttggttttaatttgtatttcccaaatgataatgatgttagcatcttttcatgtgcttattggccatttgtatatcttctttgaaaaaaaatttctattcaaatattttgcccctctttaaattgggtttgtctttttattgttgaattgcaaaaattctccatatattctagatagacgtcttttttcaaatatatgattcacaaatattttctcccattctgtgtttccttcccccactttcataatggtgtcctttcacgaacaaaatttagtaattttgatggagtccagtgtatctatttttttcttttgtctcttgtatttttggtgtcatatctaagacctatattttaaaattgttgttgtagttattagttttcttttgtcatatgcctgttcctttgtcttatttcccagacaccaagttcctcaccacaaatatagcaaccaggagcgaaactcctggggttgcaagtaacaggaattaacttaaactaggctaagcaaaaaaaaaaaaaaaaaataagaagagaaaaagaggaaatttgcttgtgagaattacaagagtgaattttagaatcaaaaggagaaaacaggcctacaaatcaagctaggaaacaaaaaatgttggccgcctggaacccagagagttctctctcccggtgcctcgccactgcctccatctctatccctacagaccagctggtttaatgccctccaccctttggytgactactggctcccaaaagctctgagttcatatgtggtagttcagcccgcagaagtgtgttcaccttctggttaccaattccagcttcccagcagagagaatttgggctaagtctttagttcactgactaaggggtgggtgggagtggggagagctcaaaatacagagatggctgccaggctcatggcgtgaggggatagctctcactgaagcagggtattgttgtgactggagggatactctaaaaggagccctcactgaagttactgagctattgagcctacagacccatcacaaacaaccccagctccaatcccaaagcgtaaccccgcagtggggaactaaccagaagacctgaggacgtggccataaatgtattcccaaagcagattgaagctgtggaaagccccaagatccccttccccagtttaccatatttgttagcactgaacagtatgtcccatttgaacactaagcaaatgcagggtcgactatgcttttttatttatttatttatttatttatttatttatttatttatttattatactttaagttttagggtacatgtgcacaacgtgcaggtttgttacatatgtatacatgtgccatgttggtgtgccgcacccattaactcatcatttaacattaggtatatctcctaatgctatccctccctgctccctccaccccacaacaggccccggtgtgtgatgttccccttcctgtgtccatgtgttctcattgttcaattcccacctatgattgagaacatgccgtgttttgtttgttgtccttctgatagtttgctgaggatgatggtttccagcttcatccatgtccctgcaaagcacatgaactcatcattgtttatggctgcatagtattccatgcagccatggaatgtgtgtatgtgccacattttcttaatccagtctatcattgttggacatttgggttggttccaagtctttgctattgtgaatagtgccgcaataaacatacgtgtgcatgtgtctttatagcagcatgatatataatcctttggatgtatacccagtaatgggatggctgggtcaaatggtatttctagttctagatccctgaggaatcgccacgctgatttccaaaatggttaaactagtttacagtcccaccaacagtgtaaaagtgttcctatttctccacatcctctccagcacctgttgtttcctgactttttaatgatcgccattctaactggtgtgagatggtatctcattgtggttttgatttgcatttctctgatggtcagtgatgagcattttttcatctgtcttttggctgcataaatgtcttcttttgagaagtgtctgttcatatcctttgcccactttttgatggggttgtttgttttttcttgtaaatttgttttgagtgcattgtagattctggatattagccctttgtcagatgagtaggttgcaaaaattttctcccattctgtaggttgcctgttcactctgatggtagtttcttttgctgtgcagaagctctttagtttaattagatcccatttgtcaattctggcttttgttgccattgcttttggtgttttagacatgaagtccttgcccacacctatgtcctgaatggtattgcctaggttttcttctagggtttttatggttttaggtctaacatttaagtctttaatccatcttgaattaatttttgtataaggtgtaaggaagggatctagtttcagctttctacatatggctagccagttttcccagcaccatttattaaatagggaatcctttccccattgcttgtttttstcaggtttgtcaaagatcagatagttgtagatatgtggcattatttctgagggctctgttcygytccgttggtctatatctctgttttggtaccagtaccatgctgttttggttactgtarccttgtagtatagtttgaagtcaggcagcgtgatgcctccagctttgttcttttggcttaggattgacttggcaatgcgggctcttttttggttccatatgaactttaaagtagttttttccaattctgtgaagaaagtcattggtagcttgatggggatgacattgaatctataaattaccttgggcagtatggtcattttcatgatactgattcttcctacccatgagcatggaatgttcttccatttgtttgtatcctcttttatttcattgagcagtggtttgtagttctccctgaagaggtccttcatgtcccttgtaagttgtattcctaggtattttattctctttgaagcaattgtgaatgggagttcactcatgatttggctctctgtctgttattggtgtataagaatgcktgtgatttttgcacattgattttgtatcctgagactttgctgaagttgcctatcagcttaaggagattttgggcagagatgatggggttttctagatatacaatcatgtcatctgcaaacagggacaatttgacttcctcttttcctaattgaatgccctttatttccttctcctgcctgattgcgctggccagaacttccaacactatgttgaataggtgtggtgagagagggcatccctgtcttatgcccgttttcaaagggaatgcttccagtttttgcccattcagtatgatattggctgtgggtttgtcatagatagctcttattattttgagatacgtcccatcaatacctaatttattgagagattttagcatgaagcgttgttgaattttgtcaaaggccttttctgcatctattgagataatcatgtggtttttgtcattagttctgtttatatgctggattacatttattgatttacatatgttgaaccagccttgcatcccagggatgaagcccacttgatcatggtggataagctttttgatgtgaggctggatttggtttgccagtattttattgaggatttttgcatcgatgttcatcagggatattggtctaaaattctcttttttggttgtgtctctgccaggctttggtatcaggatgatgctggcctcataaaatgagttagggaggattccctctttttctattgattggaatagtttcagaaggaatggtactagttcctcctcgtacctctggtagaattcggctgtgaatccatctggtcctggactttttttggttggtaagctattaattattgcctcaatttcagctcctgttattggtctattcagagattcaacttcttcctggtttagtcttgggagagtgtatgtgttgaggaatttatccatttcttctagcttttctagtttatttgcgtagaggtgtttatagcattctctgatggtagtttgtatttctgtgggatcggtggtgatatcccctttatcattttttattgcatctattagattcttctctcttttcctctttattagtcttgctagcggtctatcaattttgttgatcttttcaaaaaaccagctccaggattcattgattttttgaagggttttttgtgtctctatttccttcagttctgctccgatcttagttagttcttgccttctgctagcttttgaatgtgtttgctcttgcttctctagttcttttaattgtgatgttagggtgtcaattttagatctttcctgctttctcttgtgggcatttagtgctataaatttccctctacacgctgctttgaatgtgtcccagagattctggtatgttgtgtctttgttctcattggtttcaaagaacatctttatttctgccttcattatgttatgtacccagtagtcattcaggagcaggttgttcagtttccatgtttgagcagttttgagtgagtttcttaatcctgagttctagtttgattgcactgtggtctgagagacagtttgttataatttctgttcttttccatttgctgaggagagctttacttccaactatgtggtcaattttggaataggtgtggtgtggtgctgaaaagaaagtatattctgttgatttggggtggagagttctgtagatgtcwattaggtctgcttggtgcagagctgagttcaattcctggatatccttgttaactttctgtctcgttgatctgtctaatgttgacagtggggtgttaaagtctcccattattattgtgtgggagtctaagtctctttgtaggtctctaaggacttgctttatgaatctgggtgctcctgtattgggtgcatatatatttaggatagttagctcttcttgttgaattgatccctttaccattaagtaatggccttctttgtctcttaatctttgttggtttaaagtctgttttatcagcgactaggattgcaacccctgcctttttttgttttccatttgcttggtagatcttcctccatccctttattttgagcctatgtgtttctgcatgtgagatgggtttcctgaatacagcacactgatgggtcttgactgtttatccaatttgccagtctgtgtcttttaattggatcatttagcccatttacatttaargttaatattgttatgtgtgaatttgatcctgtcattatgatattagctggttattttgctcrttagttgatgcagtttcttcctagcctcgatgctctttaaaatttgkcatgtttttgcagtggctggtaccggttgttcctttccatgtttagtgcttccttcaggagctcttttagggcaggcctggtggtgacgaaatctgtcagcatttgcttatctgtacagtattttatttctccttcacttctgaagcttagtttgtctggatatgaaattctgggctgaaatttcttttctttgagaatgttgaatattggcccccactctcttctggcttgtagagtttctgctgagagatccgctgttagtctgatgggcttccctttttgggtaacccaggggtcgactatgcttgaacaggctgtgcctctttctgccacttttcaaatgttgcagaataaatgataagacatgttaatttttgcaaaacatttctttacrtgggtgatttagggggaaaataatccttgtgtttctaagtcattgacatttaaattaattcactgaatgttcgtttttttaaaagcactatttggtactcaggaagctttttaaaagkttaagaaaaaacctgaatttttcccttactcacatttggttaaatataaaatgccttcagtgtcaggttataatcccctctccacacccgcataccacacacagagtggttcacgatgrcttcatagtttgattgatgaacacagaggtggccacataatttcaagccaatgtgagcaataaaataacagtgtcactgacaagaataggaaggatttagacagagccaacagaaggttgaaaatttattatcacgacttagacacacagaaatttcactctttctatttctctataactaaacgcttgttcataagacactgtttctgctgatagcagaaaacatttcatcttgccatttatgtggttaaattgagtctcctttggtaactagcttttcctcttccttccctcctctgtgagggttgatcttagttctccaggaggacttacccgtcactctgatgttcatggttctcagcctttggaggtggtctctgtcctcagccctaagagcgccagcaagtgaagtttcagggttggtggggttcatggtcttggcttagccatgcaatctggacattggccctgcatctgacccaccacacattccaccctcatgggccaggcagatcttcgcggtctagctggaccaccctcattctctggacacagctactgccctctgcacgtgccctttaccgtggcagttcccatacactctctcttctccataatctcctacctttatttttaaattatcattgcatttaaccccaactttagcacaaatggtaggtttctgatcatctgaatttttcaccacctgtctgcctctctctttcctggattgctctgaggtggaaacctgaagagaaagaccacagggacactctgagaagggcctgtgactttggggaaagrtcacacagtgagcaataccgaaagaatccatgatgacagcatgctgtgcttcaggaacaaaggaagtaatttttttttgtaaatatattaatactggaggtaagaatacagaatattttaaaatttgttatggaaaagggaaaaaagaagaagttgtaaagcattaagcagagtaaaatccccattaagttataatgtgcccacctctctattgacagagctattttcctagacagaatgaatgccaaaatagtcatagtgattacatggctgtctctaaaygaagacattactagtgatttatatttccttctcagtaattttctgaattttccacactttctataatgtgcttgtggaagcaatagtaaggcatggggttaagacctgcagagtgtggggctctcagatttgaatcctggttctgccactctgtacaaatgtgackttgggggcatagcttcaccctcrgcaccacttcactcccctcatctgcaaaatgagaattacacagggtgatgcgaacagcctgtcacttagaacaactgtgcttggtacatagcaaggacacaaaagggttgtgattatctattcttttggaaatcaagaaagaaatgcatagaaactgtgctccagaagttgtgaaattaaacctattgtaaggcaaaaagtcctgagtaactgaataatttcatggcaacctgtatcttaagtaaatagaaattctcacatcttgggtgtttcaaaggaagattaatttataaaggaagattgcacagtgtattagctttctattgctccgtgataaattgccacacacttatcagcttaaatcaacacaaatttattacctcacagtttctgcacatcagaagcctggacataacataattgagttccctgctcagagttttacaaggctgaagtcaaaatgttggccagggcttcagtctgatttgagactgtggtcctcttgcaagttcactggttgttggcagaatacggttccttgcagttgccggactgaactcccatttgcttcccagccatcagttagggatcactctmaattactagagtctgcccctcttcctagggagtgagtagcatagctatttctttctttcaaaacmagctagagaaaactctacatttaaagggttccctgaatatgcctggcccatctaggaaaatcttgattaccccaaaataaactgattggagtccttaattacatatgcagaatccttttgtcattgccatgtaacaraatataaccgtggaagtgatatccagtcattttcacaggttctgcccttattcagaatagggaattaagtaagatgtgttcatcaggaggcagaaatattataattctacctaccacacatagaaatgcttttaaaagaccaaaaagagccttcaaacttaacacccagataatatcacaagagagaatttatgtgacttagttccaaagtgattcaccaaatagacatgaatacataatggaaatcaatagatgaagattaagttgcagactgaacaagttttttgggctttgggggtttttggtggtttgggtttgtttatggtttttcgttttttatatgcaagctttttctcatggatttcacactctggaaatttggaaagaaaacataatcactccaatgtcatacctttttgcatataaaacagttgtttttcaatgttaggaaaatccttgcctgaatgttgctttggaaaaaaaaaaatctgtcttttaaaatgacccttgcaatttaacaaaatgcagatgtaattagagaaggctaacttgccctttggaacctaaaacccctaggctccttcagataaaaataagtacaaaagagaattctgatgatgatcgcatgaaggtgttagaaattcctctgtgcaaaagactaagtataaaactggaaaaattatcacaagcatttcagggcgcaggaaatcatcagtggcatacaatgaattgagaaatatttatttttgaaaaactgcatgaacttcagtaaaagcaactatactgtggcctccttgcctgaggctgctctgtctacactgccctcagcttggttagtgagaacagtagttttatcactgtggaactggctgcaaaaaccagctggtttactgctattgggacagatgatttcaccgaggtgtaaagatccatggctctcctggccaaaagtgatggaggccgttgggaattaacaagcagaacctacagctttgctagctcaaggtttgatccctgatgaagcaacggtgatcagccataagtttagcagggagatcctggaaataatctggagaagagcatcatggaagggctgagataagctctctacatatccctagttgattgggaaaccatgcatgtgtcgggggagacctaaaagagctcagcagaaagtgaaagaaagcccaggggaacttgagaactggctgccacttagaatatattccctagctcacacgtggatcgatcaacagatggtgactctttcacttgaacagttagaggccattgtagggttaccacaccttacaagcttgaagtgtttcagcaaaagttgctcgatgactctaagctatgtagacacaggagtgatccttagaaagccaggctaataaatgagcagagatgtaaaaaactctacattccggggtaaacagatccacagttgaagcccagaaagttactagaaaagaagagacaacaactcttagaaaaataagacaaaatccaaagttgctaaatgcattatttataacttccagttttcaacaacaaaaaaaattagtagacatgtaaagaaacagaaaatcgagatccatacttatgaaaaaagcagtcaatagaaagggactctgagtgaattaaagacttcaaagtgctgttatggggatatccacagaattaaagaccaccatagcgaaagaattaaaggaaaatattgtgacagtgttcaatgttcagcaaatagaaaaaatttcaatagagatataaaattataataaagatccaaatggaaatactagacttaaaaatcaataattgaaatttaaattgtaatagatgrgctcaacagaagatttcagttcaaagaagaaagaatcagtgaacctaaaaacacatcaatacatattatcccaaccaaagaatagagaaaataaagcttgaagaaaaatgagcagagcctcagaaacatgtagtatactatccagtatctcaacatttataaaacgggagttccgggagaggagagagcaaagggaggagcaaaaagtctttgaaaatgtaatgattaacagctttttataaatgaagaaaaggccaggtgcagtgactcacacctgtaatcccaacattttgagaggccaaggtggaaggatcacttgagtcccagagttcaagacaagcctgggcaacgtaacaagactccatctttacaaaaaataaaaaattagcccagcgtggtgatatgtaaccagctactccagaggctgaggtgggaggatctcttgagcctgggaaacagaaaaagaccctgtctgtttaaaagaaaaagaaaagaaaagaaaaacattagcctacagatccaagaatctcaagaaactccaaataaacaaagagaagtaaatcttgataccttatagtcaaactcaaacttctgaaaaccaaatacaacataaaaatcttgaaagcacaaacagaaaaatgacttatcacttactggaaaacagtaatatgactaatcgctgaactttcatcagaactttttaggccagaaggtagtaaaatgacacgcagcacttctttttattgtgcttcattttattgcactttgcagatattgcattttttacaaattggaggtttatggcaaccctatgccaaacaagtctattggcaccgtttttccaacagcatgtgctcacttcatgtctctgtgtcacattttggtaattctcaggatatttcaaactttttcattattatatctgtagtgtggctctgtgttcagtgatctttgatgttactattgtaattgtttcggggtgccatgaaccacacccatataagacagcaaccttaattgataaatgtgtgtgttctgactgttccaccaactagctatttccccatctctccccctctccattgccctccctattccctgagacaaaacaatattaacattaggccaattagcaaccctacaatggcctctaactgcccaagtgaaagaaagagtcacacaaaactcactttaaatcaaaagccagaaattattatgcttagtgaggaggcatgtctaaagccaagatatgccaaacagttagccaagtggtgaatgccaaaaaaaaaaaagaaaagagaaagttattgaaaaaaaattaaagcactattccactaaacacaccaataataagaaagtgaaacagccttatcattgatgtggagaaaacttttcatggtctagatagaatatcaaaccacccatgctattcccctaagccaaagcctaatcctagctctcttcaattctatgaaggctaggagaggtgaggaagctggaaaaaaagtataaaactatcagaggttggtttatgaggtttaaggaaagaagctatctccataacataaaagtgcaaggtgaaggaacacatgctgatgtagaagctacagcaagttatccagaaaatctagctaagatcattgatgaaggtggctgttctaagcaaatgattgttgatgtagacaaaatagccttctattagaagatgtcatctatatgactttcatagctagagaggagaagtcaatacccagctgcaaaactccaaaggacaagctgactcttgttagggactaatgcagctggtgactttaagtcaaagcaaatgcttgtttaccataatgaaaatcctagggcccttaggaatttttctaaatctactctgcttgtactctagaaatggaacaataaaacttggataayggcaaatttgtttgtgtatggtttactgtatattttgagctcactgtggagacctactgctcagaaaaaagatttatttcaaaatattactgctcattgacaatgcacctggtcatccaagagcgctgatgaagaggtacagggagattaattttattttcatgtctctaacacaacatctattctgtagctcatgaatcaagaagtcattttgactttaaagtcttattatgtaagaaatacattatttaattagctcccaagtgtcagttttggcttttgttgccattgcttttggtgttttagtaatgaagtctttgcacatgcctatgtcttgaatggtcttgcctaggttttcttctagggtttttatggttttaggtcttaygtttaatccatcttgagttaatttttgtataaggtgtaaggaaggggttcattttcagttttctacatatggctagccagttttcccaacactatttattaaatagggaatcctttcctcattgcttgttcttgtcaggcttgttgaagatcagatggttgtagatgtgtggtgttatttctgaggcctctgttctgttcattggtctatatatctgttttggtaccagtaccatgctgttttggttactgcagccttttggttactgtagccctatagccttgtagtatagtttgaagtcaggtaacgtgatgcctcaagctttgttctttttgcttaggattgtcttggatatacgggctcttttttggttctgtatgaaatttaaagtagtttttttctaattctgtgaagaaagtcaatggtagcttgaggggaatagcattgaatctgtaaattgctttgggcagtatggccattttcacgatattgactcttcctatccatgagcatggaatgtttttccatttgtttgtgtcctctcttatttccttgagcaatggtttgtatttctccttgaagaggctcttcacatcccttgtaagttgtattcctaggtattttattctctttgtagcaattgtgaatggaagtttgctcatgatttggctgtttgtctattattgatgtattggaatgcttgtgatttttgcacattgattttgtawcctgagactttgctgaagttgcttatcagcttaaggagtttttgggctgagacgatggggttttctaaatatacaatcatgtcatctgcaaacagagataatttgactttctctctttctgtttgagtatctatttctcttgcctgattgcattggccagaacttccaatactatgttgaataggagtggtgagagagcacatccttgtcttgtgccagttttcaaagggaatgcttctagcttttgcccattcagtatgatattggctgtgggtttgtcataaatagctcttattattttgatatatgctccatcaatacctagtttattgagtgtttttagcatgaaggggtgttgaattttattgaaggccttttctgtatcttttgagataatcacgtggtttttgtcattggttctgtttatgtgatggattacatttagtgatttgcatatgttgaaccagccttgcatcccagggatgaagctgacttgctcatagtggataagctttttaatgtgctactggattcagtgtgccagtattttattgaggatttttgcattgatgttcatcaaggatattggcctgaaattttctttttttgttgtgtcactgccaggttttggtatcaggatgatgctggcctcataaaatgagttagggaggagtccctctttttctattgtttggaatagtttcagaaggaatggtaccagctcctcctctttgtacctctggtagaatttgctatgaatccatctggtcctgggcttttttgggttgctaggctattaattactgcctcagtttcagaacttgttattggtctattcaaggatttgacttcttcctggtttagttttgggagggtgtatgtgtcaaggaatttatccatttcttctagattttctagtttatttgcatagaggtgtttataaactaaagagcttctgcacagcaagagaaactgtcatcagagtgaacaggcaacctacagaatgggagaaaatttttgcaatctatccatctgacaaaaggctaacatccagaatctacaaggaacttaaacaaatgtacaagaaaaaaacaaacaaccccatcaaaaagtgggcgaaggatgtgaacagacacttttcaaaagaagacatttatacggccaacaaacatgaaaaaaaaacctcatcatcactggtcattagagaaatgcaaatcaaaaccacaatgagataccatctcacaccttcagacagaaagaaaataacaccacatggtaacttgcatccagttagaatggtgatcattaaaaagtcaggaaacaaccgatgctggagaagatgtggagaaataggaacgcttttacactgttggtgggagtgtaaattagtacaaccattgtgggagacagtgtggcgattcctcaaggatctaaaactataaataacattcaacccagcaatcccattagtgggtatatacccaaaagattataagtcattctactataaagatacatgcacacatacgtttattgcagcactgttcacaatagcagacttggaaccaatgacttcgtgtcctttgcagggacatggatgaagctggaaaccctcattctcagcaaactaacacaggaacagaaaaccaaacaccacatgttctcactcataagtgagagttgaacaatgagaacacatgggcacagggaggggaacatcacacaccagggcctgtaggtgggtgggaggcaaggggagggatagcattaggagaaataccgaatgtagatgacgggttgatgggtgcagcaaatcaccatggcacgtgtatacccatgtaacaaacctgagcgttctgcacatgtatcccagaacttaaagtataatttaaaaagagaaataaaatacattacataaagttatagctgccataggcacttattcctctgatgaatctcggaaaagtaaattgaaaaccttctggaaaggatttaccattttagatgccatgaaaaacattcctgggaggaggtcaaaatatcagcattaagaggagtttggcaaacgttgattccagccctcaagaatgattttgaggggtttaagacttcagtggtgaaactgcagatgtgatataaatggcaagagaacttgaattagaagtgaaatctgaaaatgtgactgaattgctgcaatctcatgataaaatctaaatggatgaggaattgcttcttatggctaagcaaataaagatgttttttgaagtgaaatctactctgaagaagctgtgaacattgctgaaatgatgacaaaggatttrgaatgtttcataaacttagttgataaagcagcagcagggttttagaggactgactccaattttgaaaagttctactgtgggtaaatgctatcaaacagtattgcctcctacagagaaatcttccatgaaagggagagtcaatgtggcaaacttcgttgtcttattttaagaaattgccacagccacccctaccttcagcaaccaccaccctgatcagtcaacaaccaacaacatcgaggcaagaccctccatctgcaaaaagattatgacttgctgaaggctcagatgatctctagcaagttttacttgtaaagtctttttaaaattaagatatgtacattgtttttaaacataatgccagtgcacatttaaaagactccagtatggtataaataaaactcttatatgcactagaaaaccaaaatttcatgtgactattgagttatttgctttattgtggtggtctggaactgaatatctccaagatatacccatacttaaaatgctcagaggaagaagaagttatcaaccaagagttctgaatcagttaaaacattattcagaaatgaaggtgaaataaacacattcccagataaaccaaactgagaagactcagtgctggcagacatgccacacaagaaatggtaaaaaagaagtccttcagacagaargaaaataacaccacatggtaacttgcatccataggaaggaatgaaaagcactaggaatgtaaatatgtagataaatataaaataacagtatatatgtatatgcacatacacacaaacacttctcttactttacttcaaaataaaaatttgtttaaagcaataattataaaactgtattgttgtatttataacacttatagatataaaatgtatgacaaaaatagcccaaatacaaggtgaggatggagcaatattagagcaaagttgtgaartcttaccacaattaaatcagtactaacttaaaatacattatgataaggtaaagatgcacattgtaatctcagtaaccactggaaatatgaacatctaaataagaaattactaaaaaatgttatgagaggaagtaaaatagtgcaaaaaatacttgtttcccacaaaacagatagtaaacaagaagagcaaaaaagcaacccaagatgtccaaaaatagctgccatatgaaaatgacattatatgtgaatgaactgcacacttcaatcaacgacaacatgattatactagattttaaaaggcaacatctaagtatactctgtctgctagagataacttttagactcaaacacacaataggttgaaaataaaaggatggaaaaacatatatcataaaaatagtaactgtaagagaatagggataaatatattagtaccagaaaaatacactttaagatgtagaataatccccaaaacaaaaaggtatatttcataatgaaaaaggggctattatatcaggtaagaaataataattattatatttatatataatataattgtcaatattaattatgtatatgaacttaatttaaaagcccccaaatactgaaagagttgaaaagaaaaacaggcaatgcaacagtagagttgaaaatttcaacactcctctcttcttaatcgatagaattaaacaaaaagtatgtaaagatacagaagacctgaataacccaactaacttgaccacctaacatctacagaacactccattcaatgacaacaaagtattcatggaccattctccaggattgaccatgtgttatgcaataaagtaattatcaattcatttttaaaaattgaaatcacataaatatttctcaaattaaattagaaatcaacaatagaaaaaagtttggaaataccacaataggtggaagtaatacaacacacctccttaaaaaaatttttaaaaagactctgacaattcaacaaaatagccctaaataactccattaaaaagtgggcaaaggacatgaatagacatttttcaaaataagacatacaaatggccaacaagcatattaaamaatgttcaacatcactaatcttcagagaaatgcaaattaaaaccacaatgagatatcatcttatgctagttagaatggctattgttaaaaagtcaaaacataacagatgttgaaaggatgtagaaaaaagggaaggcttatacactgttggtgggaatgcaaattagtacaacctctgtggaaaacacagtgaagatttctcaaaaaactaaaaatagaactacttttcaaaccatcaatcccactactgggcatctacccaaaggaaaagaaatcattgtatcagaatacacctgctcatatgtttctgtttattgcagcactattcacaatagcaaatatatggaattaattaagtgtccatcaatggatcattggataaagtatggtgtgtatatatgtgtataaatatacaacaaaatactattcagccataaaaaagaatgaaatcatgtcttttgcaacaacatggatggaactggaggccattatcttaagtgaaacaactcagaaacacaaagtcagatattagacattctcacatataagcaggagctaaatactgtatacacatgaacatagagtgtggaataattatgactgatgaagtgaaggaagggaaaggagtgaggaaagagaaattacttaatgggtacaatgtacaatatttgggtgatggttacacgaaaagcccagactttaccactacacaatatatccatgtaataaaactgcacttataccccttatatgtatacaaatgttttttaaaagaaagataaaaatgagaaaaagaagaaatcaaaggaaaattacaaaataaatataaatccatgcatttacagccaattccattttttgacaaagacaccgggaacatacaaccgggaaagaacagtctcttcaatatgtgttacgagaaaactggatagccacgtgcataagaatgagactagacccttgtctcttaccatacacaaaaatcaaatcaaaatggattaaaaacttaaatctaagacatgaaactacaaaactactagaagaaaacattgggggagaactccaggacattagtctgagcaaagaatttttgtgtgtaagacttcaaaagcacaggcaacaaaaagaaaattagacaaatgagattacatcaagctaaaagctttctgcacagcaaagaaacaataaacaaagtgaggccataacccacagaatgggagaaaatatttgcaaattatccatctaacaagagattaataacaagaatatataagaagctcaaatagctcaatagcaaaaaaaaaaaaaaaacaaatccaatttaaaaatgggcaaatggtttgactagatatttctcaaaaaagacatatacatggacaacaagtagatgaaaaacattctcaacatcactaatcattagagaaatgcaaatcaaaactacaatgagacatgatctcacccccagttaaaaagacagggaggaatgcatgctagcaaggatgtggagaaaggggaatccttgttggtgggaatgtaaattagttcagccactgtggaaaacagtagggaagttcctcaaaaaactgaaaatagaactaccatacgatccatcaattccactgctgtatttatattggaaagaaagaaaatcaatatattgaagcagtatctgaactcccatgtttactgcagcaccatttacaatagccaaaatatgaactcaacctcagtgcccatcaatggatgaacacataaagaaaatatggtacgatacacaatggaatattattccaccgcaataaagaatgaaagcctgtcatttgcagcaacaaggatgtaactggaggttcctatattaagtaaaataagccaagcacaaaaagacaattattgcatattctcactcatacatgtgggataaaaaaaaaaatggatctcataaagatagagtagtagtggttagcagaggccaggaagaatagggggaggggagaatgaagagaggttgattaatgggtacaaatgcatacctagatagaagaaataatacccactgttcaatagattagtagagtgactagagtttacaataacctattgtgcatttcaaaatagttagaagagaatgattcaaatgtttctagcacaaataaatgacaaatttttaagatgatagatatcccaattacactgatttatctttaaacattatatgattgtattaataatcacaggtgccctgaaaatatgtatatctattatgtatcaataaaaaatagtaaaattatttgaaaattagaaaatagtttggtctaagtgaaaatgaaaacataatatattaaaatctattgaatgcagctaaagcagtgcttatggaaaaatttataactttaaacacatattaaaaagaaaaatctaaaattaataatatgtttccacctcaagaagccagaaaatgaagaatccaaagccaaaatgagtagaagaaaggaaataataaagatcagagcagaaaatggtaaaataaaaaacaggaatgcaatagagagaatcgatgaaaccaaaatatagtccttttgaaatgatcaataaaattgataaacctttagctagatcatttaaaaagaagacataaagctaccatcaaaatcaagaataaaacaagacgggacatcactgtagacccaaaggaaattaaaaggatcataaggaaagatcgtaaacaattttgtgccaagaaggtagagggagagtttagataaaatacacaaattctgaaaggagacatgatttaagaaaaaatagaaaatgtgaatagacctataccaagtaaagaaatggaattcataattagaaattgtattcgtttcctagggatgctataaaaacattaccataaattaggtggctgaaaattacaagaccttatcctcttacaattctgaaagctggaagtctgcacttaggtgtccacctctttctcctagcctctggtggttgccagcaatccttcacattccttgtcttacagctgtgtaactccagtcctacccacatcatcccctggccattttccctctgtgtgtttgtcttcacgtggcattctcttctctgagtgtggttctctcttcttagaagaacactggtcattttggattaaggaccactctatcctagtattacttcaccttaactaatacatctacaagaaccctattttatataaagcacattctgaagtcccaggaagggcatgaattttagggcactgttcaaccaggtacagaaaatcccaagcctagatggcttcactagtaaactctgtaaggtacttaaagtagaaataatgccaatccaacacaatttctttcataaaatagaggaggaagaaacacatttcactttattttatgtttttctgtcatgtaaatccagacagagacatcacaaggaaagaaaataacagacttttataaacagatgcaaaaacccttaacaaaatattgacaaactgaatccagcaacatgtaacatgaataatataccatgaccaagtagagtctatcctaaaaatgcatgcttatttaacatctgaaaagcaattaatggaatgcaccaaattagtataatagaggccacaattacattgtcagcccaatagaagtaggaaaattatttgaaaaaatttgtcacccatttatgttaaagtctctcaacaaattatgaaagaaaaggtgacttcctcaacctgataaaggacatctatgaaaaccctacttgtgactttttgtatttaatgatagcagactgaatgcttacctcctaagatcaggaggaaggtagaaatgtccattctcaccacttctagtcaacattgtactcaagattctattcagtttaataaaaaaagaaaaataataaaggcatgcagattggaaaggagtaagtaaaactgtattgtcagacaacataatcctaaatatagaaaaatcctaaggtatctacaaaaaaaactactagaactgataagcgagtttagcaggattcaaaattgatatacaaaaattgatttttttttttttctggagacgtagcctcgctctgtagtccaggctggagtacagtggcatgatctcggctcactgcaacctccgcctcccggtctcggctcaagcaattctcctgcctcagcctcccgagtagctgggattacaggcatgcaccaccatgcccagttaatttttgtttttttagtagagacggggtttcaccatgttagccaggctggtcttgaactcctgacctcattatccacccgcctcagcctcccaaagtgctgggattgcaggcgtgagccaatgcgcctggcttgattttttatttatattagcaccaaacgtttaagaattaaaattaagaaaacaatcttactcataattaataaaaatacttaggaataagtttaacagcagaaacgctattactctacactgaaaattacaaaatattgcgaagagaaattaaagaaggctttatggaaatgaagaaatgtgtcatgattcaatagtgttaagatggctgcactctccaaattgatctatagattaaacacaattctaatcaaaatcctaataggagtttttgtakaaattggaaaactgattctaaaatttatgtagaaattaaaagaagccagaacagccacaattttgaagaacrgtrttggagaatttacactacctggtttcaaaacttactgtaagtactacagtaactgatacagtgtggtattggtgtggggacagacacagacaagtgatacaaaataggaagcccaraaataaactggtacatttataggcaactgattttcaaccaagtttcccagataattcaatggcaagagggtagtcttttaacaaatggttatggaataatgggattctatatgtaaaaaaaggatgagggagaacttagatacttatttcaaacctcacacaattgtgaactcaaaatagaatatagacctaaaggtaagagctaaaactataaaacttctaaaaggaaatctccgtgacattgaatgaggcaaagattcttagcactgtccaaaaggaaatgttgataagttgtactttatccaatttaaccactttgctctccggaaagcatcattacaaaaccaaaagattagccacagayttggaagcaatacttgcaaatcccatagatgttagtatagcaatgattgttttaattaacatgattgataattttcaatttggaaggatgctgttttaatatatgtagtgtggcacttaggagaatataaattttaaagtaaaatagttcagaatttgaatcactggttagccactgctgatctgaaaggattaaagtacattgyttaacctttctgggcctcagatttctaaggaaatgtggaaagaagcaatcttatgagaacattgtgaagattaaatgagacagaatttgtaaaaaacgcctagcagacagcctgaaacacaaaatggtattctagaaattttcatatttcatgttgttccaaaatgtattaaggtagaaggcagctattaagaarcatatttaataagttatgtttgataaagtagaatttgcttttttctaattataaaagaatgcatggttttcacagagatttggatatagaagagtacttttaaaaaatataatcaattgcaattcccaaatcctgatgatcactattgatattttggtattttggtatattttctttcaaaattgtctaggtatacatttgtgggctttggatcttcttctattcttttgktatatttctaaatttgaacagttaaatagacagtcaatgaaacaattgcgaaaattttggcagtagtaagcatttgttgtcagttgaaaactttccaccttagcaagtaggtttgtgtataaagacagaataatattgggcagagtgtaaaattatttctctctctctctttctctccctctctccctatctatttacctatatatccattccatccatcatctgtctatcctctttgaaaccattcatccatcaatctatccatccactcatccattcatttttctatcatctatcccattctctatatctttttatgtctaactattggccttagaatgcaaatattgaagtgagttgaaaaatgaagttacattcttctgaaagaaaaaatcgattgattaatttctttaataataaaatatggatttgtcattttggtttatacagaggacattttttataacttgaatgaagtaaatctcagctccaacattagacaaaaatgtatataaagcacaccttaagataaaggattttttttaaaatatagtatagacaaaagtgtattgaaaaggacaatattttcattatccagttatttctgagtggttttttgttctgttttgagatggagttttgctcttgtcacccagactggagtgcaatctcggctcactgcaacctccacctcccaggttcaagctattcttctgcctcagcctcccaagtagctgggattacaggtgcatgccaccacacctggctaattttttgtatttttaacagggacaggattttgccatgttgggcaggctggtctcagactcctgacctcaggtgatccgcccgcctcagcctcccaaagcactgggattacaggcgtgagccaccacacctggccctgagtgcattaggctttcacagggtcttgctaagtaaaatagtaactgctataaatttttttgcatactccccccacaaaaaaatgagaaagtaaaagatgattgatttaacgtatttttataagtcrggtagtatctagttctttgcttccagtaaaatggaaggggaacttaatgaaattgtcagtttatagaccatttaaaataatgttcaatgatagttcactccaacatgtttggcatttacctcagaagaagttcaaagaattctgtgacattgctatatcaaaggtccttcaattctgatctatttattcaagtaaacatgtttctcagtacttacgtgtttaacaatgaaaaagaggaacaaaagtgatgctgaactttgtcactttacatgaataagtggtatttctcaacagacataggtaccaattaaaaagtctcaaaaatgtcattaagaggtgcaattccaataacattttacctttatcgcctaataatagtttatcaaattggcaatctgttgcttagataagctatttttactaacaaagaaagctcaatccagactccagacttgaagtatcacaggaaattaaaatttttaagttttatacatgtttttagtattgagatcaatactaatactttattgatcaatagtgtgatcaaaaaaaaatttcaactataaaaatacattaaatttggataaaattctgtggttgaagaagaattcaaggaggtgggcttttcaattcaagaagaggaattatcaatgcaaaattaatcagtgtgaaataagattaaagtctcatttttaagtggatgagaccaggtagaagtcactatagtatttagatacctttggatacacatagaaggttactgtaacagttccactgtaatatttacagtctgtccaaatttatatcttttgtaactagatagatatccattaataatttcttgatatccattaaaatgtgtaagtttgtagtttttcaaatttattttagaagatacagagcaaaacattgaaaaccattagttcacagtccgcactctagactacttcttgaagcctatagtctgtagtatggccttcaaggtgcttcacaatctagccccttcctacctctctcactcttccattcccactgactctgaattttagccttggccaactcttctatttcttacctccaattcttaaaaaatcctacactttttttaagagtaagaaagctttttctcctttttctgatgaatgagttcctcctatcccttaagactcagctcctctgagaggctatcactgagaggttacaccagtgtgtccccaaagcactaccaggttcctctatcacaatacttacgggtttctgggattgtttatttagatatcagtttgccccacctgtctgtgacttcttttattcatatgtgtctcttcaagcttctgggcacatagtacgtgctgaaaagtacacgttgaataaatgacaggatgaatgtgtcctgacatcttcactttcatttttagtatatttctaaatcagctaaaccagtcaccttatgtctcttaacacagcctgctcatttcttctcaygccttgcttgggctytgctcacttatcaatgccctaagcctttgttttcaccactaattgcccaaaacagtgcctctctggttgacaatgttcttggcaacgttggcaattttgaacccactgagcattttctcataaaaaaaaaatgtttcaagyagtagttaggttaggccacagagtctaatctactcaaatgtaatgaaaacactagttgtctgcaataaaagaagattcagccctatgaaagtaaaaatgttgttgrtaatgcaacatatttttcaaagatgagcttctgtgcctttatttttcaaagagttcgtggagaagatgtgtcttccctgtggtggccttagtagacgggagaggaactaatgtttgctaaatgcctgctccatgccaggcaccatgtgcattttatgtgtggtatcacrtaagcctcatgacacttttgccagatgtacagatagcctttgctgtattacaaaccaccccacacttacacaaccatcatttatgagcccaagatattctgtgagctgggcacagttggataattcttcagttggtctcctggggctcactcctgcagctgcgctcagctggtagatgatgaaatggcagggacagggtgatctggaatgatctaggtgatctgctggctgaagcacctcggttttccgtcatggggcctttccagcaggttggctcaggctcacagctgcagtgtcaaagagggcaaaagtggaagctgaaaagctgttggaggactcagttacaatctgacacactgtcccttccttcacatactggtcaaagcaagtcacaaggccagattcaaagggctgggatatagacaycatcacttcatgggaggaagtgcaaaaactatgtggctgtttccaatataccaaacaaggggcattgttattccattccatgggtgccaaaatcctaccaaatgcaccaattcataagtaatagaaggggtatttgagtccaggtctctctgacctcccaattcttctactctctactataccagagcaccttaggtagccttccttttcctcctttccattctctttctcctcctttgtctctctctatccatgtccagactctaagatgaggaagcagaagaaagaaagggtaaggtgcaatgagattcacaccggcgttgtgtgccatgctctctgagtaactagcatcttagggaaacaaggccagcagtaagatacattttaggtgattatttttacacctttctttcttcttttcttttcaccaaatattgtgttcaagtctcaatttcccctgttactagctgtatacttggcaaggtacttatccactcagcctccatgtgctcatctgtaaaatgagagtaataattcgtagatctatgagttgttgtgaagtttgaatgagatrataatatatgcaaaaaacattttgaaaaccgtaaggtacactctagcaatgtgatgaattattcatgcttctactcagggtcaaaaaggaagtatagtcatgctgactgtggctctgacaactgccaggtgctttcaaggcttttcagcaaagtgtgggtttcagacaaatgggaaatctaatagaccactctctgcagttggctgtatttccagccagcacagatatgattataattagagtttcaagagcctgtttcacatcaaaaggattccttggcccagtctgcagtctacctgaggtatgtggccagatgtgatccctctggcagctgtttttattcgggcccatttgcttcytttcctgtgctaccaggagtgtctgtttctattgtactcattattttcagataccaggtgagaagagattttccatatgtgagatttcagatggtgaccactgagcaaaatgcatagctctcgccccctcttctcacttcctaaatgaacagcaactctgacaaattcactttaacagagccaggtcttttattagcagccagagaatagtctgtaatgggaggaattactctgcccgtgcatctctcccaggaaaaacattcgttagcctgtcaaggaagcgaaacctcttattagaaactgtagaaaagtcagtttctccatttttgctgctaaaggattcagaacacatctcactgcacacctgaaattaacaattcaactggaaggggaggtgagcccactggagacaggcggaratggctgaatgarcaggactccagatcagagctgagcccaacctgrgtgttcatgatttcaaaccccattatggcctttcctgcagggtccttttgatcatcataactcttcactgggcaaagtgacgatagcggtaagactcacccagtgttcagagacagataatttttttttgcttctttttatctagctaatgattttccaattttagccagcagtgctgagaagccacaactgtcgtaagagtccttgatgggatttctctgagtgaaattcagaagaaaagcccatatgtgtaagtacaaagaagcaggctggtttcaagctgccccattcgctttgcatttatccttctaagccacggattaaaacaaatgctaatgatggagttgaattttcagggaaaggaaacagcatccaaggtttatgatcactggggtcataggaatggagactcctcaaggacgaattccaaggaaaggtcaccttatgccctacgatcacccactattcctgctgcaccaaactattgttggttttcaattcttgcatctcatcaagtctattatgccattgattgcaagaatattattttaggtattagtgagaaaagttgctgctaattaaagtgagaaacatatggagaaatataycaggctgtttcrggccaccragtcttttttctctcttgggagtgcctcttctctcaccagctcttctcctgcctgttatggtctctccaaaatcacatcttccctagcttttgactggtatttaccatccagttcatgtgatttttggaagttcattgtgagcttcctgtgaacaaagatcatattctattcaccaggggcccatcaaagccgtgggaggacacaatgctccagcacttctaccccttcagccacttgaggatgcagcagaaggtgccatctatgaaggagagagcaagccctcaccagacaccaaatcagctggcgccttgattttaaatttcccagcctccaaaactatgataaatgaatttctattattagaaattacacagtctcaggtattttgttatagctgcatgaacagactaacatacaacccagtctccaccatattcttccttgattgtgagcagcagcacatcatgaccacttgctatagaagctgctgtttggctctagagaggacactggttgtttcatgccagaatgaggagtggagccatgtccacaagtggagactggaacagagaggaagcaacttgggtgagatgactgagctgggaagcaactaaaggtgcatccattagccctttgctagggagcccccagcaaccaaccactgcagtgcaacttatgtggctcttcacttgaggccaggagttcgagaccaacctggccaacatagcaagacctcatctcatatatatctatatacacatacatatgtgtgtgtatgtatatatacatctatatgtacatacacatatacatgtgtatatacacacaagtatacccatatacatgtgtatagatacacatatacatatacacatatatatatgtatatatacacataaatatatgtgtgtgtgtgtgtatatatatatactcaaagtctcttgcctttattctccaacccaggcactgtgccaggaattcagagttagagatggtaagaccccattcctgcccttaaggaacatatggtctaactctaaactcttagaaataaattttcagaaaggtaggtaccttgttcaaagtcacaccatttgtaagtggctggtccagtacttgaactcaagtttatgtcaaagcctctctctcttcaactacaccatactgcaccctcttatcacagcaatataattacttatcattattttttagttgtagttattaaaatttatttagctctctaataatttatttattatcagagacataaactagggtgtaaaagtacattattaatgccaaaaatatttacttgtattaaatgtattggatatattcataataaaagtgaaattggttawctctgtctgggtgggttgagtgatgtttattatcttttcttatactgttctgtattttgtaaaatttaaaaaataaggttgcattgtgtttatattttttgaaaagttattttttaaataaaacaaatatatatgaaaatgcaagaccataaagtgctgataagcgtcagctactaaattaattgcaatgtaatgaaatcctcgagtgccatgcattwggttagaaacacagccaatcaaccttgataattaatggtgatcaatgcatccttaagtaggtactctcagagcccaggaagaccgtggtaatccagatttcactgtcagagatgtggtgaacctttctctttgtccagagagaggggacagaacatcgaggccaaaacaccatcagatattgcagcatctagaaagtagaagactctcgtttcttcactggcaatctctcattttatagaagattttacatctttatgtataggaatgtccaattttattgttcatatccgttatcagccaccttccctcaaggaatcctgctgggaatttggtttaaatgacaccacgtatgtaaatgtgggtctctagctccttgcattgatggacaatcaagagcctactgctggcccaggctccttggaacattttgtaggacataaaccttcctttgcctccttagaaatgaacctctgccagcaagtgtccactcttcttactgcaatgagatctaaaaatttcttctcacatacttactgatctttgaccaaccacttgtttatacgaaaaaaagagtcccttttctttggaaaaaaaaaaaaaggtttggttttcccctgctgctcagtgagttaaggcaagcgatagaatcttctaggaatgtcagcctaggagctctaggcattcacacttaccacatatcaaagtaacagaaggaatatattcctaacttaatacaagtgtccacctagacacttatcatgttcctgcatgctttcaagtagtatgctttatagctgtgaggcaaaataatattttacagtgtgttatgatttcaaagacacactcagtctcacttttatctcatttaaccatcacagcagccctatgggaaacatattacctgcytctcaaggaggaaaccaggttcagaaaggccacatggtgagttcaagattactaagtcaggagttaatcctagatctttcgacttcaaatgccaggcaatttccaccgcttttccaaaattaaaaattttatcctggattctccttctaccaagcgaatgtgtaggatgggaacaatcctattctgcagccatctactgcagaaaggagagaaagtgggggaggagagaagctaatatctattgagcttctgctccatgtgggctgttttccttgcactatctcatttaaacatcatcactttctctgttttggaaaggttggccttcttaaggacacacacacacacacacacacgcatcctttctttctcctgtccctccagttcagttttctgtgtgacacagattacatgttcttctcctccctggcagggtgtgtgctggtggtgtctgtaatagaacagcttgctcaagttcacaactcgacggtccaggcctcgatggagagactgtgcagctacctgcctggtaaatatgggacgagtcatactgctgagggtctgcttgtcctctcactcatgagtcatgatgactgcctttacttcctgcccacacttacagagaagaatctgattatgctatttctgtgggttgatattcttgtggggcttatagaaattaaaaccaaaaaaaaatgctctgggcaacttctccctgacattcattttccatcatggcacaatgaaattgctgtggacccttagggaataaaatgttgaatggccaattgttgtttgatgtgttacattaataataatttgcctacttactgatcattgccttaagtactaagaagtcaaaataatgaataacttccaataattttgtgttaacttgaccaacattcacataccaagatgtacacctagccctaccaacacagaactttgggttgagaggacaactgatctcaaaatttcaaatgggaaaataatctagaacatttcattaatttaaactagatctcaataaaataccttatacatccaccaaaggtagaaactgattggtggttcaagcaagttgcatatttctttttcaatattagtagaaataaaatattaatcatatttccattatagaatactgttacttgaacagtcgtaatgaataaacttctttgacagtcaaatttttattcacttaatgggaactaattcatctagggtgcctacattattttttctgttaagtaaggtagttggaataatggcaattgtatctttgattgacacagtatgctgtgccaatagcatcaaagtcttttcagagaagttgttccgtttagtcataatatgcattcacaggctaaaatgtttagaattcaaaaacaaagactgggagaggataatacacaaacacaagtgtttagaatgtcccaaatggaccattaagattttaaaatattcacatcataattacatctttcttttgtgaagttaaaacatggcagctaaacttcagctttcccttcttccagttccattctcccctgccccacctccctagaaggaacccttcacatgaacttaatgggtatcattctcatcagattttatatttacacattcacttgtatggattcatgrataatgtgtaatattgttttgccagtaatgtttttggtttttctttgtaaaaacaagacaactgtagaaaaccacgcaaagcaaatgtatagcttcatccgttactgaaagatgaatgccctaggaaacatagcctgggtcaagaaagaacagatcagtggcctcccctgaagtcccatccacatgctccatcccatcctccccctgcaaaaagctcaatgtgctgatttttatggtaaaattattttatttatagctttatcactcagtgagcatccctagatatcgtaaccttgcccggtatttaaatgtttgatgtgtcttttgagtctattttaatctataagtttcctttccaccccttcctttttcttatcacttagttgtggaatttgacctgtagagtttcccacagtctggatggtgttgattgcattcctttagtataattgagtatgtttctctgtgctctgtatttcctgaaaattggcagcttgatcagaggtttgatcctattccaatctgatttctttgacaagcctataaatgatattgttttccttcatcaggaggccgccataggtgcttttatctttcatgttttcttttctctcttcttcttcttcttcttcttcttcttttttttttttttttttttttttttttttttgagacaaggtctcagtctgtcgcccagggtgaactgctcactgcagccttgacctcccgggctcatgagatcctcctgcttcagcctcccaaggatctaagactacaggctcacagcatcacaccagcaccagctaattttaaatttttttgctgagacagggtctctctgtgttgccaaggctggtctctaactcctagcctcaagtaatctgtccatcttggcctcccaaagcgctgagatgacaggtgtgttgtgagccactgtgccaggactttcttttggtgatggtcgcagctgtcgatgttcaatgatgagatctattaatttatttgggttttaaaactgtgatattcttatctattatttcttatttattaattgacatataatggacacttctcacatcatattttagaaacatttttcccacagtacttagtggaaaggcatctaggaaaggcaggataaatgcttgattcttttcttgtatcagttttcaaggtagtgcattggttttctgttatcatctcacagcaagcagttagtttttccttaaaatatcatgataaacttatgaacttaaacacacctgatgggtttcagtcaagtgcaattattatccttttgaagctcagatgatcccatcgagctttgaccagtggcacctccttcaagctgactcaagtcctttgcacatgagcctcagtaaccttcgatagtttcctcactaactggtatgacaaagtgttccagccctatctggtacatatcaagcctgaggcttgaaatcagtcatttctcttaaaagccctggtttcttttagtgagaaataatgtttcaacrccacaaaccagatgcttaggaatgttcattgttactgagttggccactctttttttttttctttttgagacagagtcttgctctgttgctcaggctggagtgcagtggctccatcttggctcactgcaacctctcccacccttgttcaagtgattctcctgcctcagcctcctgagtagctgggattactggagcccaccaccgcacccggctaatttgagttgcccattctttctaggccttttcagtggacagaaataggaaacatgtatatacatttacacatgtcagctttaagataaaatatctgagttcatactgacacttcaaattcaagttcagaaccacaatatttttttcttaatgtcttctgtattatatctgtatctcctttccacacaaactcccaattgtcaagcacaaagggattgatagaattaaaatctccaatcattactcatttacctatccttccttgcacataaaacagtctcagaatatcaattctaatgataccatcattaatatattttctaattcttatgagcagttaaaattgtttttttgcatatgcctttcccatttctccacccttttgaatcattgtcctaccttatctgagcatatagccactacatataacacctattcccttttcaccctcatttagtcttagctgcatcagcaactgtatgattaatgttcaccaccagcccttctatgaattctctctctagttgaattgttgtctaaagttcattcctccagaagggctcatagctacaaatattccttgaattcttgcatgttgataacaggctgtctgcgccctttatacttgaaagtcaatgcttttctgtatataaaactccttggcacatgatgtctttccctgagcatcttaaatatagtattcaaaagcctattgataatctaatttaccttgtccttacaagttatttgctgtttatactttgaagttcagaagatttyttttctataaaacttagtcatctaactagaagataatttggtgccagctgttgtgtattgatgttctcaggcatgcagtgtgctctctcartgtgatttcaaatatatattttctaattttaggaatgttttagtgtttgttcggtttccttgattttgtttttttcttctgggatttctattatccacattttgaatcttcwttgcctgtctttgctattttgcctatctcttgaatttattttaatctctttatttatttttatcttaaaatttttcctcctctctaccttctatttcacttaakacctcatctactgttttcacttgttcttgtattcattctagtttagacttcacttctttattctttatttcatgttttattttttcctgagttcttttattccatatctgagtttttctaattcttattcttgctattttttcatgtcttatatcattttattaatgcctcttagctcattttaaaataatatgtttagaaataatatcttatgttttaatccttttttggcatgactttctggcatgcttttactatctgtagggatgttattctgttccttaatctttttcttcttataataactttgtatgggagttgacctagatacatttctgttgctcatttttatgtgaaattagttttcaaaaactcttagaaagagaggcggttcggggtagtttttctaaatgcacagagctccttcttctgttgttttggggtagtgttaaaaaaaaattgtggcagcttgctttctgagatttttctntttccctatttactttcatctggactttctctatccccaaaagttactcctcagtgtgggccttgccctggaagggagctccagtgggtcccttgtgggtgccasatgactctagccactaattccttctagtcttgaactctttgcattcaccagctattgattgggcaaaacccctccccgtccagtggctgttctctaattggcctgccatgctttctgctcaacacctgtcagctatctggggattctcctgttctcagttttatctgtcatccattgcttccctctacttyctccctcacagaagttgatggcccataggtcttgcagttgcgaagtggtttattctcacctaattgcacattggggttcatggatatacctagctttgtggtaactgctttctgagggttttcggtcttgctattcaggtactcttatttatttatttatttrtttctggagacagagtcttgctctgtcacccaggctgaggtgcagtggcgcaatctcggctcactgcaacctctgcctcctgggttcaagcgattctcctgcctcagcctcccgagtagctgggattatacccatcaggatgcctggctaatttttgcatttttagtagacacggggtttcaccatgttggtcaggctggtctttaactcctgacctcaggtgatctgcccgcctcggcctcccaaagtgctgggattacactcctttttcttttgtagagattcaaagagatttcaaaattctgctgcctccaccacmatctttccatactcctcccttgcgaaggctttaatttgacatcaatggtctactgtatgcattgctcagcaagtttttttttcacgcaacatgattttaagatctatacatgttaaggcatataggcctaggtcaagtctcttaattactctatacttctttaccatataagttctatattttatttgtttattcctctattgaacattcacaatttgttataagctttactttgtattttcacatctccragttacagaagaagaagaaaaatattattactattttacagaaggaaaacagtgaagaacagtcacagttatcattaagctttgttttaactggttgcctttctgtgtgatagacagcattggcaggtataacctcaagttagatgttctcttttttggcaaagttgcgtcgtccgaaggtgaacgaccgactaaaaatcctatttcctagattattccctcttcttaatatactarcaaaatataaaacaacccaaaacaagattgctggttcaaggtaccatcttagcttcttctgacttcgaacaggaaatgtcagagcctggtaagatcaagtgagaggctgaaagtcagattctggtgaagtggaaaccggtatctcaccaagggaaacakgataaatattttggttttcagtgatgggttgccttttcaactggagcaattttaaaggattaagaaggttattgggagttattttcattttatcaattcttgttttacctccagctgaaaatagaacactcagttcaggttaaaggacaccatgggcagtattgcttccattttatggatgagaaaaacaagacacagaaacagaatggttatgtcagttgtatggggtggcaaagatagacgttctcctagctaaggatttctcctggaagacataataggcctgacccacagtgcctactgggatccaatattgcattgccttctgtctggtaggccaggtgaatgggggacagaaggatatgaaattaagcacataaacacacaattatttttaaattatttttcagtgaagtattactttcacctccaaagctaaaaaagtacaaaaaacaaagttttagcagggaaatcgcgtaagcaccattcttgagaataatctcttagtaaatcatgttgcctttccctgtgccctataagacagtttttttctaatcgtgcaaagcatttctgaccctcagtttcatccactgcttttgcctctggctctcattaggaagcaccttggaagaatctcggaattgttaatggaaaatgattaatggaatcattctcactagtcaggggtcaacagaatcatatgccctgagagtcttgctacaagttcactttcctgggtcacctatgcagaaattttatctctgtggaatataattgttaaaaactcatgtagtcttaaaagaaagaaggcacttcatgcctactctggaggttctgaaagtctgaatgcatcccagaatatgtacttataaaattgtgtggttggccggttgtggtggctcatgcctgtaatcccagcacttttaggaggccaaggcgggcggatcacaagrtcaagagatcacgaccatcctggccaacgtggtgaaaccccatctctactaaaaatacaaaaattaactgggcgtggtaacatgtgcctgtagtcctagctactcaggaggctgacgcagaagaattgcttgaacactggaggtggaggttgcagtgagctgagattgcaccactgcactccagcctagggacagagcaagactccgtctcaaaaaaaaataattatgtggtcccttggtggcactgtgcttcaagtttgtatataataattatacatatgtaataatgtatacatattatacatataataatgtatacatattatacatataataatgtatacatattatacatataataatgtataacaatatctgctatacttgaggtagataaggcatcaaataaaatgtcctaagcacattgaaatgtatactacaaataacaagaccttttggagtattttaatctcagctgaaccacttgctatgttgtgatcttaagctctctaagtcttaatgttcttgtctatagaatgaggataaaaataattaccccctcaaaagattcttttttttttgaggcctcaatacttttttttatttttattttttatatatatatttattgtactttaagttctaaggtacatgtaaactagttcaaccattgtggaagacagtgtggtgattcctcagggatctagaactagaaaagattcttatgagaaaggaagtgatggtaaacatgaaggtaacttacaaattggaatgtcctatgttttatttacacatacatctgtatacacccaatgtatgataactacttaattggtcttattttaactttattttgtcctttggaatagccacattttcttttttcctatgctgttccaagtctcttttaatctgtagaaattaaatactcttgtatgatccttgtcacaggcagagtttaacagtataatttttactttagctaagctactgtcaatatgtaaatgccaaatttttcttcaggtgtatcagtaacaatcaggttaccatctgatcatggctgactggggatagctggctctttctggagattttgcatatttctgctttgtacccttacggattgctctcagaatttagctctcagagagcatttcctgtcccatatcagccattgctccaggggcctctcaagctaacaatcacagaagactaccggaaactattcaaatggttctgctcagggaggaaggaacctgcagccatcctctttgacttgagctaaacagaattctaacgcgcgcgcgcgcgccacacacacacacacacacacacacacacacacacacacacacacacacactgcttatcttaccagaaagaagatgaattttctctgcctttcagccagtattagaactttatcaaagaacaccctaatgtccatttttaaattgctctgctctaggctaagccagttctgcattagcagtacttttaacttttttccaaagctccttcatttaatttggaatatctcttacaaaagtccccaaacttagcagacattatagtgatagagaccaaatcctacacccacatttttcagatgaggaaatggaagtccagaaaggggaggcaatttctccaaggccagaagccagtgggctggtactgaatgaaatgcaggtcwctgagtatactgtgacatcagagcttcttgaccctctccacagtagcacccctaaaaaggatcccaagggagagggaatctgtatttaaacacttttattaagctacaattcacatactgtacagttcactcatttaaagtgtacaatttagtgactttcagtacagtcatagagttgcgtgttcatcagtcaccacaatcaattttagaacattttcattacaccagaaagaaactacatgccttttagcatccgcccccaaacacccactctttccagccctaagaaaccactaatctactttctgtgtctatgactttgcctgttttgggcatttcatataaatggaatcatacaatatctggtcttgtgtgactgatttctttcccttagcatagtgttttagagattcactatgttgtagcatgtattataactttattactttttacggctgaataatattgcatcgtataggtataccacgtttgttgatctattagctgataggtatttgaggagtttacatttcttggctattatgcaaaatgctgctataaatatttgtgtacacatttctgtgtggacatatgtttatatatatatataaactggatcacattgctggatcatatataaactggatcatattgctggatcacatagtaactctatgttaaacagtctgaggagctggtaggctggttrcaaactggctgcacgagtttacattgccatcagcattgtacaagcttttgatttctccacatcctcaccaacacatattattctctcttttattatagcacattatagtggacatgaagttgtatctcattttggctttgaattgcatttccttggtagctaatgatgttgagtatcttttcatgtggcttttggacattggtatatcttctttggaaaactgtctattcagattctttgtacatattttaattggactatttgtctttttattattgagttgtaatagtcctttatatattctagcactgtgataggtcatttgatatatgattggcaaaaattttctcccattctgtgggctgtctttttactttctgttggtgttctatgaagtgcaaaacttattgttattttaatgaagtcaagtttctctgttttttttttcttcttttgcttgtgcttttggtgtcatatctaagaaaacgttgcctaacccaaagtcagtaagatttatgccagtgtttccttgtatgaattttayggttttcactcttacatttaggtctttgacccgttttgggttaatttttgtatatagtgtgragtaagtgtccaaattcattcttttgcctgtggctgtccagttgtcccagcaccatttgttaaattcctccaatgaaatggtctttgcacttttgactaaatgttagggtttgtttctgaactattgattctatttcattgatccatatgtctgtctttatgttaataccatgctatcttgattacagtagctgtctagctttgaaattgtttcccaatgtcagtcctccaacttgttcttctctttcaatattgttttggtgttctgagtcgcttgacttttcgtatgaatgttaggatctgctgctcagtttctgcaaagaagttagctaggtttttggtagagatggcattgaatctgtggatcagtttgggaagaattgccctcttaacaatattaagtctgccaattcatgaatatggaatgtctttccatttatttaggtctactttaacttcttttaacaatgtagttttcagagtatatattttgcactttttttggttaagtttgttcctaagaatttagttctttttgatgctactgtaaatggaattgttttccttaatttcagtttttatttgctcacttctgctacatagaaatacaattggttttgcatattgatcttgtatcctgcagctttactgaacttatttatttgttcttatagtttttaatagattccttaggattttctacatggaagatcatatcagccacaagatagtcttacatctttactttccaatctgaatgctttttatttctttttcttgcctcattctcctggctagaacttataacgttgaataaaagtagtgactgcagatattcttatattttcctgatagtgaggggacagtatttaatttttcaccactaaatatcatgtaagttgtcaggttttttgtagataacctttattaggttgaggacaytcccttttattcctaataaaatcatgaagcagtgttatattttgtcaaatatcttctgcctatattggataatcatatggttttttttatgttgttgatatgggagtaatacattaactgattttcagatgttaacccaattttgcattcctgggataaatcccacctgatcatggtgtataatttctgtattgctggatcttatttgctagtattttgttgaggatctttgtggttatattcatgagagatttgggtctacattctttcggaggaaggtttctggttttagtatcagggtaatattaacctcataaataagttaagaaatggtcactctgcttccattttttggaagaattcttgataaattgttagtaattctttaacttttttgtagatttgccaatgaatcctatctggtgcagctagctggtcttaggctttcctttgtgggaagtttttaattactaattcaatctctttacttgttatatgtttcttaaaattgtctattcttgagtccatttgggcattatgtgtctttctaagaattttttattttatctaagttacctaatttattgccatgcacctgttcataacattccattataatcctttttatttctttaaggtcactcataatgtgaggacacagttttaattgcctacttcaaaggcacaatttatttatttatttatttgagacggagtttcactcttgttgcccaggctggagtgcaatggcacgatctcggctcactgcaacctccacctcccgggttcaagcgattctcctgccccagcctccctagtaactgggattacaagcacctgccactacacccagctaattttttgtgtttttaggagagacggggtttcactatgttggccaggctggtctcaaactcctgaccgcaggcgatctacccgccttgccctcccaaagtgctgggattacaggcgtgagccgctgcacccagccgagcacagtgtatttaaagtctcgtacttttttgtctaaaaagtcatagaatagatctattttaatacaaaaataatatttcacattatttaacattaagcaaaattgaagtaccagggagcattcccatatttatcttgtttcaccactccatcatccagcaaggcccgggcccccctatgtgagacacatcatgacaagatagattctccttaatcagggttttctagctctttccaggacagctgatctgtccctaactctgctaagatcctgagttgaattaccagggctccacaatagactcacaaactggagaaacaggaccaaagagctaacaagtttcattgggtggatagaggaactcacaaaacattcatgtgctctcataggtcaggggagattatgttgttagtaggagtatttgtgtggagtgtatctatgtcctgtgatgaaggtggcagtgcaggatcacctgtaactgtcatctccttttacctctgggataacaacagcaaaaactaaggaccccaagtgaagtattttcctttgaataaacaccagaaaagaccatttctaacagagctacatttcagatgattgactaatgcaagtctcatttctttcaacttcaacaaatgaggtcatagccaacattcaggtattccctgtagaaaaaaaagaaagaaagaatgaacgaaaaggaaaacccagcattaaactgtgtttttagaataaattggttatctttaacctggacggttaggtggcattcacataaacctgagatagaagtgatatttaatgcatacattagctgaaacatttccttcaaatccttaaaattaaattaatcataaattaatcactcagcttcasttcctagcaaagataatcattattaaggtgtgttaaattcgtcgcaataaaaatatattcaatttccctctttatattttttagaaaaactgttcttgaaaaccacctgctatttagtcattgacaagtttggatcagacatcataaaactgtgagtatgccatgacacataactctgattccattgctgggacatgggaggaacaagaaaactgggaggtgggaggctctgtgttcagcatgatgcgctttctggacagggctcgaggtgttattccagctcttagtaatagtggaaaattggaacctaatttggatccttcgtcactcyacgcaaaggctccccttgaattacagtgtggtaacctgtacttgggtgattgaacctttctcctgagccctctccgcctccctggattcccaggccacatcttctctccccacttagctggtttcctggcttctctccgcctccctactcccagcccttgctcctcgcattatcacagtctgctttttcttttactgtttttctttttttccttttttcttttcctgagacagagtcttgctctgtagcccaggctggagggcagtggtgtgatctcggctcactgcaacctccacctcccaggttcaagcaattctcctgccttagcctaagaggctgggattacgggcatgtgccaccacaccggctaatttttgtattcttagtagagatggggtttcaccatgttggccaggatagtctcaaactcttgacctcatgatccacccaccttggcctctcaaagtgctggaattacagatatgagccaccaggcccagctactatttttctttttttgagctcagggcactgaatcaaataagccctgtttctcagttcatggcagtctctcatcaatgatccatacatggctgtcttacactttttatattcttatttagttactttgaatactgaaataagctcctgaacccaccacccaaaacagtctaggaccttgaccataactttctctgctcctatggtccctcccctttattctcaggcttttcccacccaagtgagcatcatcctaaattccgtgttcatccttcttctgctttctataaaaaaaattatggaggtttttctatagttttattatgtataaaatatacaaatataaatcattcattatcatataatacatgttattataaacattttataatttattacacataaattatatgtttaattgctttctggttttaactcttgtgaacagtactcctaggaacattctatttttttttaactttaagttctgggatacatgtgctgaacatgcaggtttgttacataggtttacatgtgccatggtggtttgctgcacctatcaaccygtcatctgggttttaagccccacattcattaggtatttgtcctaatgctctccctcccctttcccccaccttctgacaggctctggtgtgtgatgttcccctccctgtgtccatgtgttcgcattgttcaactcccacttatgagtgagaacatgtggtgtttggttttctgatcttgtgatagtttactgagaatgatggtttccagcttcatccgtgtcctgcaaaggacgagcactcatcctttttatggcttcatagtattccatggtgtatatgtgccacattttctttatgcagtctatcattgatgggcatttgggttggttcctaggaacatccttacatgattcctcttcaaggggccattagccttacagcagagatgttcacaagacagcatcccccctctacaacagggtagcctagagtctacaacattttaaagacagaaggaacttaaaatcatacaggcagggaggtcatcagtaatctgtcatactgtgcatctgcctctcttaatagcgatctcgctctgttgtggcaaacaatttttcataacccctgggctgtgtttggaaggcagggaccctttattcttagctagtgccactattattgccactgcctcctaacaggactccaggcctacaaacttgcccattgccctgcaatttcataatctacattatagctagactagtatgttttaatgcaaacctaactatggtactcccttaacgtaaaattattcgaagtcttcacatcctctggaggactcctagccccatacacaaggctcatmaggaactggtttctgagggcatttccagactcaccccttgccactccatagcacactacacttcaaaccacttgtagtctccccacacaccaggaggtttctgcctcaggatctttgtacgagatgttcactcagcttggcacatccaaaacctctaccccctacctctaccccaaacaaatcttatgaacccactcctatacacacaggcaaacaggcacacacacacacacacacaaacacgtgcacacacacagatgcacacacgcacacacacatacacacacacgcatgagcacatgcacactcatacagacatgtacattcatgagcatgcacgcattttcctaataccctgtgcaagcccgtagcatggcatttaccacagctgtttgtaactgaattatccatttacttttctaagctgctatctagatggaaaacagtttgagggctaggactacattttattcatctttgcatctatctgcaggtacttagcaaaatactgactatatgtttatgaaagtaaaaaagaaagtaagaaaaagaggtaggaagagttggggggaaaaggagagagctttgtatctccaggcccaggtgtaatacttaagcatggaaagtcttcaataagtgtttgttgaattaataaatttttttaaaaaaagtatgattacagatgagccatgactagattgctgtgaagaaagccttttaaaagtatgaaaacagtaaaaaaaagaaacccttttcgtctatttgatgaatctatttatacacctagtaggagcctagatcagggaaccagatcagcaagctgaaaagtcccagaactcaaagggggcaatacatgcaaatgtccaaaagggggtgccagagagcagctcccaacagcagtgtgctgggagttaccgagaagtggcctgggtaattcagacacaacttgctcttctgtacctggctatagagtggtgagtgtgagaaccagtgaagcacaaggatcagagaaaggacagacactgcatcactgcagatgcaaactgtacagcatgtgaactgtacaagagacaagcgggcataggtatggagaaagaatgggaccagcgggccgggcgcggtggctcacgcctgtaatctcagcactytgggaggccaaggcgggcggatcacgaggtcaggagatcgagagcatcctggccaacatggtgaaaccctgtctctactgaaatacaaaaaaaattagccgggtgtggtggcgcgcgcctgtagtcccagctactcgggagcttgaggcaggggaatcgcttgagccctggagaccgaggttgcagtgagctgagatgacgccactgcactccagcccgaatcacatttttctttctaataaagagactaattctcgctagcatgaggtgggccacttttgaagaaccacagatgtaataaatgaataaataacagatgtctgatcccaccttcgtggttctgtccaccatgtgttttgtttgtccataatttcctatgtgtattagttgtgagctgatagaaatgtttcctcattgggcatgttcttcatacagcttgttttaagccatcagacacagctcgagattgatggagagcctgaaaatgacaacctcatgatttagttttacttgaatatcagtcttccaatattaaatgtattttctaacccaaagggcatccttccttattatttcacaccactcagttctcaataattcatggactaattgtgcagcaattacatttccttcctacaggcagagccacaagatgttaaaaamaaaaaacaaaaaaaggatacctgagaactcaggggttcccctaagaacctgagtcatgcagggaggagctacttcagggggcagctcaatcccagccagtgacacagctgggtcccctctgtgtgtctcagaccgccrttgctctctccattcctgtagcaagcctgactctggtctctgtctggctgtgttgctttctggtatctatttatgcttctctctaaatcacaaattcttatgtcctaagcccaggagctctctgagatcaggacaggcataaactactaacagttttaagaaaaaaatgcaaaacagaattgataacaattatggtataccttagatgtaattaatggctttgggagaggcattaaaaatacagggcagagccactgcacyctgtgactcatgcctgtaatcccagcactttgggaggctgaggcgggtggatcacttgaggtcaggagtttgagatcaacctaaccaacatggtgaaaccccatctttactaaaactataaaaattagccaggcatggtggtgagtgcctgtaatctcagctactcaggaggctgaggcagaagaatcacttgaacccaggaggtggaggttgcaatgagccaaaatcatgccactgcactccagcctgggcaacagagaaagactccatttaaattaaaaaaaaaaaaaaaaaaaaggtggggggggaatataattctgttattcacaagataattacaagatttatagaaataattaaattctagtacactataaaggatgtgacctagaaacaagataaaagtattaagttatatgaagaagatcttccagttctgctgggggatctctgtgactacaatttgtatataaaacctcctttgaaagtaatgtcacaggtctaaatatgagcactttcaagtgaaaaaggctctattcccctaaccctgccacaggctctgttactctgccatgtggtcatccttgctcctctttagatttatgatgataaygatggtcatcatcatcgactgtaattctaccatgattctaattcaagcaatcaattagctggctatgccaaagtgttgaagccctgcccttcctgcatgctgcactctgtacacttctatagctgtaaaggtagtaaaaggaagtaaatgaaaatgtgataggttcaacattatgaagtttgaaagtcaccactctgttctaacagcaggttaaaaagctgaacaaactgaaaaaccaacaatacttcatagatctttaagagaagtaagatcagggctgggtgtgatggctcacgcctgtaatccgaacactttgggaggccaaggcaggtggatcacttgagtccaggagtttaagaccactttggccaacrtagtgaaaccccgtctctactagaaatacaaaaattagccgggggtggcggtgcacctctctaatcccagctactctagaacctgaggcattagaatcacttgaacccaggaggcgaaggttgcagtgagctgagatagcrccattgcactacagcctgggtgacagggggagactctgcctccaagaaatcaaacaaacaacaaaagaagtaagattattgggcaagcagctgcctccaaaagtggggagaaacaggtggatacagagaatcacaactttccagggcaaaaattgccacaggagccagcattaaagaaagataatctgtactgtaatagacaaattgctggagctakacgtagacaagactgtgttaaaaattccaggggaaccaagtcataggggtgtgcccacccactcttttgtgagttttacctccaagagttcaactgatttctcatagtagttattagagacacacacacacacamaaaaacctctcatgtttctgatggtaggagtgagggagcaggggagaaatgaaaaagagtagaaaacaaaaataaaaacaaagaacaacggtaacaaataaaaaacagtaacaaatatggtaggtattaactatatcaataatcattttgactgtcaatggtttaaatgcaccaactaagaaacagaaattgtcagagtggatcaaaaaattagactcaattatatgctgtctagcaagaaactcactttaaatataaagataaatatagattaaaaggagatagagaaagctataccatgctagcattaatcaaaagaaagagcagccatgttaatttgaaacagaacatacttcaaagtgaggaaagttatcagggataaagggataagagttacataatgataaagtggtcagttctccaataagacaaaaattcttaatatgtatgcaccaaaaacagagcatcaaaatatgggaggcaaaaactgatggaactgcaaggataaatagatgaatctattattgtagttggagacttcaacatccctctatcagaaacggacagatccagccaacagaaaatcagtaaagacatatggtaatcttcccttatctgtgagaaatatgttccaagaccaccagtggatgcctgaaaccatggataaaagttaccaaatcctatatatactatgttttttcctatacacccatatctatgacaaagtttaatttataaattaggcacagtacccttgtgccttggggctgttatcaagtaaaataagggttacttgaacataagcactgtgagatggtgacaatcaatccgrtaactgagaaggctactgagtgactgacaagtagatagtgtatacagcatgggtatgctgaacaaaggaacaattcacatcccargtgagatggagtgggatggtgcaagatttcatcacactactgaraacagcatgcaatttaaaatttatgagttgtttctttctggagttttttatttaatacttttggactacagttgaccacaaataactgaaaccatggagattaaaacttcagataaggggggactactgtagttgaactcaacaacactatcaatcaaccagatataattgacatttaaggaytgttttatccaacaacagcagaatacacattcttctcaagttcacatgaaacattcaccaagatacattacattctgagacataaaacacattttaatttaaaagaatagaaattatataatgtctgctgtcagataacattggtattaaactagaaatcagtaaaagaaagagaactagaaatcacaaaatacatggagattaaacacttctaaataacatatgaacctaagaagaaatctcaaaagaaattttaaggtattttgaactaaataaaattgaaaataaaacttatcaaaattcgtgtgatgaagtgaaagcagtgcttaaacagaaatttgtagcattgaatgactatattagaaaaacataaaaacctaaaatgagtcatctaagcttctaccttaagaaactagaaaatgaagagcaaagtaaatccaaagtaaacacaagataaataataaaaatctgagcagaaaacaaggaaaytgaccataggaaatcaatagaaatttaatatagaaatagaaaattaatagaaaattaaaccaaaagctagattttttgaaaatatcagtaaaattgataagcctctagccagcctaactaaggaaaagagggataacacaaactactgatatcagaactgaaagagaagacatcactacaaatcccacagatattaaaaagataatcaagaaatattatgaataattctatgcccacaaatttgataatctagaggaaatgggccaattccttgaaagacacaaactgccaaaacacacaagaagaaatagataatctgaataggcctatatctattaaagaaattggatcaatatttaataatctaccaaaacaaaaaacacgaagycctgatagattcactggtagattctaccaaatatttgggaaagaaggtataccaagtctctataatctatttcagaagatagaagctaagagaatacttcctaactcattctatgaggtcagcatcatcctaataccaaaaccagacaaagacattacaagaaaagaaaactacagaccaatatctctcatgaatatagattggaaaatcctcggcaaaatattagcaaatcaaataaaaaatgtttaaaaagaattatacgctacaactagtgagatttatcctaaatatacaagactggttcaacattcaaaaatcaaatattgtaatccatcgtatcaacaggctcaaaaagaaaaatctcatgattatattaatagacacagaaaaagcatttaacaaaatccaatattcatttgtgatttaaaaaaaactctcagtaaactagaaataactagagagaaactttctcaactggataaagaatatctacaaaaagactacaatgaacatcatacttcatgctgagaactagaagctttcccactagtatgaggaacaaggcaaggatgcttctctcaccactcttttcaacattgtactgaaagtcctagctaatgcaataagagggagaggaaataaaaagtctactggttgagaagaaagaaataaaactaactttgttctcaggtgacatgattgtctatgtggaaaatccaaaagaatcggcaaaaaaaaaaaaaaattctagaactaataagcaattatagcaaggttgcaggacacaaagttaatatacaaagtgaaccactttcctatatatcaacaatgaacaagtggaatttgaaatcaaacacaggataccatttacattatcacctctagaaataaaatacttatgtgtaaatctaacaaaatatgtgcaagatctatatgaggaaaactacaacactttattgaaataaataactagataaatgaaaaggtgttccatgttcatgaatagagggaatcaatattgtcaagatgtcacttcttcccaattggatctgtagtgatattgtttggatgtttgtcccctccatatctcatgttgaaatgtgacttctcatgctggaggtagggcctagtaggaggtattagataatgggggcagattcctcatgaagggtttagtgtcatccccttggtaatgagcgacttcgtgctctgagttcacatgagatttgtttgttgaaaagagtgtggtactttccccctcactctctcactcctgctctcttcattcttcatgtgatacttcccactcacccttttccttccaccatgattgaaagcttcctgaggcctcactcaaaggagatgctggagccatgcttgtacagcctgcagaacagtgagccaagtaaacctcttttctttataaattgcccagcctcaagtatttttttatggcaatgcaaaacagcctaacacatgtasattcaatgcaatatcaatctgaatcccagcaaattattttatagatattgacacattgattctaaagtttatatggagaggcaaaagatcaagaatggtcgacacaatattgaaggagaagaacaaagctggaggactgatactacttgaaatcaggcttactacaaagctacagtaatcaagacagcagggtattggtgaaaggacagacaaataatcaatggaatggaatagagagcccagaaatagacccacataaatacagtaaactgacctttgacaaaggagcaaaggtaatatgatttaaaaaaagatggtcatttcaacagatggtgttggaacaaatggacatctacatgcaaaaaaatgaatccagacacagaccttacatccttcacaaaaatgaactcaaaatggatcacagacataaatttaaaaaacaaaactacagaactcctaaaagtgtaggagaaaatctagttgaccttgggttttgtgataactttttacatagtacaaataaatagactcagagaaactatttgcaaagtatatatttaataaagatctgttatccaaaatagacacataaaaaaactcttaaaactcaacgacaaacaacccagtttaaaaaaaaatgaacctaaaaytaacgatcttaaatgacacctcacttaaaaagacatacagataacaaataaacttatgaaaagaagctcaacattatatgttgttagaggactgcaaattaaaacaatgagataccactgttcatagaatggctaaaatttaaaaaaactgaaaaaaaagtatagtttcttatgaaacaaaatatagtctcaccatacaagccaggattcataccgctgggtatttacccaattgaactgaaaacttatgtccmcacaaaaacttgcacaaggatagtagcattattcataatcatcaaagactggaagcagccacaatgtccaatcatataaacaaattgtggtacagccacgcaatgaaatattgttcagcaataaaaggaaatgagctctcaagtcataaaaagacatggagtaaacttaaatgcgtgttactaagtgagaaaaaacaatctgcaaaggctacatgcagtatgattccaactatatgacatcctggaaaaggcaaaactatggagactacaaagatatccatggttaccaggggttaggatggagagagagacaaataggcataacacagagcatttttagggcagtggtaatctaatctgtatgatactgtaatggtgaatacaagtcattatgcatttgtccaaacccatagagtatacaacaccaagagtgaaccttaaggtgaactaaacactttggacgatgataatgtgtcaatgcgggtttatcaattttaagaaattactggtggcagataatgataataggggagcctgtgcatgtgtcggggcaggaggtcaatgggacatctctgtattttcctctcaatttcactgtaaacctaaaactgctcaaaagaaaaagtctttttaaaaatgaaaaatgtgactctcttggctttatttgctgctctaggaaagagaaaaggtgggaattgttcctatgagtttgcagactgcttaaagattcagcaaatgaggcgtagtttaggccttctgtcccaaggctgagcaagagtacacatgccatactgccacttcttatgcatcttgcacattctagtggttttaaatttgtgtggatttatggggttcagcattttctctctttatccaaaggactacttgtcacttyatgtctttttgatgataaatcatcttagaggacctagagggacaccacatgtccagttcccctcttctactctccagctcagagatggccagcctcactctctgagtggtccacatctccactctcacattcaagttgccttacttgaagttgtgccctattagggaggaaaaagagaatgggtcttgtatatcacatgatgagttggctctgcttgtcctsgattgccacagatgggatactagccttaggttaaaaacaaagattaaccagagccctatttatcactctcgagtccactaactaccagacccccataaagacagcagtcatcagctaaataaatgaacaattaagttgagaacagatgtgtgaaaacagccaccctctcgatttactgacccctggtagacattagtttggtaatggactttatctgcaacaagcagcctgcttcactgcttaaaagggatggcgtctttgatacttttagttgcagtcttaccccctgacttcccttgaagggacctggggctaagcaggtgactttcacgatgaacgctgcatttccctcttaactcaggtgctcacaaaagggtgataaaccatcttgccagccacacctttagctgcattcagctggaattaaatttgggtggccatggttccagcctgttttcacatattggttatcctcaaaatatttggagatttccaaggtggcccccctttctgtgatgggcttcattaagatacattttcattaacacagggtagttctttctactggaaggtgcrcagtagaaataaatgctcaaggctcctcccagtgtttggaggtgtagcggtcacaagataatatttttagagatttttaaggatattttgatgtttagcaaccgttacaactgctgcttactcacaaagtgaaaatcaagagtgtttttctgttttgttttctttgctttttatcattctaaattccatttgttattctgcatgcccaggtgtaaaattcctttggtggagcagaccaaacccaattgagtctgtgaaatgggcatcagggaaagaaagcagagaggagagtgaagggagcaagccaattcagtgactcacattcaggccagggattaaaaggggccatgcactccaattctaacccaggagtgctcaagggttggcccatgtgtgagctgttaactgctttcaatcacaagataaaaggaaagaggaggaggtggaggaggctcagggagagaagagaggtgttagtcattgcagtgattgtagaggtagttgttataatagttgggtggggagaggttggagtggatttattataagaacctagggcacacagatcaggggactaaaggtcaggaaaatacccaggcctctgaaagagactgaaaataggacagtaaaccaaaggaacccagggagtgtgctctcttccagcttcctcactgcacgtcctctgggttctgcccycagaacccatcctgcagactggctttccagatactcagtccacctggcaggaaattacgacagcactatcccagctcactcgagcttctcttattctgagagtagcccagggtgaagccgaacatttttaacaccaattccaaatgtttgaaagaatcagattggtccttcttgaaacagtagtttaatgagatctaatcaactggctgggagctayggcatataaacacagttaccagaagcctgcgccaacgggcaaaggaaaacagtgaagtggtcatgtgagctgggaagaaacccaaagaaagtctmttctagactccatcactgtccctccgcagaatacaaaggttggtctctgggtattaccaacctgtgttgctggatttgtttgtttttgttgtcttggtttgacttgtggtttgaatcaataatttgcttcaaaatgtaataagagtttatacttatagaagtatataagtagagtttatacttaaagaagtatataagtagagtttttacttatagaagagtttatacatttgcttcaaaatgtaataagagtttatacttgttcatgtcattcgaaaaattatactcacttttcttggtaagaagagttttgggagtgggaaagaaaaaatgaacatggaatcagatacgttgaatctagatgtaaactaaatgttttaaaagaactgtccttataccatccycagggaaacaaacaagtcagttacattgtactttcttccataagaataagaaatatgcccagcctggtgcagtggctcatgcctataatcccagcactttgggaggccgaggtgggtgtatcatctgaggtcaagagttcgagaccagcctgaccgacacagtgaaaccctatctctactaaacaatataaaacttagccaagcatggtggtgggtgcctataatcccagctgctggggaggctgaggcagaagaatcacttgaacccagggggcggaggttgcagttagcagagattattccactgcactccagcctgggcgacagagcaagactctgcgtcaaaaaaacaaaaacaaacaaaaaactctgttcccgaataattggggagactgatttgagtaataataatgtcaagcacgtccgtgtgaagagaccaccaaacaggctttgcgtgagcaataaagctgtttattcacttgggtgcaagtgggctgagtccgaaaagacagtcagcgaagggagatggggaagcggttgctttataggagttgggtaggtaatggaaaattacaataaaaggtagttatttactgttagcagaggagagggttgcaaggtacatggtggagagatcataagacttattgtccagaagaagaatgtcacaaagtcaaatgatcaactaagatagggcagggacaagtcacgatagtaaaatattgtaattttactcagttaaggcagggactggctgttttacttctttgtagtttttctttggctgctccagacttcttggctcctgcaggccatctagacggatatgtgcaggtcacaggggttataatggccgagcttcggctcagaggcctgacaaaactctgacctcycgcaggaaaaaaaaaaaaaaaaaagaaagaaaaaagaaatatgtttataagggaatagaatagattgtttggattgtgcctaagaaagtaaggttaggtgtttaaggctatatcgtaaatgatttttcactataaggttaccatgtttcaaaggcccaaacttcaaaatattgtttccatcaagttacgtccctgcccactttttctttcccaattttatgtgtggctttgcctgaaaagaatcccagcactcgcgtgagaggctgactggcagctcagtgctgtgcatgccccatcctcgcctttaggacctcattctaaatgcaggagagagcaacagtggcaggaaatcattaccatccagcagctccccgggattggggtcaaaggccactctgcaaggagttgagggtattagaatccattctggggatttacctttctttgcagtagcttctgtttcctaatgcctaagagatctgaatagcctttgttttgcaccgtttccctccaggcttagcgcagatatgaatgctgatgtggtatgtcacactctggagttttgtaaacagaacactggccaaccattgtgtcatctctaccctcttcccaaggtgagtgtgtaatcactctgaacatctgtttccagggacatgcaaggcttttggaaatgttagaaagggaggcttagcttttactcgctcagtgttttggggacagggagaggcaagatgacattttcaattaccccgcaagaaataatattcctgcattttggcctagatccatactaccatgctagaaagaatgtctttgctgttcagccattgtggactgtaattttgagctggcctgccagtaggtaggaaatctgatcaaagagacgcagaggtttaaatccctatcacttaaaaatcaagcaagtcactctcacagagtgagcaactcatgccagtttgcccaggactttcctgccatgagcactgaaagccccacatcttgggaaatcctgggcagttggtcaccctacgctgagccttattgctcttactcataaaatgggttatgataaactacctcccacagtggtttattgtgggaagtcggtgagctaatatgtaaaaaatgcttagcacaataactgatacagtttttaaagtgttaasagaaatgactgctaaatgatcattattgataacattattattcagtgatagctgttcagaggaccctgtgtgcattatatcattttgtgtagcttttaattagattgcggagaggaggctgcaaatgttgacacaattccctccscacactctggatgagaggataatattgaatccagttaggccacagaatattaattttcaggagctgccygtgaaaaaaaattctttgccttctttcttgaattgtagtttttctggatataacacaataggtttctattttaattgtaatttcctttttattcatgttaaaatgaagttcattttagtgctttgtggcctaaccaatgaccatgattttgctgatggacagtattaaatacatcagcctgtctccttgagcaggaagtaagagatgcaactacctgaggaacgtgtatatttcaagcttcctctgtcactgactaagtgcsaattaaatttcccctaattccacctgagaagctgcaggctccactggtacctagaagagttagttaactttaattaaaaaaaaaacttttcatgtgttcaaatagcgtgtgactattgtatcataatatcataatattttctgtttgatattgcaaggaagaaatgggtctctgtgtagawatgcaagtgacacaggttttgtgatttccttaaataataatgtcatgtatacattacacccacagctacacatagtcgcaaaaagttcaactttaaattgtcccatttaaaatggcattctttatttttatactctctagagtttacttctgaaatttcatgtccttgtcttcctaccctgacccccttctcaattcctaactctgtaaaatttcgactgcctctggctgcaagggaattggaggatttcatgygggaaccgccaccttctaccccagctagcattcagtgctgctgggcagcctgtgacgattccctggacagcccccttcactttcctctgacggctgttctaggccttcaccctctgcctcgggtccccctctccagcctctatctctgcagatgacccagaaaagagggacaatgggtatacacatggacagcttcaccctcctctgcctctgagcttcccctgaatagtagtaactgacattgactgggcactcactttgggcccagtgctggtgtagaggctcacacttgatcttgttttgttcccaagcaggcctaggttggaggtgtcatttcgactcctttttacagtggaggaaactgagggttagagaagttatgtgacttcctgaaagtcacttyccgaggaaagaacagaactgggttcacaccccggttgttctactcagagattggttgagctctaacgtggtgtcaatgtttcagaaactcccctggggtgtcttcttacaacagtcagctgaaatcctaccaccagaaacaactgatgtcgaaatgtgtgtttccttttaacttttcaaataaattatattgtattgagaatttatttgagagttatgataatgcatatacaattttataccctactttgttcccttaacattacattttgagcatctagttttcagtggtatatagcagacctttttatcattctgcaaatcactcctacgtagcacgtatgaatgctcaggtggaattacctacctgttagggacaaactgccccaaaaaagcttcttggtactgccaacaccccccmccaaacctctttgtgccacccctccccttcccccaagcctttttacatttcgaagcccttatctaggtgccgtggtgaagtcagcagactttacctatcaggccttgcarcaataaagcaaaccccaattacaaaccatccagatggcacaggggaaggtcgcacaaaaaaaagtcataaaaaacgtaaacaaactttacttacatccttcggtacataaacgtcacaaggtgatatgtggcagagttaaccaacatacaaccccagggtctctctcccccatataaacccctcattttgtaagctcaagactgcctcctctgtctgtagtagagcagccggcaagttaaataaaggcttgcctaaacttgggtctctctctctcgtcctttctctcagctgacctaacattacctactaagggygggtgaagacacaaatgcagacgtagataatgttcagccctccagaaggaattctcatgactctcctagtcaatagtccccagagtagccactattctgaagtctatcgccaccggctagttcatttttaggaaactctatccttgaatgtcgtatcaaaggcctcgcgcggtatatgctcctttgtgtctggcttcttccacctgtgagtttcatcccgtgttgggtgaacagcatcatttcatgtagaattcccccartcatcttttgatgtagctcctgcactactgtcccagtgagtccaaccaaatctgctctttccttctttctaatacatttttttccacattgatgccacagatgccttgctgtaggaaaaatatgaccttccaccccagcccaaccctttgcctggaaagcaatttctcactctgtccttccacttggtggattattcctccccatcgttcatggctcagcttacatgtcacttcttcagggaggcrggccctattagatagccctcttatcatagctcctgtatattcctttcttgaacttgccactttacaagatatattcctgtgtgactgcctgcctgtctctaccactatcctctgaactccaggaaggcaaattctgtcttgttcaccactctatacccagtgtctaggacggtgcctcacacataccaaggaaatgtgtattgacgcaatgaaygggtaaagtgccactagcttctcatttgcatccctgatggaaattctgactttcctcatgtgaaggcctcactgattttcccagggcatacttatgatcctgaacatagtttgggatctccamgttgcctacacaactaagtacaaattttcacttagcttttcaggaccttccaaaagcctttccagacttgcctttccctcttaggtttgtgaatcctgtgctgcagagagcagcaagtgactggctctgccttgagccatccccaaccctcccaccctacaccttggatcttcatcattccctctacccagatcacctttatcaactccatgccatccctcaagctcatgtcaatggtcaccttctctgtaaagtaattcctaactatcccaacaaaatgttaactctcctttgaataatcattgtaaaataactgtttgagcacttataatgtgctaacattgttctaaatgctttatgtgtattcatgcatttaatcttatggaataggtattgttgtccaccctttatagatgaygaaggtgtggcagagagacatcaagatactagtttctagtttcgtagatttcctcactaagatgcaagcacatgggggtgggcaggcctgtaccttgcctgtctgtctttgttctctccaccatgccaggcacatacttacttggtatatggataaaaatgaaaatagcagaagttggtatttattgatggcctgccagccgctgcacttaacgtgcgtgatctcatttaactgtgctgttaggtccatatttattttacagttgaggaattttgagacttggagaagttaagggattttcccaggctatacagctagtgaggaatacaagaggatttatctagggtctgtttttcttaaaagtccaaattctcattcaccgtgctctctgcctcactgagactccgtaggtgttgtcacattgaatggaaccactgctcctgggccagctaattcctcataagcaggactctgcacgctctatgtctggcttttcacacatttcagactctagtacaatataaataatgtgacgcaagcagtctcccctgtgatatacatgctgcagggatggagaggatggatgggcccctctgtagcagggagctcatagcgcagaagcaagcagagcagagcaacagagatctggcttcagtgaggccaaaagttaaaggtggaactgcatttggggctcacagtgaacccctattcatcatctacagcccacctgaaattccaggcccacttcttgccggtcctgtggacgtgtctccctaccactatctactgtgtgctcaaaaaggacaaacttcatccataactaattaaagcaagaaaaatctacgatgtcccactggtacaagaagaagaagaaaaaggagagaggagaaaaggaggaagagaagagggacagggaggaaagggaaggaaaaatagctgcaggcctcactgcaaagaccacccaggtggttttgtgttacgtatcttgggagtttatttttaccgctcctctcatttgcacatgaaacagcgcattgattgctgctggtgtgtgtgtgtgtgtgtacgcacacacgcacagggatgcatgcacgtgactggctctcccttgagccctccccaaccctcccaccatgtccaaaaccatgattctaacaccacagctcacaaattgaaaaccgaatgcaacttattcgtgtgtatccagtggttctttaaagctctgttttttggatcagaatgttacattgcatgagcccctgcttgagccaraagcatcctggagcctccttagctttaagccactcccgtttgggtccccgaacttgagatctccaggcagacctcgtagctttgaactgactcctttcctaaccacagcagtgctggaggaacatgctgcatttaccaacatctccaaggcacactcaagacttacttcagccactttgatctacattaaaagagaatcatattcagaatgtaagccctgtgtggagagaggttctccttatttccctggggcctcctgaactgctgggtggcagggagacctgctgccttaggaaagcaacccagactttgaaacagcttttcccacagtgagttgcatttctacaagaaccaaaagctctctgatgctgagtgtgggggagggtgtgtatgcacagggaatcatatttccctggaatccaaactaccaggaaagtgacataaatgggtttggcaagaagtaaattttcactctttatatgagaaagtgacgcatgacaaattatgtttcgcctaagcaataaacaagctgacctcaggaattcacttttattttttaaacactaggtgtcaaataaaatacctggcatctcttttagtagactgtctcaggtggtagtgtttagaaaaagaatcacagatagacaggaaattggacacttcctgagattctgtaatcactaaatttcattctgcacaatccaaagaacctgatgctcataatgctgtttttagccctatgagctcacagcacactgtcacatgtgttattgtctagtctcccccaaactctgttatttcaaataaacgttttttggtaataatttcagatttataaaaagttgtgaggatactgcaagagagtatactgttcacccaagtttaattccccacaatgtgaacacattactattacttagtcaaaactaaagaagtcagtattactactgtatataccttagtagcaaatcaagtccagactttatttggattacacatgcttctcctctaatgtcctcttctgttccaggatctagtcgaggacacgcattgcatttctttttcatgtctctttagtgtcctctggtctgtgacagagtcttcatctttccttgtttttcatgaccttggcagttttcaaggatacaggttaagtacgtcggtaaaatgttcctcgaattgggatttgtttgatgtcttcatcttggttcgacagtgttaggggtttttggaaagaacaccacagaggtgaagcacccttttcatcacatcctatcagggttaaatgatgccacatggcattgctggtgagatcacccttcatcactckgtgaaagggtcgtttgccaggtttcccaactgcaaagtcactattttcccccttttcctttactcwgttctttagaagtgagtctttaagtccagcctgcactcagtgaggccagggaggaccaagcccctgctcccagaacatggaatatctacacatatcttttgaaattcttctatgtaaaaaacatctctctcctccctaatttattgaattagccaatcatttatttatattagcacagattcatgtatacgtattttatactttgagttataattcaaatatacactattttattgcacaaatttttccagttttccagttttgctaccattggaagcttagggtggctcctgtgtccttttgacatgcctctgtcctattttttttttgttccatactactttatgttctggtactaccagatgatccaggctcatcttgttatcttatattcttctgcccctgtccttgaatcagcatgtcccgaaggagacctggttccttttactggaaaatggtatttggaaaccaagatctgggtgctaggtatgcccattgctactgggatgtcattgcttattggccttcttaggtcctggtcttctttgtggagtgctaagtaaagtatatgtgtatacaacccatgtatacacaaatacctacaattgttactgtgtctgtatgtgtgtctctgtgtgtgtgtatgtggatgtgagctcatactgatatctctaattttaacccagtatcacaggtcaaactctattttataggtaaaattatcaaacatattttgcagttgaggcttaaagcctttactcaaagctcataagtagtgagtggaatctgaactcaacccagggccctggactttagacctccagctcttcacatcagcactgcctgtgtttagcatagattctggagcacattcagaatagtcacttctcagagccagagggaattaaaggcagctttagttttagttttcataaaatatcataaacagcttaattttcaagaatcttgcacaatatcccaactttctcagtaacaatgaaaccactgasatgttcgcttacttagtcatacctcaacaaacatttcttgaacacttacmatgtaccatccccacagccgggtaccctaataagttatctttttttaactatcccaagtctgtaggacaaatatgattctgtcattttataaataagtctactgatacctagagaactgagagactttcctgaagtcccatactttctacagaataattgtttttctttttatcagccaacaaatatttatgtagaataaattaagtagaacagtattccagcacatatggcatgcgatagcaatgtaaatggatattctagcaggaggctatagacaaacagtgaggaagagagaagtgctgtcacacagggtgcaaggaggaacagaaaccccagcagacragggctgagctggtcctggagggaacaggagtggaggtgactccttcagggtagagtagagttcacccagcacactccacctcgcctgcgtcagccccttgtgctgggccctttccctagaactcccagttccctgcatggccagcgccttgtycccctgctggtttaagtaccccctctccaggaagaccctccctgaccaacctctctgaagaaggtcccctttcctgctctctcacaccactttatttctttgataccgtctgaacacaaggaccrtgtctttcttgctcaccatcttattcctggactggcatagtacctggcacatagtaggtgctctgtaagatttgtttagtaaaaaataggatgagaacggcagtcctgaacataccttaccttctcccttgtgaggatgtatctggtctcagtggactatatgagagttcaaagcattcggcttctytgagaatgtgaagcagttttcagaaataaacatagggttcatcccagggcgcctgctctggtattcctgggtagggtttgagcatctgcatttgcataacgcttttgacgagcactgaagggtgagaactgttgtgctggaggctggcctaagcctgaaagctgtcattgacaagtctgaaagcactgtcccttctcttgcttctcacctcccacacatccaaaaccatgcatccccacttgccctctaactgcatccttttccccaaccattccttgatttctaccccttttctgattgatttatcaacttaacctcagctattgggtttccagtccccagccccctaggaataaggcctcttagaaagacagagagaactagaagttttagacccaaactatttggaattcattctttttctayggattttctcaaaacagtgttcttgttaccaaggggtccttgctcccagagctcccaagacggtggtgggccacttccaagacggtggtgggccgcttccaagatggcagaagccacttccaagatggtggcaagcctcatgttctctgacctggggttcttggcctcacrgattccaaggaatggaatcttgggccatgcagtgagtgttatagctctattagaaaccatgggtcacagaagagaaccktggaacccagtgactagtgttcagctcrattaggatgaatccaggcatttagccatgcaggaacaayggtgagtctttagcccartggagagcggcaatgggcgcctcactggatcaggagcacagcggacaccctgccagatctgaagagatggaagttagcggtaggtctgccacggcggcaaacagcagtggtggacagcaagtgaaagctcagctcaagtcgtaacaaacacagaccagaagagagtgcaattgcaagatttaatagagtgaaaacagagctcccaaacaatgggaggggacccaaagagggtatccattgccggctagaatgcctgggtttacatcccgatcattatccctcccgctgtgctctcaggcgatagatgattggctatttctttacctcctgtttttgcctagttagcattttagtaagctctctttcctacctgattggtcgggtgtgagctaagttgcaagcgccatgtttaaaagcggatgcagtcaccttcccagctaggcttagggattcttagttggcctaggaaatccagctagtcctgtctctcatgctgactaattacaaaggtgcaatgaagttatctacacccaaagaagaaaatgagaaggcctagtaacccgctcaagtctctcccattctaataaaataaatatagaaacaaacctcacagaacactcattcccctccagctttccagagcaatcaaatttctgtcctacctgtgagaggcaattcaacacgatgtcgaagagcacagatcctggtgccagcccacctgaacttgaagctcaaagctttactaagcttctattgtatacgtacacattaggggctatagaataaaaggcaacgacaactgatttgaaattggactaagtgcttagcatatacacagcatctaaaatcctcccacacaattataaagttattccattatcttaactttacagagaaaaaatcaaaattcaaattgttggttgtaacgttgtataattgacaatgtttttaaaagttcccctttaaacatctgaggaaattatgaacaatgagataaatgacaaggccttctagacacagaaagtcagcttaaaatggagcaaaatatatcccaatgcatttgagattcttgtttttgattaaaatagcatttcaaatcagtggtaaaacactggattactcaataaatacagtggactaaagactagacatttgaaaaaaatttaagctagatgtttatctataccttatagcaaaataaatcccaaatgattaaagactgaatcacttaaaaaaaaaaaaaaggaaccataaaaaacctgagcaattgtatttgtaatttgtgattgaaaagtcacaaagggaaatactaatacatctgactagtaaaaacttgcccccttcacaaagtcaaaagacaaatggcatactgggtaaatgttttgtaatatgccacacaatgaattattttctgtttgaatcaaagagctcctaaaaaaatcaaaaagaaaaaaaaagtcagcaaaggccacaaacaaatggtttagggaaaaatatcaaaggactgaaaatttaggagaaaatgctcatcctttcttataatttaaaaagtgaaaaattaaaatgagattttatccacctcctatgtatttggacttcacaaagttctgatggtgattaggcaagaaattatcacagaaacagaaaaggctttcagtatcagagactacaaaattaagttgctctctgcatatttgaaggcttaaaactctaagagggccgggcgtaatcccagcacttgggaggttgaggcaggaggatcacctgtaatcccagcactttgggaggtcgaggcgggaggatcacctgaggtcaggagttcgagaccagcctggccaacatggtgaaacccccatctctactaaaagtacaaaaattagcccggcatgatggcgtgaacctgtagtcccagctgctcgggaggctgagacaggagaatagtttgaacccaggaggcggaggttgctgtgagccaagataacgccactgcactccagcctgggtgacagagcgatactccaccaaaaaaaaaaaaagaactctaagggaactgaagatggcattggaatgctatgtctggatttatgctctattgttcyatcttttctccaagcatttcacatgatcttgccagagattcaaagctgtatttttgttaacacccatatttggaatcttgtataatttgtctacttaaacttgtattaagactgatttgggggctattaaactcatagaggtgttaaaactcttcaaagaacagcaaaaataatgcaaatgttaagttactattgacttccgataagtggaagaaatcaaattattccaaggaaggtatttctatgatatttgagatatgaacatttttcttgtctgcttttgagaaattcagaaaacaacaactatctctcttgagaacatgcttattaattccctcagctcaagaatcgctaatgacgctaatgactgggaatggttctraaagatcctttgagttttaaggctttaatcactgctctcccagcatccactcttggccctcatcttcacttaattaatcacccccattagagctcagctcaaagtcattccctctaagaagttttccctgatgccccaagttaagccagttcttccatgattcatctcygttcttcacactccatttttccagcacttattacaattgtaattcgataattgtaaaattaatatttaatgtctgcatcttctgttagggtgtaacctccatgaaagcagagacagtctggctrttttattcctcaaacatagtgctagtccctgaaatttcctcagagctgaacatagttcactacatgcattaattactcaacaactatttgttgaatgagaaatatgatagacagaataatctccctccaccctccaagttcatatccaagtcccycgtaactgtgtctgttaccttggacagcaaaaggaattttgagggtgtaatgtagttaaggattttagatggggagattgtcctggattatctgggtaagcctgatgtgatcacaagaatccttacaagaggcaagcattaggatcagagcgagagaaaaaaaatgtgacaacagaggcagtgttcagagccatgaggccatcaccactaaaaactagaagaggcaaggaatgggttctccctgggaacctacaaaaggaaccaaccctgcagacaccttgattttagccctgaatttctgacttccagaactgtgaaagaatattcgtgttgttttcagccactacgtttacggtcattagttacagcagcaataggaaactaatacaaataattgatttgttgtgtaacatagagtaagactgatcacacaacytgaaagcaaatagaaaaaaagtaaaagactatgtaacaaaagacccttatgactgaaccatacccaccatctgattaacccaaaatttgccagaaattatttgtgtaaagaataagacaacatactataaataagaatagaccacagagcctagtactggagagcttgtttatgagcccagatactagggaagaaacagtcaaaatggaacaatggtattagttgtgaagcctagaaaaattcactcagcaccgggtcttggatttctcatttacaaagtagagttaagaactgttatttcctattttgcaaagttagtacaaaatttagagataaactctatacgatgtttggtatagaacttgaagcatagaagaacctctatggtgtgaactttaagaactctatagcagagtggtatgtgatggtggtggtaaaatcaatgaataataatgtcaggaaaaggagttggtgggaataatgctgtttaaaataacgctttttttaagaaaggtattgcctggagaataggaagcgatagcaagagtgtgattaaatactctgatgatactaatagctatacaatgcaaaattagcctagaagcaggaaagaagaaaatttagctaagggtaaaatatgtatgaagaagaggcattcagtgataaaaggggatgcatttaaaagtaatggcttttttcttttacttttacccttttttttttcatccctggaagaagaaaatgaagtgaacagacttcattttttgcatataatttaaagtcataaatgcccattggagctggaamgtgtcagaacctaaaaaccaaattaggctttgatagagctamatcttgagtattggaaaattgccactgtaggatacagcagaatgcagatttaataacagacctgcaaatttcactcaaaggctagacatgccactatttgataaaaacccgtaagcagtaaaacttcttgcctttgtcttcctactgaatagaaattgccttgaagcccttttctgtacctctctgttggctctttctgatctgcctgtcttagttagggctgctctaacaaagtaccctagactgtgtgccttacaaaccacagaaatgtattttcacagttctggaggttggaagtccaatatcacggtgccaacagggtcaggttctggcgagggacctcttcttggctgcagaccgctttgttctcatgtggagaaaagagagctggctctctctagcctcttctcataagggcactcctcccattgtgagggctccagcctcatgacctaatcactacccaaaggccccacctctgaaaaccatcatagggagattcaggtttcaatccaagaatttggttggggtggggggcacagacactgcctcatgctgtagttatttatgcacttccctcctccagtgggcaataaaatccctggaggatctcatctttcaaatcttgctccattttaaaaatcagtttataccagtgaatttgggtgtgaggaacaacctgtcctaataaacttttagaaaagatctggggtagatgagcagtctcccccacccccacctcccccctcattcatgcatgctctttgacaataaaaaacgcccgtttggaatcatcattttacttcccaggggctttctcctttgtgagaatctgtcactgctgtcaaatgtgtgaagtgaacaaaggcacattttgtacttttcaaatctactgatgctataattgataacagagaacttgatcactcaaaattgttcactgtagaaactcatgcctaaaagcactatttttctttcctttctaagtgtaccagaattcaattctttaayatcacagaaccttagaaagcccagttactgaatgtgtcctgtgcaattcaccataccttaaaaatgtctcaggacattctgttgtgtccctgaggatcctctgttcgctacggtcttcgtatgtttaccactgtagtcaatatagctgaatggacttaggctgaaaccattgaatgtttaggaaatgcacaatctaaataatatttattcccacaaagcggcccaaagccttgaatacacgaatgcatggtgkggctttcttaaggtaggaattcattctcagttttcccaaactwttttaaacttaaaaaaaaaaagcacaccgtttaacatctatctcccagcgcagagtgaaaaatcatggactttgtgccaagtgggtctgaattggatctggactgtgccactcattggctctgtgactttgggggagttatttacctactctaagcctcagtttaccacatctgtaaaagagggagaatagcaactactacttaacactttctaaactgttttctaattacagtgtttactgtcaatcttctctcctacattgtaacagccttgatgtctcattccctactatttccccagcatgtaattcatggcacaacattgtattagtccattcttgcactgctataaagagatacttgaaataggtaatttatagagaaaagaagtttaattggctcataattctgcaggccggtaccaggaagcatggctggggaggcctcaggaaacttacaatcatggcagaaggcaaaggggaggcaggaacctcttatatggcaagagcaggaggaagagagagcaaagggagtcctacacccttttaaacaaccagatctcatgagaactcacccactatcatgagaagggcaagggggaaatccacccccatgatccaatcacctcccaccaggccagtcctccaatattgtgggttacaattcgacatgagattcgggcagagacacaaacccaaaccatatcaaacataaacactaagtaagtatttgtaaaataaatgaatagaatgaacaactgcacaaaaaaatgattgaatggaagaatacttctttctcctttcttaccactcatatagctgccaccatgcttgtgcctgggttgcatgaatttccacccaggtgcgtggctttttgacacctagagccagtcctctccccttggtatctgaccttttgcattaaaccatcctcgctccatgggagccacacttgccattccccaaggcctggtgaaacctcatcaatcatattttcttgcttatgttamaatttcaggcttacttcattcttggaaaacagtgtttcagtggtgggaaaggcrctagagtctagaaactagagtgctaatctcagctgtgcttgcagactggcctrggttaaattgtgtcatctctctgagcctcagttttctcatctgtaaaacaggaacagtaatactttcttctcagggtgattttcaggatcctcaaaaaaagcatacatttctgtaggctgatgttgcaattattatactctttccagttgtttaytggtgacattacaaaccaaaataaaaacaccaattattgttaatactaatgtcatgcttactaatatgcaagacactattttaagtacaatctttgtcaatcctcacaacgctattatctccaytttacagatgaagaaactaggctcagagtgcttaagtaacttgcccaaggtcctacaactagtaactaatgaagccagggtttgaaaccacaaacactctatggtccaaaatcattttaaataggaaatagcaatagagaccaatatttaaagagtttctattgaagacggatgttttgctcacatccaaatggttwaatctgaccacagtactttctttcttttccttgggctcccatgtggcttacgcctggcagagtacagatactaacagtaccactttgcccaaaatactgatggtgatgagcacttggcccttgctctttcatcatccaaattactcttagctcaaggtcgagaacaaaaatcaccctggagagcgagagttgtatgagtctgtgggggctgtgaccaccaactgggttgcttaagcaacagaaagcaattgtctgacagttatggaggctgaagttcaaggtcaagaaatcagtagggttagcttctgatggctgtgagagaaaatctgttctatgcctttttctcttagctctggtggtttgctgggaatttttgacatttctcgtagatagcattctccctgtatcttcacatcatcttccctctatgtgtctttttctcttcctttgcacagtgttctgtttataaggatactaatmatactggattagcagcccaccctactccaatatgaccttatctcagcttaactattaggttggtgcaaaagtaattgcggtttttgctattgcttttaatggcaaaaccgcaattacttttgatcaacctaataattacacctgcaatgactctttttccaaataaggtcacattctgagcttctgcagggttatgatctcagatatgaatttaggtgagacaattcaaaattcaacccataatagcagtcagtagtccccaagcctctcctcttgtctgaagactttgggctggctttgatttgggtagacgcttaaatcattctagacagaagtgttttagtgagccaccgtggctatatactactgtgtgctctgatgatcaaggactaaacagagactgggaaagggctgtatttttcagacattttctcattcctctgttcagtcaatgttatttcttctaaggtagcatggcaggtgcaaacgtagggagtgaagggggtcagggagttgcataaaggcaactgttaccgtcctcacctacctagagcttgaggtttagtgggggaatgcgaaatgtatgcatgggagtgtgttataatgtagaatgcaaaggaaacagaaaaggaaagctcggcccgaaagctaggaaagctgagaaggcttcaggaggaagcaacccttgtagcgagctttcaaaggaaatatctgaaaattacagccctttcttagtctctatttagtctttctcattttcataattttgtgaatttaagtcaacaggcacttgttgcctacatgccctgggctcaatgttattgaagatgttaagggaaatcaaaaattacagcccagagcccgaagcccctgcccaggagctctgagagtcattgggggaacaagacttcagcgctgcaactggaaaattatccaaagggggctgaggagggggggcttctagaatggcagttcccgggtgaatccctgtgatgccagttttgaaggccagaaactccatttttattatgatctggcacactgtaaacaagaaagccatgcatgagtcttgaagactgaaagctctgggcctgattcctgagcagacctccctctagtctgcccctacctttgtgatcacgtgaggtgcttgacctctgggtggactgcgctgtaaagtagggaggatgtatactttctaggggtgaagagggatttgagtaggagcttagctcaagctgcaggtcccctaagaagctttctcaacccctgagggtgatgtaaaccattgtcctttgcacctgtgccccctcggctcctgtgcacagctattccgagcctggaatctctgacttactcacctttccccacctactcaaggccatgagcttcctgcaggctcttttctacctcattgcagsggcttcaagtcggccaggctggggtccttctcyagccttgggtgatgcccagggttggagccagtggtggcttctggagcttccctccactattcactttattgttgggtagagtcaattgccattttctgaatcttaggtagagtacctgcaaaggcagctgcaggacaactctgtcaccatcaccaccagattgccatccctaaacatggggacagcctctgccaaggggcagtggtgagtgccgccgagacaaaggctgcagacaaccctgggtccaagggcacgcctccacatctttgttacacctaaacttgcaccctacacacagccactctgtctgtgctggctaagccccygttgccccggcctcaagggtgctggtgggattctaccctagggtcccttccctcactccccatgtagccttcacctttgagagtgctaaaggcctgactgctccctctttgcttcaatttgatgttacccaaactgcatcttgcmgaaatgcttctaattttctagtttgtgggtcctacccatccccaatttccagcagaaaccyagattttcctagcagttattgtgactggaatttggaagtgggtgctgagtaaatgggtgagtctggatgtccatctgggatcaggactctgttcccactcttggacgcttcgactccccctccttggcaaaagctggtgcatttccctgcagccccggccctggcttcctgctgccacccccatgtgcaccaatatcggaaacccagccacatccagatgaacccaccctagacctcccgggaggacacacaagccacccatcccgcctcagcacagcctctgctgcagcacttgccacatcctgttttcatagcttgtcattacctcccaacaaacattgagccccagagaaccragcttggtwaaaatgagattggttctctcaaagggattcagccctctctctgcttcatcttatttctgtttactgtacttgctcgaggtcagtccccttgccagggagaaagctctgggagggaagggatgtctatgtcattcaccgtggggttcaccaccagatccccagggccttcacttgcatatcagtgcacggagcacatcattttcttcaacaagaaacaagacaacatggattgagctcttttttgaaagcatttattactgaattggtattcattgtttaaaatttagaaaaccagaaaaaggcaaaaaggaaaaagttatcacccatcattattataacatattcctttgcaaggttttttcctatgtgcataaaatctggtagcctattttcctcgtttaacataatatcgtaactattttcttttgcttttatttccatgtttactgagcacctactatgcctcaaggactgtgcgaggctctgaagattttaaactgggcctgagaatgcaaaggamtatttctgagacagagaagcaggggcacatgattgaggcagaggactaccaccttcacattttaaaatgtggggaatgagctctttgctgataaaagtagccacaaagtcaccataagaatagtttgcatgaaaatctggtgtctgttacactgactatgccagagaatcttaatttatacaataggagaattttagggtttgctagaatttccagaaaaggccaaaagtgcatttaatgaggtcagtttttgaatggggtcattctctaagcagcttttgtattaaagatgtcatgttttaaaagtgaagattgggatcagctcttttggcctactgccaactaatcagaatggatactgggtgcagttggagcacagcctgcagatgcccactgggtgggactatcacagtggccccatagttgacggatcacaaggaggcctgggagagtccaaggaagaggctgggtggtcagagcaagagtggaggactctcaggggcttagggacacagctgttcaccaactggcacagtagtctttcaatattttaagaaacatacaccgtagcagggcatcctggcaaccaaacccacctgaagagcatcttttcctcttgagtcatcaacacgcactcttagcagccagcagacagagctttccaattgttgagcagattacttcagggctgtacaggtagcaggcccaggagggatttggcagggccaggacatgcacattcagttgggtttgaaagctctgggaagtagtgatgagagaaaaccctcctcctccccacccagcccagggttactcttctcccacccctccacaaatagacaaacacagtgttctttggagtttcacagcaatcattactggtagtaatgagctaactctttatattcgcaatgtgtgtacccttggaagatgcacttagatgctctcaaaatggttgaaagaggacaggagatctccaaccaggggaagaggaggtgactgagagatgaggtgttagcttgcacagcaacaatcagccattcttcactgccaaagcacaaggcactcaagtaggctgttgacagcctcctgctggggggttttagacaccaggataagttgcttatggagatcagcgtagcagaagggtcaggaagcagaggttcagattgcctctctgccagaccctatgagatctcttagcttttctgcatctcggtttcctcgtctatgaaatggtcgtatctcacagggctgtttgaagagtaaataagataatgtttccaaagtgcttagcactgcatctgacacaaagcaaagcccaaaataaaaagagctattaatgtgaaattgccttcttgtgaattattttattacaaatttatggagtggttcatttattgaaaacttatggactttaaatatcctaattttagaaaagatgtaggaagaaaagataaaacatgagttgtaatgttctctaactttgtttttataggagacatggaaatttacactacagaaggcaagacaaattgtcaagaagtccccgattctggtaagcactaagcacgtagaacgccagycttttccttggcatgtcctctctcactggccccggctttcacatcccaaaggcaaggactactccggatataagcctgcaacatgccatagctacgtggggatggaagtaggaatgtgaactgcttccacttgtgtttcctgccttctcactacagtgtggtttttcagcctcagcactgctgacacctggggcagaataatcctttgttgtgcaggctgtcctgggctttgtagggtgttcagcagcaaccctggcttctacctactagatgccagcagcaccaccatccacccctccccagtcacaacaaccaacaatgcctcccagcattgccaaatgtcccctggaaggcaaaatcacccccagttgagaactgctgctttccagtagaccgtcttggaggaggctgtatcctcctgcttctccactttctaaaaatgtgaccttaagcacggtgctcaacttcactgagccccagttttcttgtctgtaagacaaggatgataatagcgtcctccagtgtcagtactgatagagttgagagtgcagagagcatctgggatcttggctaggacttaccaagtcctcgataaatgtgagttagttatcataatttttattcatgtttccttaatttgtcctctgtgtaataacactctcgttcaacagatagaatatttatttcagatcagttctcgcaggcttacgtatttgacttaggccctggttgcaaatcagcccatttgaaaaggaagcagaaaagtagatctttaaagcacgacattatcctcaatgccaaagatactggcagtaaggaagcatccatcagcaatgggcaatgggagggcaaagacctcgtccttggcttctccctgctggctagctcatcattcaccttgatacactacatttgaggtattattcatttggcaacatagaaataaaagggaggaaaatccctcatggctaggcttgccagatttcgcaagtaaaaatatgggatgcccagttaaatttgaatttcagataaacaacgaatagtgttttagtatatctagtgtaatattttatctggcaactctgctcatggagggcctatgggtttttatgaacaaggccaataaatacatgttaagtgacaggcaatatgtaggcatttctacataactgattaatcaatcacaatgtctgcattgacaatcattatttaattcagtgaataattaagggccaacagtagcccgttgagctaatttgcttaagttgttgaataagatattaaaagaccacaggaaactcttgaccacccccttcagaactctgagcagaaatggagaacaatacaattggtattttattcttctccacacacccctaaaaacgtattctccaggcattgtttacttcagtagcaaaaactgccttggcattaactcctaattaggattttacaattttttacttctgtcaccagaattgcaagcataattcacggggcaggattccaacaattactcgcgagaagtgaaaaaaaaaattctactgaacaattcaacaataaaaatactcttctgaaacctccaccaatttatttgctctccagattacagctatcaaggcaaaaataaacagaaaatgcaaataagtgtgtctgaaaaaactgctcggagagtaattaataattccactgtgatggctgatataacttcagacctggccagggtacagaaagctgcactcagtaggttccatatcatttcagcacagcctatcggttggtgagaattcagacttgaaaacagttatgcattattgaaggagatcaaacattccagataaagcctggatctcaatgaggccatgagaggatcctagagggaacatttcatggatttggcagagcatcgagcatctaagagcacctgagttatggaatcatttcattctcaaatagatagagtatttttgtcatcagccccattttayagatgagaggactgagtctcgggtaggttaagttatgtgctcaccccacatagctagtaggtgagaaaccccacgtttaaatccagagctagctatctccacgttcagtaccctttctactaggccagtagctttcaacaaggcctccttagtactaaactttggggagcaccatttacgtcacaggctatgcggatattgggatcgtacagtggacaacctgtgcagttacaaatgacagccctgatcacaaacccacccgctcaatagaatcatctgggaagcctataaaaattgccgagatccaaaccccaccctagaccaattaaacccaggtaatataatacacgacaagggttgaaaagcactttgccacacagaaattcagtttcagcctggctgtgtacagaagagtgatgactgtcccactttgaccttccatttaccccattcagcccatttttctttattcaacccgtttgttgttctgcattcatttgacatcctggtgcatggggaagctcaggaagccggttaaatagattgcaaagcaaagatgctgcatgactcctgtccccagggacagccctgatttgagactctcattttagatgggattagatgcagccagttgcaatattttaaatgtattgctgagttaataacagcccacattttgtctctatctagcaaagttcaaattgaaaggaggaggctggcaaataggcaagcaagactcatacaatgttgctcggggcccatctcagttctctttgtaagagaagggtggtctttcccatactatgtaatgaaaagaccagataatcaaaacctcagtctaaccaggaggaattctaggggcccctatatcatctgccacccacttaaccccaatttctacacaatgaatggcaaagacagctgcagccatcaggctgaattttgacagcaaacagctgtgcaattatataatagtattctattgcaccttttgtctagtaattataaaactgttcatatcaatttttaatagtttgctattaccagtgttaaaatctagactgttgttaggagaattagaccaaggccttcagactaaactgaatattaaaagtacctcaracattcaaatgcaacctgactttggactctggatctcagatagtgtctgtatttccgaagtgctgtcaatgttgtagtgtagcaggacaagccgcaaacaaaactcctcagacaccgagttaaagaaggaagggatttattcggccaggggcatcggcaagactccygtctcaagagccgagctccccgagtgagcaattcctgtcccttttaagggctcacaactctaaagtgatgcgcgtgagagggtcgtgattgattgagcaagcagggggtacgtgactgggggctgcatgcaccggtaattagattggracaaaacaggatagggattttcacagtgtttttctatataatgtctgtaatctatagataacataaccgattaggtcaggggtcaatctttaactaccaggcccagggtgtggcgccgagctgtctgcttgtggatttcatttctgccttcgaggttttactgtttctttctttggaggcagaaattggacataagacaatatgaggagtggtctcctaccttagtagaagcttatgctgatgcttgttttgcagtgtgtccacaatcctgatcttagtcagctactaagtctctggagtcacccttctaaccaccccttcttcacaccatcaccctcctccgccctgtttcccatcagtgcttcccaaytcgtggcaatattgccccttgctcccaccctggggacatttggcagtgtctggaggcagatttggcaatgtctggaggcagatttgtgcggcgggcatctgggggtcacaggccagagatgctgcccagcatctcacagtgcacagggcagcccgcacagcaaagactgaattattatcggctcaacatggcaatagcaccgaggtttgaaaccctgagatagggccttggggtctcttatctcaaatgatccttctccaggccatcttcccacgcctagagacatctttccgaaacgcaaatgtgattcctctgcctgacacctccacggcttccccacagtcctcagggtaacatgtagtgctgcactccaggcccctgctccccgtcctgtctccttccttccatggttcactgcattctgccattccgattctccctccaggtgggaatgtttggcattcctctaagacaccaagctttctcatacctccacagcactgctcgggcactccctcttccgggagccaggctacttcagctttagtgtgcatcctggggacgttgttaaaatgcagattctgattttgtaggtctgcagcagggcccaagactctgcatctctgaaagctcccaggtggcatcaatactcctcatctgtgatcacacgttgagtgacacagacctagagcagtggttgtcaagccttagtgggcaccagaatgacttggagggctacgaagacataggctgccacgacccaccccagggttttcaattcagcagccctgaggtggggatgtggaaggcaaggatgtgcatctctagcaaggctgtggcccgcactgagtcacaaagcctcaggccgtctctcttcctccccacctgcctctatcccacctcactgcagggtcatctgcattctcctccaggttcctagagacacgtgctagtgccttggcctctgcagaccccacagggtgtgcccggagctggggcctccacccttgccctycactccacggagagctgaggacaaggacagcctctttgtctccacatcttacatggagctgggccaccagtcaggattatttctcctcctagaaagctgggcaggcatctcaaaaatccttaagtacctcatttatattctgaaayggttgctgattctctcttgccagggtcaaatatcgccaatgcccataacactcctcatagccattcgaaggactcagggctggcaggaatccagtgtctctctcccttcattgataaatgctggtgcctcacttttctaccctattgtcttcttctctttctttaagttgaggaaagcattgtggaaactgcaatgtttctaaaagcactgcttggtaaaacgtcagggcttttagtgtagcccacatctggagcctcatagaaatcgctgtctagaaacccacagctcaagaagcacaaggggcttggtctgtgcacctctctcctctgtgggggaagggaccttccttcctcccagaccccagattggtctctccctttagtttttatttccataatgagatggaattattttgtttgaaaatcttctttatttttaaagcacttgggtagaggaatgctgttgccggaccctcctggaacaaggtggagagtgagggtggctgggaagctgggaagagctggctggaagagaaggagggaaggcttcgggctgaggagcccgatgggcaaaggcacaggcagtggcatggatatggatggtggggacaggaacaagaggtaaatttagagaggtgaaatgggctggattctagaggaaggaggatccagaaacctcaagttcagaggggcctttagaaggtggggaaccactccttaaactaaacaactctctttttgtttttttttttctccccagaaatattmtagaagtggttctgacatttgttcactcccggttttgrccaagatctgccagaaaattaaattgtatgtatacaatttctaccttcctgagcactagcatgtaataacgtctttgcttgtcccccttttctaatgaccaaaatgatcttcacacttaaaaggcatccctgaaggtgagagtgtttctttctcaaaacattgcacagaaaccaaaagacaaatgagctctgaagaaaatcgtttgggaaatatactgaatgccagcatctttgcatctcaaagctgatctgttccccaggctagaatgcagcccgcagtgaggctcactgccggcaagtgcctgccagcgaggtgcccactgcactacacctggaaacagcccctctctgcatgtgaactatggaccagggtgggcaactgggcatggagaagactctgagcatctttagtgcaagacactcacaaggttggacagggactgtgttttcacagcgcccaaactattacatgaaaaatctggctcagatacataggaatagggttgtgaatgcagagacactgtccagaattcccacaccctcctgtccatattccagctccactttgagtctggggttatgctagacatcgtggtaactgctgttcaaaacattaaagggtgaagccatgtcttgagagggcacaggactcagaggcaaaatagcatggggtctaccctccactaagctacttctttttttttttttttgagatgatggagtgtcgctcttgttgcccaggctggagtgcaatggcgtgatcatggctcactgcaacctctgcctcccgtggtcaagcaattctcctgcctcagccaccctagtagctgggattacaggcgcacaccaccacacccagctaattttttgtatttttagtagagacggggtttcaccactttggccaggctggtcttgaactcctgacctcaagtgatccacccacctcagcctcccaaagtgctgggattacaggcgtgagccaccaagcccatcccattaagctacttctaatatgaccactgctgctttgctgctatcaggtttatgggcgctgttccaggtgccagatgctgaactttcgatatgtttcctcacttagttctcacaacaataaaatgaggtaagggttattattattcccatttcacagagaaagcaactgagccttaaagaagtaacttctgctgggccactgaggacccaagatacacccccaggtgcatttgatctcatgtgttctttgggaatatacatattcttgacttctttgcaatgctgcttcttgagctgactttgagaacttgggccacttaatgtctctgagcctctgagcctcagcttccccatatctaaaatttaagtataaactaaattatgcctatgtctcagaatcatcttgaaacgttttaaaatccagattccttggccccaaacctggtgggggagtgctgtgttttcctggaaattttccagggaattcttaggcccttagaccccacacttagactcctgggtgtccatgtccaccccattgctcgccttctagtacaggtgcaagactgcgaatgctacacatacaagtgatgctttaatgactcagaataatgttctttagccgtgagatatttatttaaccacaccatctgccccagcccctgcttcttttactcttcctctccygcaggagctcctattactttagcctgtgctagctcagccttgtggatggctgagaacacacagaggtgagagttaggctgcacacctggactgagaagctatagcttcctatgtctgcggttacaaaacaccacaaactgggtggcttagaacaacagaaattaattctctctcagttctggaggtcagaagtccagagccaaaatggcagcagggccacgctccttctaagattctagttggatcccttctgtctctccctagcttccaatggtggccgtgaggcrttggcataccttgccttgcagctgcatcgctccagtctctgcttcatcttcatatttggccatcttccctgggtgcctgtcatttccttttacaaggacaccactcatattggatgagggtctgccctaatgccctcatcttaacttgatttgattacacttgtaaagaccctgtttccaaataaggtcacattcgcagataccaggggttaggacttcatcatatttttttcatgaacacaattcaacccctaacaaagacacttttccttgttctgccatccttcatctcacgagcttcatgagtactaagtccactgaacatctctcatctgttgtaataatatccagggacaggaggaggctatgattcagacccacatttggagcctcttagagagatccaagagttaaacagttaaaaactcttcctagccaatcttctggcataagcccctgcaagccagctatgtaaagtgccattgcaggtcccagaagtgctagcaacaccccttttcatgactggggatgaatccagagagcatcaggacatggggagtagggggcagatatcagacatgaaagaagatgctggaagactgagatgcagccagctccccaggcccccaatcatgtcatcatgcctagctcccattaaatcgagccccctgccccctccctgttgaatgcattattgtattttctgtgttagatgtgggccagcaggacacaacagggtcaaagtgacaactcttcaattgaaccacctttgaaaaattgaattcaagagcatcagtggccagggattttcttggtccaatttgaaagggaaaattattcttttatgaaaaagcaaaaactgtgttttccttctttctaaaaaatcactgtgtttcaagtgtcatatgcagcaggtcacaactggttcagtgctttacaacttaaaaagcacgtatacatataaatgcagtctcatgtattcttcaaagccatctgtggttcagtaaaaatattgataagtaaaagttatctggtgctgtctatgcaccaaaaactgttgtaaatccaaccatttaaggtcagcaccattattttctcctttctaaagaggtaaaatcatttgtgcaaggtcacagatccggtaatggatgaatctgacctttgaatccaacagtttgctttccattgacccctcaactcttagccctacgctttagaggaacaagtaggttttaaatgcctgacccactagcacggagtcctcacgtggtagagacaagacctgcgtgtcttctgtggcatattccttcgataaaattcccccaggaggaatgccttacctgcccagtgcctctccctgccctccgtcccattcggtctaatgctttcaaaattcatttgaggtgtctccaccccagggacgcgttccagctcccaggttactttcagtcgcttgcacagccctcctgggtgctcctggctcctcttcagtgcccccagctccctagtgcctgctccgccttatcccattcttcaatccctgcttccttgctggtctcccacatcacccayaagctcctggagagcagggatcccatttcttagcaggaggagctcaatgaataaatgagggaacacatgaaggaaaagcaccactttaccaggaaaacaaatgtgtagctatcaggctatgaccatggagtgatcaagttttttggtgttctgttttaatcaggatacctagtgcctacacactgtctgtattttacttcaacagtggtaagtcaggaggatcccctctttttaaaaatctattctttttatttaatgtctatatgcagaaacccccatattatttcacataaatatgtgcaaaccatcctatctcttgttgattgtgttaattcaatgctatgttttttcctttttagcctcctccttccccataccctgctacttccacccacatcggtcctgcccccacctccaagctgagccacgtctataggcaggtgtgcccttccatggcttctctgttctcatttcattggataacacatccacccacatacgcaaccaacccacgcccggccctcgagagctacctgagtctcacatgtgaggcaggcacacatggagattcattctcaccatttttcttttgtcataatgccccagtttcatgaaataattttagggagtttgaacttgaatagctcaatactgtgtcattaataacaatcagccacagttacaattgctccctggatcaagccgactcacctgatatctggtggcaggcgggtgcagagcaggggcagcgagtgacaccaggctgcatggtcattgaatagaatgtcgtgtggccagaaatctgaacatctgaagaggggccatggattgggatggggatgtctctagaaaccaaatcatgatgagagcagacacctgactcctgctgccccwcccgaggagccatccttgcaatcagkgttcccattgcacatraagtaagagctcatgtgttttgttttgttttttttttgagtgctttccatgtctaagaaatagttaatgatattgattctactttaccaatgagaaaactgaggcacaaaaagattaaataatttgcataaggtcacctgacaaggagacagcagaactgggattcaaacccagagaatctaatttcagaacccggagctacgttgaaagaattcccgtggcttttccttcccactacgctgtcctcagtccaattgcttgccttgaaaatgctgtctcatcctttagctttcaccttaagatcacttcttctgctatacagagttagaaacgtttttttcctctctacatgcacaacccgcttacagcatttttcacccaggactatagttatcttttgatgcattaatttccttacccatgtcaagctcctaaattgcaggaactgtaggaactgtatcttgtactcatctctggtatctaatatgattcccagcacacagcagggactcccaaaatgcctgtggaatgaaggaatgaatgaatgaacatttcaacatacagctagatatttctaaggatacataaggtatcaagttcagatgcaattctgcagaaataatttttagtaaagtcaacaatgtcttattcaaaaccttggagttgccgggcacattgcctcatgcctgtaatctcaccattttgggagaccagagtggaacaaccacttaaggtcaggagctaaagaccagcctgggcaacagagcaagaccccgtctctataaaaacaaacacaaaaacaaacaaacaagaagccttggagccagatatgatttgaaattcaggttttttatattctagtaaaataatcaataatgcatataccataacccacctgctatccctggcacctcttgatcaatcacatttatatttcagagtgaaatatatgaattttcacactaagtatgataaagcttacgaattgccctatatcagttcaggtcaagttttgctaccaaatgaagttgttgctaagttgaaaaaaattttgattagtgggctgtgaagaagggattgtggagattacacaagttgcaatttatgctactctgagtacccagtctacccactcatgtctagaatgcatggctttggccagtcacttggggcctttaaagtaagcagacaaaggttaataaatcagctttccaatcttaaagaccactctttgttccttctttcaaggacaaactctcacccccaagataacaaaggtgggaggggatagctttggcacatgcccaaacgggacctttcctgcagctcctttttctttctcaggctgaaaatatggctgtttgggtctrcgtcatttctgtctctttctctctctctctctctgttgatctgtctgtctttgtctcttgctcttgctctctttctttatcttccttttctcaactagaaaaatacacgctgtccaagaggccaaatacatacatggggaaaactgcytagtctcacagaaaatgtgaccttcaaagccttttccaaaacttttcttaagagtcacagctgatgttggatgactgcaagtcatttggtccaagctttttccgcatttcttgacagatgattaaagtgagagaaaaccatttgtagttcagagtagacaagggatggggtggatctagaaaccctggagcatcagagcaggaaggatcccaaggatgatcttgccctagcttctctcctgcataagggagagcagcgtcacagcctctgagcccactcgggaagcttcattcccctccgctcccaccatgggaaaatcaaggtgtgggtgatcatgggggtggaatttggctacagcccacacctgaactgttcctggacaatcttccaccttccccaaggctggttctcacttttcctgtaagtgtggatgtgtggmgtcagcaagtagaacgtttctaatttcctgctggtggctctctctctggccttgttcaacccaccccaccccaaatggaagggggaggtgaatttcctctttcggacagcaggcactcataatcacagctgcaagcactttgtgaggaccaatactgggggcttttcatgtggtttcccttaatcctcccaataaaccctgtgagggagctggcaggaatcacattttacagatttaaaaatgaggctcagggaggttaaataaacttctgagaattgccgagctggtgaggaagcggtggatggagcagtgactccaactgactccagagtctttactgaaccaccatgctcaactcagtatctggcaagagcacttgaattcaaaaggataattcttcttggagacactaagagggagcctgctgccttgtcctttcagggatccagcctcccctgtcccccagggcaggaatgtaggaaggactagtgatgagacatcagcttgcagctccctcttcattaggtccactaagtggctattgactccccacactccctacttttccctaccctaaccagcactcactcatcccagggycctcctctcagtggtccagtcaggaaacagagctgtgcaaggaggatttaatataaggtaccagtttaaaaagtgctaaaaaggctgaaacagtaaaaagaggaaggcaaggccccccggttatgaggactgcaggaggcaaccagcatccctagggggacagaagaagcaaaagggaggagttggtgttctcaggcttgggaggccacttgctgcggggttgctgggggcaaarcaagaggccaygttggccagtcctggagccatggataaggggtcacccacgggtgctgggaccctcaggagggcccactgtggctagaggtagagtcactgaagggaacatccagagagagaaagacagagcgggaaaccaacttctccgctcctcctcctgctctctcttgccaccagtgccagctccagttcccaagggaacctggtaagtatattttgcaaaattcccagccccaaaagtatagagtagaatacaggctgtagagccatagaagctaatataaccagcacagtgccctccagtgtttgaccaaagaggcctgtaagctgaacttctgtcccatcccagagttcataagacaggctccaggctgccatttaggctctgcatggtcttgggttgcatttatttgccttgaggttctcagaactgttgagatgctctttattcaaaagaccatttagtgattcctataaaaggttgtgttactcactgtaaattctcggctccaaagaaagcctcatcttgccattaatggtggagggtgtccaggttcttggcatcttgaacaaagaattggatgaaatgcacaaagcaaggaaggaatkaagggatttatagaaaatgaaagtgcactctacagtgtagaagcaggcctgagaataggggctcaaaggccctattacagagtttttgtgagtttaaatatcctctacttggggtatgccctatgtaaatgaagaggatgaagatgaagtaaagttacaaagtcatttacagcrtatgccctatggagaggatatttcctgttatagctgaagtgtgaatcggccttatgtttcctgcctccagaccctattttcctgcctcattgccatatgactgcattattctgctactgtgtaagtgattttctaaacccaaggcagtctttgacattgagaagctgggaaaagtctggtggtgaggattccacaggggaaatcctccctcatgggatgtccatggctttggcatcaatttatttcgtcatcacatcagggtccttggcttccaagactcatgaatgggagtgaaagttgccagctaatatcagctaaatggtcaagattctcaggataagtgattgaaaagagtaaaattttaagaaaagatttctataacaatgtgcaaaatggcaaaaattcaatttgtagtgctgagttcattgactgaactcaaagtgcagtctcatatttcctgggaatctcaacatcaataccccttgccctttaaaatttcacttcaattatttcacttcctcatacaggccaagttaatatcagacagaaaacagttctgttgggtaaagagcagagattggcaaagttttgctggctctgtctgacaccacacaggatcttaattttctgtttagartggccctctgtggcataaactcaacagagctgtatcagaaaatgtctctctatttgttttcaccaacactgttactttttttgttagctcaccgattgttttgttttctttttcctagagctatggaacagtctgtgccattcaaagatgtggattcagacaaatacagcgttttcccagtaagtattgttaggaataaccagatgttcactaacatcacattgcttcctacacatttctttcctttaataagacaagactgaatttcatttgaatgcattattaatttgatgaacaacacatcatttcacaatttcttttcttttttgagaccaagtctcactctgttcccccagactggagtgcagtggcatggtctccactcactgcaacctctgcctcctggtttcaagtacttctcgtgcctcccaagtagctgggattacaggcatgcaccaccacaccttggtagtgtttgtatttttagtaaagtcagaatttcaccatgttggccmggctggtctcaaactcctgacttcaagtgatctgtccacctcggcctcccaaagtgctgggattacaggcatgagccaccacagccagcccatttcatattttttaaggattttgtagcattgtgatgatacacaaggcattgaagtaaatcttaggcccagactggttttgttgccattcccagctggaagtctccatgggggctatggttgccttgaaaggttttgtgaattattttggaacttcttaaatctacgttaacttactttttaacgtgtgtgtgtgtgtgcgtttgattcagaacagttaaaatgtcagggtattccctgtgaaaaccaacaagcaagtaacatgtcacaaagtcccaaaagtttgggaaatctcagatattctacttggggatggaggaaataaaaatattatctggcattattataactcktgattcacatcattcaggtcaaatatttaaacctgcataattaaccatttggctagagacttttaaattatccaatgaaattaatcatttggccaaataagccaattgttttacagccagagaggactgatggttagtagagggtttttgggaagttggatgggtctgctgtttctggaggtgcttgtagacacacatacatgagcaaacacatattcacacaaacacacgtgtgtacatgcacacacatctacaatatgaatacacataaacacacacatgcatatacacgtgcccccatacatacacattcacattcacacaatgcacccccacacatgcacatacaagcacgcacttaatgtcacacacacacacatacattcacatatgcacacacatgcacacaccctaccacctgatattggccctagtgttatattacatgtcactcacgcagcatgtcttatcatattaatcttaattttcttagtgctctttagtgatcctagattgaatctgaattaaaaactgtggatgtcaatgccattcagacaactctgattagccttcctcgtggataacatcaaagcrggctgaacccctcctgtgtgtgctcttcaatttcagacactgcggggctatcactggcgggggagagactgtaatgacagcgacgagtcagtgtacccaggtagaaggtaactatttctgctggttgctgatttttaaaattatcttcagaaaaggaagcaggaggcacatttccttcccccagcctaggggattcccacttacagagagaagagattttcatgttccgattgaagtaaagctcagtgaaaaaagaacggcattcattcrttcgtttgtccgagaaatgcttatcagggacctacaatttgccaagtactttgcatcgtgctgggtggtaaacaaaacagaaatatgcctcctcttctggagcttacagtcaagtgggaaaaacaatcaagtgaacagattatcttattgtagacacttatccagccttctgtatcagttctccrtgcagaattgggcccagaaatagtggcctctccctccgggagtaaggagaagcctctaatgaatggaaaacatgtcatayattagccctgggctgaggttcaattgcatctctggtatcaaaaaacagatatgctagccctcgcctttgttgtgactatagtgtcaaagcattaaataaaccagttatttgggcatttaggggcacaatgggatgcagatttgttcattatgttcatcggcaccattccacaacaatgcggtccatgaatatagtcaatgatgaaaaagacaggatttggtccggagcttccggcaaatatcccaaaccaaggttaaagcaaggaagctgaatggagscttctgatgtcacaacacacaatgggatgtgatgctattccatgaagaatgctgttgtctctccatggcacttcgtgtagcattcattcattcattcattcattcatgcatgaaactgacrtccactgagagacaagcatatgtcaaagaccaatgttaatgtttttttcttaggccgaacaactgggatgtccatcaggattcaaactgtaatggcatttgggtaagcaactaaattcagcttgaaccccattctcctttgttcctccctcccctaaagctcatcacatatttgctttagttagatccagggaagactatgacagcctaaagcaactcttttcctkctgcttagaagaggggtatagaatcctgatgatgcatgaagagtgtcaatgatgtcatgagagttgaggctttctcagtcatggcccctttaagccttgcttaaggtcacccacatctaatccctttatactgttttgaacagtgtgaaattaaatgaagagtggtgttaacaaagttttacagcaacccacacagctgttggagcaaaccacatgctgtccttattttgttgcagccatttttttttttctgtttcataagcctagccgggcagagcagaaattactcagtatttacccgaccactcacaccttgaggcrtttaatgctggtgtcctagtttcctatgaataatggatttgcagctcccrgggaaagaaaagggaagaaaagaggaaagccaaactaacacagcaacaggcttaagtttgtggggtgttaagcttacaagatttgagggttcctcatgaaaaaaagaatatctacttaaaaatacaaaatcaaataggaaaatgaataatttttaaaacaatcacagaaatcttaacaaattcctggagtctcagaaattcagttccctttcttttgagatctcatttctggtttaccagaactgtttacatggaaacatgttctggcctcccctctccacctagaatactctattgctcccagtcactcccagtactcacatgggcaggggctgtgatgggccctgaagcttaagattccctaacttcaagatattatgttggtgcaaaagtaattgcagwttttgtaattaacggcaaaaactgcaattattttcacacctacctaaataaattgtctaaattgcctctaaagagttgcttaatttatctgcttcaatgaagaagaaaaagtttctgtaaatattttcctctcttcaggacactcatagtccaggcttgcaccaacagtcacctactgyatgctttccagtcccatggcctctaggatatggaaagcatgagagacagctgtgccccagcccacaccacctaccctatccgctagtcactctgacttttcatggagaacaagaagacatctcccctagagcttaaggtgacaagatccccaagtcagctcttgttctgaaaaacccaggtttagttgtcatgttggaggacaaaggagactaatcaatgtgtgatgccctgtcttcgttccatggtcccacccaggcctcagatatggtgtgtcacccatataaggaggaaggccaagtgagagactgtactagatcaatggaaatccaccatgagctcagggaggcaagatgcagagctcatcatcagtgatgggagaaggacatatcactttcatacctatccccttccacagaggaaacaccactcacagaaccacaacatcataaactcagagggagtcttaccatgaagtccaatcttgcccatactgtgtcccagggaccccagggttgagtgtgatgttaataggttctttcatgttttaatgggcatggggagctctcaagactggagagtgagcacactcttgttaacacatctctgatcagcaagtgctttcatcttggaatactatgaataatccttccaaggactagcagctccactaaggggtagctttaagtttaggttttaggatgtcccagctgtgccaattcagtcccattcacaggcccaatgttacttccaggtttcttaatctgggcactattgatgtttgggttggataattctttgttgttggagctgtcttgcaaactggaggatatttagcagtatccctgacctctatccactagatgccagtagctcccccagcaaaaaatgtctccagacattgccaatgtcctcaggggctaaaggaatgtgcaaaatggaccccttgagaattgcttctttagaagcatcaatcttaggtactgaagatgtcaggacacttagacctccagctcagagactgcagaatccgcccagaccctgtgtccagtcactcagtggaccctccatgctctgaggggtgagacccctggtccaggcacctctcccagaaccctacccagcatctccctgaatgaaatggttcagtgtctggctctctttactcccaccctcagttcctcccaaacccgactcgctcgcacagggcgttgctatgttgaattaggggcttaagaaactttaaagggttttatctactcatttgcctttgtgcttttaaagccatttaggagagctttagtatatgtatctcataaatttaaaaccaaactgctaatcmcatcgtttcttttttaaagggtgtcgatccwaaagatggagttccatatgagaagaaattctgtgaaggtatgaattgtggatgtcattgtggttataatgatagatattcttttctagtttgagtcaaattgaagtgagcagaccacctaagtcagaacgtgcttgatgctaggatttactctatgctgaccaacttacatttattttcatgacagatcagaaaaaataaagtatctaaaaggttcagaaaaggaggaaagagggcagaatcttaaaaaagcaaaacaatttgtttaattgactcttttacttgaygattaggttgcaaaatggataaaagagcaatgggaatccagcacttttccaaataagaaaataggcagcaatcataactgaagtttttaatcttttgcattttcctctaattacactacaaggtcagacacccggacttctactggtgggatgagtctctgtgtccactaggctaaagatgcatatctgaatgtctgaatgacttcagagagactgccagactataacttgtgagggcttcccaaaaatagctgggcaaaagctctgtgctctaagtgcccagatggcacaaacatctgggccaccagttccattggggaaacctcaccaccccacacattactgaaaatatgctcctggtgatgccaacacttgatggtaacatcactgttttatatttaggcaatgcttctctccccacttycacaatcacctcattcattcattcattcattcactcattcaacaggtattttctgaacaacaagtccaattctaaccaacggttatacttggctctgagttttcttggacaaaaagtatatagtctttgctgtgtatcaacttaaagcctaattgtctttaagccctcagagggcaggaagaggaatagaaaatgtaaaggctcattacatatttatgcagtttaggaatatttgttggatgaataaagaatgaatgaacaactaaaccaatgaatgaaatatatgcagatctaggtgaaaccctggtgcaaagcctcttagattccccacatcccactctccctgtgccctccaggatgtcctgggccttctcagtccccatttctgtggccaaatagtggtttccatgaagcccagcctggggagccactgcagtgagactaggccaccctcttgcatgacttgaggagtttggaagtggaaaaaggaggtgcctctctctgcctctgggaggcatcaattcagtctttcaggatcttaaggaatttggaagaatgagttcacaggtgactgattcgtgtggatgggcctcagagtcagatgaagtgattgtgaacctccaaacaaacagggctgcatacagacctttctatctccgtgtctccatcagtcagaatcatctatccagtgtttttgcctgtatggattaaaggctttaaaagaccataacatccttgaaaaatcaaaattgctccataagatcattaacccttaaagtgaattgtaatggacgttggtgtgttttcaagaaagcaatttccagaaccaaaatttgggtatatttcggatttcagataaagctttgattcacttattcatccatcattcactcaagatgttttatgctgagstgggaaacacacctgcatctctacatcttagctagcagctccaatggcctggaaatctcattcagctccgaaatgctatgcccctcactctcaaacatgcgaaaagtggtaaygcattactgtgaaaatgctcggtgcctggaatacacactagggtatccgctcttatawctacccagtctggaggttccaaactacttgagtgcataaataatgtgaataaattgtgctgcctaggttcacagcccaggggaatcattttgctgggagactcagctggggstcattttcacatctctcctgaatggatcacagcrtcgcagatgtctttggtaagtaattttggcagtaatcattccagatgtgctggcctttgtttttgtttcctcttgctctctctaaatgggatgccaactccacacasgtgcaaatttccctctttagcaaaatctgccatgaaaggcatatccacagtcatttcagtcctagacaaatggcaaaaggttccttctactcacctccccagcctcagcccagctgctgccaggaaccctgaaggcagcagtggggagtcaagaaggtggagaatgcacagaaaggacaaagcccaccrggccggcttccccgtggaggtcaggatgaggcactcyggggcctgtccagcttgtttttcgtctgagcaagcaagaagctctgggcagagcaggctgctcggctcctgatggcctctgctgtgctccacggaaggcatcaggggacagacaagcccgccatccattcccaaagagtgatgagactgtctgggagggttttttaataaaaaaaaaaaaagaagagggccacaaggcaaaattgcaaacaatgacagagaaggcaaagaaaggggagggaaaccaacatttattgactctatatcaggtgtcaggcactataagagagatttgtatgcattactcagatgaatgacacctaaatatggggtagacatataatggcaaccctgtatattaccagttcatcacctgagcacacacctgctgcattatcaggagggccattatcttcctctcaaattgtgcraacacctggggagattgtgtggcaaagggtgggagctggagggtgcagggaagggcagtctgaatgccacacacacaagcagggggttcagtggtatcagatgggtcacctgcagytggggcttcctgtggccataagttatcgtgaggaaatgtaacaaaacctgtgcctagggatagctacatacttggcagggctcagtgcaaaataaaagtacaggtgccctcagcaaaccttgttcgaaagttccgttaaaggtgctaaaatataaagcacttttctttggcagtctccctcaatatgtcatggtattttcttatttgctatttaatgtcattctaaaaaaataaatttttaaattattgacacaaatgttatgttcatcgtcacattatgcaatgccagttttacatgccactgtaacagcactgaactcctatgcagatggaatcactgaaattacacaattcttatgtagtagcttgtccctggagggtgctttcagctgcccagaagacagaaaaggcaagccagactcgggaagtttggaaggaggaatagaggcttcccaggagcacaagtccaccagactgaacacttcctcaggccaggagatgcttagggcaattacagaccctcccaggcactgaggctcccaacctgaaacactcaggcctgagagctgctgggttcctcctcctgccagtgttccatgggtccccaggtaagccaggaatctctccttcccagggcctgtctccccagtccacagcagtcaggtgacccccaaaagtcttcaaacctctgtgctggaacatgctaattatttggatgggtaatgagtttgtctcctctgcccaccagatgccagcactgccggctggggcaggtgacagctgccaccatgcccaaccccaatcttcctcttgcctgtgcccagattcccaaaaggaccaaaggkyaacattggaacacaggcctcccccattgacaccatttarttgccactttgttggagggtgcagcagtcgcagggcaagaaggagaagacaggctggggagtgagtggccaggaacccatcttgagaggtggcaggagacaggatccagagtcgaccccgtttccagtcccctygctcacacatgctcagttggccsactggacttcactcacataacmcaaattcaaaaataagattgttaagaagttcaaggtggggcagcagagcattaaacccagtgcagggccctttctaagcgaaggacctcatgggacccactggttgcacacacataaagccctgcccgggtctgatgcactgcacagggaatagcagctcacagccattacttctggatggacctatcaaacaacacaataaaaaatgtggggcagtgccacaacagactcgtcccaagagccaccgtgtccattagagaagggggtggtgcccctgccctcgagaaagggacatgggcacggtggggaagccctgtcatacagccacctatggatgtgcttccctcttccctctcccagaaaactgaaactgatccagagaaattaacccgcagaaattatcattttttccttgacctcctcttcctagattaaataaattgaacatgaactcaaacagtctctggttgaacctctcccaagcccccacactgggcaagcatagctctccctctgtaaagatgagcaagtggggaaacacatccggatacatatgaaaactgctcaagaatacaaatgaagagcgctgttttgaaaaacgcttatgggaagaaagagagtgacattttgcaaaatgttaacttcaggttctcaacaataattgagaggaaattgcacacatgaaaaagaagaactcagaaatcagggaagactgccttaaggtgaaacaactacctgatctaaaaatacagtggcaatactgacttgcaagttggatggtgcagaaaacaggagagcaaagtggtcaggcagctggggaaattctggaactcaggagaaaggctagttgtgaaaatcaagagggaagagaggagagaggcatgcaggaaaggtcctggcaattgaatagaaactgcagaaaaagaaaagacatcaggcagagaggaagctgtggctaaataagtaatacaagataattttcttgagttggggaaatccgtcttcagcccacaacccccactacgtgccaggccagggtataaaatagactctctgtgtttcctgcttttccttatttattccaaggataaagaaaaatcttggaatcatcctgcccaacaaaccaacaacgagggaagatactaggagggaaaatccatctggcatcagacttatcactaaacactaaatttcaggaaaaagcggaacagcctctctacagaattttaagaaggaaaaattgtgttgaaagtgctgtatggcaagctattgttctcacatgaggactacagaagcttattctcagtcattcaaagagtcagaaaatataccagacatatgccttcccagaaaaaaaattattttaagaaatactccagtctctctaagcataatattgtaaaaggaagcacacaaaaaaaactagatataattacatacaattttcaaatgtgtacaatgtcaaaaaaattcacaaaattaaaagagaaatgtaaaagtagaacaatacttacaaaatataaggcaagatttaaatcctctaattaacagagtttctacgtagcaataagaaaaaaatctaatttttaatgatgaagaacataaccagtaaatataaaagtttcattttcagcagtaagaaacaaattaagataacaatgcaattcatttatcgttgtcaaacaaacaaaggttaaaagtgataaagacccagttttagcaaaaatatggtgaaataggcatgttaattcaccaacaagagatgaagttactagaacttctctgaaaggcaatctggcaacatgtataaggcaacattaaaatatttgtgatttttaactaaaaatttcacatctgcaaatttcacatctgtaatttcacatctgcaaatttgccttttaaaatgatcaattatctgctcaagaatatatrtacaggaatattcatcacagaggtatttatttataagagcaaaaatgaggaaagaaactaaaaatcaaaaaataggggatgtaaaaatatactatatttgtacaatgaaattttgtgcaaccagttaatacacatattaatagacatatttatgggcaagaaatatgtttatgataatcggttaagcaacaaaagcaggttacaaaatagtatgtatgagccaattttgtgaatatatgtgtgtctgtgtgcaaacaaaaaaataattggaaagttgtaggtcagcatgttacctaccactggctatctttggatggtagaattataggtaactttttttttctcacttttcttcactgaatttgtattatgtgtgtaccaaatattgtggctcaagatcttggagatttgtttgttctatttgttttaagcaaatagctaaggaaaccagttaaggaaaaccaatgcattttttaattcaatctttgcaaaagccctctaaggtaagtgttattacaacactgcctcactttacagattctcagagaggttgtgtggactgcccaaggtcatacaactaacaggtggtggaatgactgcctgtcagcgtaatcctgaacaagccgcttaaccagagactctgtaaatgatgatagtaacagtgtcaggaagggccgtgtgcttcaatgagctaaggtctatgaaaatgttgcggaccagtatgttgaattccaaccagacaaagtagactgacacacggctctggcagtgcagtggtgatcgttaatgaggttgcctgaaatccttgtacttgtcctccctgttcctgcttctggcctcagaggctgaggaaaggagtgtyttcgtaacctggggcccacactttctccaggaggacagtggctcactctgcagtgtgctaattctccaggaaaaagaggggcccacccagtagacattttaagaaaatcactccagcaagcccagcagccggccccatcctagagacttaacaagtaaaatttagattgtaatcgttttcatctgctgtttgcagcaatgaattgattcaagtgctgtcgaacagcatttgttggtattggtttgggttactccccactcctacgttttggcagtaaattgttttgagaaatgcctgtgagaatgggctgatgagaaacccaaatcaggcataacagttcattggaattcacgagtcttatcaagatggtaataacactacgggtaggaggaacaacactacagtttcagcatcattttgtcacctgttttaagcctctagtgttccggggttattaaaatctctctagattaacattcctctccaagctaaaaattggcccagccactctcagcctggccacttggtaagaataggagacgggacaagaataagagatccattttgctcaggatgttgatactgaaaatgaagctttatcaccaagttattgtcaaaataataaccaccaaccactccaaatctccagtgacttaaaacaaccatcatttcttctcacccgtgcgtccggggtggtctgggatcagctgttttcaattgagctatgttggtcttggcgccaagcttcaggctgggcccaggtgtgtgccatgtgtctctcatttttcttggctgggcaatctatccagagcgtcttcttgtcatggtgatgtcaaagcgcaacaaggcaatctgtgccctgtccaccatcaacccaacagccaaagccagtcatgtgaccacaatcaagatattggggaaggaggcatgactgcccagagtgggagaaggaagagagtgcataygctttattgtttttatctaattatatatgttaaatatatgattgagaaaatgtgaaaataaagaaattatttggaaattattaaaattcctccttaatactaccacccagagagagtcaccttaacattttggagtatcaggcttgttttgaaatattctttaatattctttttttwaaaaaaaaaaaaagttataaagccaatgatagagctaattttaagaagtaaaaaataaccccaccatcttaaatttttcacagtatttttgcactctttccagcactcccccttgtatgcatatatgtatattatatatacacacgtcatgctgttacaagaagagcaagtttgcaattggcagttcttttattcaattcataagtattttcctcattacgactttgtttttatactcattatatttattgctgctctgtaatgaccttttcaggggccatgcaataatctactaaaccacccacctacagcaggatgttaaaccgattctttttttttttttttttttttgctattatggagcattctccttaaaaaaaaaaagaaaaragaaaaaaagaaaaaaaccttccaatttttaaaaactattatctacagaatctcttcatttgtgcaaggagtcagcctaggtaagaataccaggcttagccaatagccatgaggtgtgttgagctcagacacctcgtgtttccattgtctggtttttcgtgcttgtggcaagtgtaaacaaaatgtcagttctaacttaggcaaaaattctagagtcacatctctgcaggcccagcagcacagcactgttcatgcaacaattaattcaacaaatgctagccaggtctactatgtgccaagccctgtgatcggatgacaatggggaaaaggatggaaagatccctggtgcccatagagcttaaaaccccatggggcaatgcggacgaasaagtagcagttctagagccattagtgctgtaatgtgcacacgctcccccgcaaactggaggaaaggctgcctgaagggagagacactgtgttcaaagcaggggaacagagctggaggtagtcaggtcccagtcracctaggaaggcgtgccctagcagaggaaagagtacgtgcaaaggcttgaaagcaagagggtccagcyttctgaggaggagctcagtgcagctgaactaaagctcatccagcaccaggtgggacagtgagacaagagcctagagaggtgcatgggaggcagatctcaaagggctggagtttatcctgaaggcaagcaggagccattgaagggttttaaactgagaaaggggcagatttgaattctagaacatttactctgatttcagtgggcaggatgaatttatttggtttagggggagagmggggatcaggcagcaagaccagctaggaaaattctagttgtaattccagtaaaagtgtgctaagctagaaaagtacagtggggaagaaacaagatgaacaaactcagaagtctggaatcaagagtggacgatgcacccttcccatcccgtatactttatgagggttcctcaagatgccaccctaccccagccagatgactcaccgggttggggttgaccttgggctgtcccccagcatccttcctctgggggagactgcctagagctcattgccaattgcaggtcttcccacagggtctcagccagcctttggagactactaaagagccatccctgttaggaaacttctggtgctttttgtctctttgtaccagaccccccccmccccgcaacagctcctaatattaatagttatggtgagcatataatttattgtccaaactggacactttgagagaagagggattgctcccataattatgccatgacaacaggcattaacctggactggctcagacaagtctggatgtctggccaccctactgatagccacatgccaagctcactccacagtcatgacagtgcccagtggagaatctcaagcccctaacttacatgtagaatagtctcggacattgactcaaacagaccagtgttcaaatcctggctgagccacctacactcacttctttactctgagctttagtttcctcatctaaaaagtataaataatgatggctaccttgtcagaaatcgggaatcatttttataaatgttaaaaattggactatttatttctatctacattttagctaaggcctgagacaatgtggacaaattattcccaccttcccaccaccaatatttcttccaagtgaaagatgagaccatgtccacagagcctgcaaaggaagggagtgaagccaattctgcaacctgtcacttatctccagaatcaaaggtccagaagagttgaggctgggaatggccagtgtcagagggacagtggggctcagctttccctgtcggggaaggtaagtgtgcttccccctcactgtaaagacgccactaagataactrgataggggtctgcagagactgagcccaagaggactggtgttggacacccccatggggaatgtaagagcagtgaccgaggcagcaggacagaaagagcgtgggccctggacaaggacatgagccccaggaagggagagccagcctgggccactggacatcctgcagaggatggcctgcaggggcaaggtgacttcacagggcttaacctccagctgagcagggctgaagcagcaaacttaagtgactagtggagtgcagagaatgcacacactccaccatggcaagttcagtcacctgttccccacagtgcctctcaagagccccacaacagccctcattatagaaagtcagctttggatatctgcccggctagaggcaatcacacccgactgtacctcttctccctccaccgcaagtctcagccagcaagaggaaggaaaagctggccaagtagacaaagaaagtggaccacattcccatccctgggtgcagataatcagcctcaagcccaggatggacagggagcaagaagttttacttaaaattgtgaagactgaacatttttcttttctgaaatggaattgaatataaccggaagagtgtatgtttctgagaatgagcatgtgcataattgggctggtctggattttcttccagggcaagggatgaattagcaccacagatgagtgtgcagtgggaaaaaggaaggagttgtctcattgcaccctatgagtactgcctgcctcatgtgccagttaaagacctcaaacaccagcaggagtctcccttggggtctgatggtaggaatgcatttacaaatcaagacccttcaggaagcccagacatgtttcgttccattcctttgctgcaccaaggacctgatcgtattgtctggcaagcacagtaaatgctgtagaaaaacaagtgggcattgtttcataatgggcccttctgccttctatgaggctarttgatacttctttgcctttgtctccctataaggcagaaaacacatctgtgcgtacatgaccccatcccagctgtattcgctgaaaaggaatccactgtcaggcattctccctgcagcagcccctctcctctcctgctcttgccatcctctgcttaagtagtggggcacccgggagtcctgtttacagctaattagattaggagtgtattcatctggaaagatatttgtagttcaataaagagagtatgaagactctctctcatggttccagagacacaaagggttctgagtctcattccgacctgtctgctccctttcttcttaaacaacctgagcttctctccgaaatatctaaacctcagtagttaggttcaaatcgaccttctcamgccacaagaaagacctcaacttagaaagatgtcaaaggaagatgaagagcaaatccaaaaacactttcatgctggttttgttttttttcttcttttctttcaagggaaaaaacaatctctgcttgagttgtttgttgaaaaagaagaggaggtggaaagatcattgaggccagcaagggatgctgccctcctgcttcttcccccatctgttcaaaaattatttccaacatattaaatgctgcatttcactgaatcagaattgcatgacaggttgggggagggggtgaggagagagaagcaattctgaaatacaatttcccaaatgtttattttgctagctaaggctgttgcctatcccattataaaatctttgcacgacccctggcaggctgttgtctgtagggtaagtaggcgcagattgaatttcgtgctgtgtcaaggacaaaatgaatccttaatctagctgctgaaaatgcatattcactagagagcaaagcggctcccatctctcaagcttatatgcacttcatttctccctttgagatgattttgtatatcagatttggctactctttattaacccacaaacagcacaggcagtatcgaagctgtcaccctacgctcactcacccgccctgcttcccgctgtctggatttatcactgcacataaagcctcccttaagcacagaggaagattttcatgatgcatacaaaatatgggaattctatctgagttaccttcatgtcgactccagaaatatctaagcattatagtgctttcttattatattttaagatgaagaaaagctattgtttwgtaaaactggacaaaatcacatcttctgctcctcagccatcttgcaggctagcrgattaaagatgctaggtgatgaggagagaaacctcaatcctagttacttctcactgattctgtcagaaaaagagagttgtgttcaccgtggtgaattctgctctccagcagcagtgaggccacaagagacagaatgttcttccgtttcctttccctgttcatgaacaggccagacaggccgttcttgaattctgatcaactcgatgcccttctctccctactcaaggtgagaatctgcgtctctcacctgccagccatgtagggtgcactcccaggctcatgggaacatccatcatcttggccctgctgcctactgagagaagtaaaaagccaaacaccagttgttatgaaaactacaagaggaaattattttaaactccatacttctgaaaagcatttataattactcagcccacatacctgctctgccagaacatgaaataaagacttctgtatcaggaggcagtgtgagtcagtcaatgcctgtgctatccagcctgctgctgcaactagaggacaatctcttgtcccctggttaattatgtctgtcacctgcttcactctcccccacattccttagccatcaaatggagctcatgaaattactcatcacaggggaaacgcctagaatctcaagttcattggcatgtggaaagagaaaattccatcatttaaaaataatgttaggtggttggaattaattgtcatacactgttcattcattgttttttcaactaattccttccatgcaattccttaggaggagtgggagtaggcagagattatccagcccagctctagtcaaacgtctaggaggcaagactggcttctatatgatttcctagggaaatcatacagaatttccactcaaggaaatggttgggagttagggcacagtgatgagctaaaccactaaattaggtcattagtgatgacctaattcctgcaggaatataaggaagagcatgcatgaagtacaaagtccaaagattccagaggcagaaattgaggatagcatcactaagcctgaccgctaaagagctcaaaggaaagcggagcagaaagcagcaaagaggtcatggtctcatgttggtaacatatatttcagagccaacaagaatgagtggatgcatcagctcttcttaacagagcaggatatgggctcagctgtggtcacagagtcccaaatttggtgacttaagatggaagtgtttcccttttatgtagtaatccagagggaagcagtccagggctgggggaaagttaggtcattctcaacatgcagcttccatcctggggtctgaggtagctgcccgtaatcctgccacctgtcacctggagggaagaaaaaagaccaagtgaaggcacacatatcccttgggagaagttggcacgatggtggcaaatatcacttctttctcacaccccattgtccagagcttagtcatatggccataccaggctgcaacagagactaagaagtgcagtccctggctgggcagccctatgcccaactatcactgttctattattaaagacagagaaatagataaaggtggataactggggctctggaggtgaaaagcaccggctcagcctcaaaaaatgtaaagtctagctgggaagataaacaaataagctcacgataattaataataataatagaaagcaaatattaccatgtgcttaccaaacaccaagtatcctatttarcattatcttatttaatacttgcaatggtctgaatgttggtgtccccccaaaattcatatgttggaactaatacccactgttaatatgaagaggtggggccgatgagaagggattaagtcatcagggctccatcctcatggctgggattggtactcttataaaagagctcccttgcccccatgtgagaatccagcaacaaggcaccatttacgaagcagaggccttcaccagacccaaatttgccagcaccttgatcttgaacttcccagtctccatgaacagtgaacaataaatttctgttgtttataaattacactataaggtatcttgctatagcagaatatagacagagaaaatatagcagaatatggactatagcaggaaatggactaagacaatactgaaatgactctgctattatatgtattttatagataaagaaactgagacttagcaagtttagctaactgacaaaaggttaaacatggagcccagatacaaactaagtctgttggatcctagagtagaggtcagaaaactatggcccttgggtcagacactgccctccctgcttttgtaaactaagtttcattggaacacagcgatgccckttcacttacatattgtctatgacaacagcagaactgagcagtcacaacagagaccaaacggcctgcaaacctgaaatatttactgtctattcctttacagaaaaagtttgccagcctctgccctagtgctagagggttaggtgcagtcagctaggcatgcacaagctaccatgagacctagaagaggacacctaagagagaaaggccggggcaggcgaggaaggctctgagaggaagtccagatgtaaccaacccttgtctgttgattagcaactgagcagtcaagacagtggagctggaggaagagcttgtggtgagacctggaggtctgcggggataggggtaggttcaggggacccagattgttgacgggggtgggagaggagggctgtcaggagaggttggggacatggaggttccttgtggtggaggatgacattgaatagctacagtagcctgcagattagggtttccctacatggccagtcattgcagtcaggtagggcacttattcaaaatgagatactagggccccaccacaaacctacccaatcaggatctgtactttaaagaagctccctgtgagattctgggaaacactactgaagatgtaggaagagagtgaggaagcagggcccctggccagaggttgctgcagtcacccagggccagcagatgtgtatgcccagaggggtggaatggcaaggttttgggacagcctcttggtataaagtgaaagagcggagagaaagaaaatgagatcatcatttatgatcacggtcatggggaacaagagcccaggtcagtcctggtgagcaggtggccccagtgaggtcttctccactttcccctctgtaacttgaccttggacttcttctggtatcaaattccagttattacccccaaaaaagaaaaactacccacatcccagacaaattgcagtctggctgttgtagaaatgactaaacttttacagaatcaaaggtatcagaagagtcagctttgaggacgtgtacctcttcgtgctcatttcaggcccttggaggaatttttttttttctgtttgtggaagaatttgtttcaatggccttagaaaagaattgatttgtggttatctctgcatatgaggaggatattttatactcttgttttcttgcttttatgtatctaaaaaaaagttcaatcaccctaggggatgaaaaaaaaaaaaaacaatggaaggaagggaattcagtagaaagagtttaactgtacaatgcgttctcatttggtatgcggcagtgagagaaatgcatccctcgactcattcattgaataaataaatcatagggttagagcttaagtaataaataatagaaaaggaaaagaaagaaactaagaggagctgacaaggtaaaaataaataaataaaaagagctgcattcaagcaaaatgatgaaacatggagtgttatttgccattttgtcctctttgtatttacttgtcatattttgctagaattttttatttgattgtttattcactgcccccataagcttttgtactggcagagggtcaaagaggaaaggctctactttttccctgaaagtgacttatttcgctgaagttgaatgtgcatcgaataagcatcgtaccaggtgctgagtagttattgctactgatctgctggtgtgtagtacattttaagtcactaaatttggggattacctgttacatgaaaatgtgtaactgtaatacttggtgtttgttggtctcctttggatatgatatgatgaatttagccctgaggttttgcatgcggtgttagcaatactggaactatttccccctggcccctctgtgcttggttctctcttcctagccttccaggactcacacgttagataagacttccttcaagactcctttcttgaaagccccacatgtgrggcagatgtcccttctatgtgctgacacagtactctggactgcccttaatgctactaacatttattgagctcttacaagtctaaacgtcatgcatagattatcttttttaattctctcaaccacccaatgagataggtactattattaagctatttttattggtaatgaaactgaagcacagaaggattaaggaaagacttccaggttacccagatgggaagtgtttattgtctgtgctcctctagacggtgagtcccatgaagaaggagcccacagctgcctggtatggagtccaacagagtgcccagcacagtcwggwgcctgatgtttctctctctctccctccccttcccccctctccctccctcttttcctctgtgtgcctctgtgtgtataatgaatcatagggccacagggactttccctcaatatgagactcatctcacacacgggagattataaggtttacaaatcaaatgcacagagttaaattactttcttgaagttgtctatattaaagccttagtttatgagaactgtgctacctaatctagttaagcctgagatgacagaggcagaaaccagatgatatatcctctctctattctcccagaacttcctctgccagaccccactggaaggcagacctccagagcagtggtgtgcgccatctcccgggggcctttcccctgggtatgtcaggccagacaggccctgggtgcagaagagtagggtgtgtgggggtttctgtgtagggtcacatatggtttcagtatttttccccaaaatattcattctgcactcttcataaattagacacggtctccatacaagagaaagagagaaggaaaagatggcggcagctctcaaatcatctgtggacttcagaacttttcacccaaagcagtatctgggagactgccccctaaacaggcaaccaggaagcctcacgttcaaggactatctagcccagcttggcccattttgtgattttatgggatttggcagcttgggggcaaagcaaggaccagatacaagtgggctatgggaagctgaggatggtgctgacccggcctgctctacacctctccctttcttgttccaccagaacctgggctcaaatcccagccctactatttaccagatctatgaccttggcaagtcatcccaagcagtggtgtgcgccgtctcccgggggcctttccccgggatatgtcaggccagacatatctgagttcagaccagagcagtcctgggccctgcgctgccttgcataagggattctttcaacaacagaaaacacagaagtcctccaggggcctgaatcaacaagggaaggtgctcatcataagaggggccctcccagagcctctcactgggttaagggttggtcatttaatttgctgctgtttgtctgaggtgtgaatacttgttctttattagagggaatatccaatctgatacatggtagttgctctaaagtgtttgtagaagggagagagggaggagaggagggaggaaggctgcctcacagagttgtgtaattgaattgaacaatttgtgcaagtttttcctgtctcagtgcctggcacataaggggaaccccgcattagttctcttccccactctcgcttaatgcaagttatctgggaaacagcacatccaagcatcatgagtaggttagacatttatttgtaggacagattcatgcagcagaggctacagaaatgggagtctggcaggaaagtgtgtgtgaaagccaaggaaggctctgaaagttgcataatgtggtgctcccacaagaaaggcactaaggtaatgggagcggtggggacctgagcagatgggaggcagtgtggtggcacggtgggactgagaggcagaaagcaggaggaaccctgcttaccttctgcaagcgccactgcaggacagacggaggaggagccaactagcggaactgggagacccatggttccaacgctaagcaggtagcccttgtctttgattcccgggccttgaaactctccagcgttattaaaaataccaacccaagagctattttctttttttggtaaagtaacaatcccccatctgctttgagactttaattctggggaatggataaaacaatgcttatttaactggtgatgacattttttatctttttccaacagcagttacttagattcctccaagtgactttgtactgtttgaaaataatccattcaggtctaatgcaggtacatgtaatagaaaagggaatatactgtgtagattgtccacagcagtgcaggatggagagagcccaaatgtaaacagtgaaggaaaggcactgaggatactccctgctttgctggaagactggcagaatcagatgaatgagggattggtgtcattactctctttctcccacacaacaaagctttaagaacatcaattgcttgctgacattagggcttaaaatattaccaaattcgaattattgtatttactaaatatccatcaaaaatgggaaccagtgggctttctcgatgcatggaaatacacacacacatacccacacacagggaaacgttaaatgaaactattacacaaaatagtaaacatgtgccaactatgctgtaaaaataaatatctatcattgataaaggtcagaagaaattttgaagcaatgcggtagtgatctaacactcactaggttgctcacgctctttaagtttggaaaatttttcttggtaaatattcagtctttttcacatatgtacatttaaggtacatttaaaacgagtttcctaagaacataaatgctcaagaggaataagcaggagttgatgaggaaaatcttaatttgcattcctcctgcctcaaatgcctgaagtatcttggatataatgttgcgtgaataaggcttttagtgtttaatgtgataggacttaaacattctctttttgctagggtctmtaaaacatttgctattaatagccactacttttcatttttatctaccaaatttactaaggaaaaaaaatatgccaaggcttctattagtgtgctcaaaccttttctattatytggcaaataaatgtcactcctcttaaacctgggacagttcacttggaaagggacactaggtggtctgccctaaacatgatgcttcacatagtagggctctgacttgtcaacctgcttctgactgtgtcttttggtcttcctcacagttttgctgaagtaaataaggtgatatttctatagtcattggagatactgaaactgaaatacatcttccccaagtttgcacactaataacagtaaagccttggcttaacaccagaagtgaagtctaaaacattcaaccaggaaagcacaggtttgctatattttgaagttcatcgagtgacctggtctgcctgggccttccagggctcccgctgaggaatacaaactcaccctggccccagttgtgattcagcaccagccactgtccactccagctgaaatcctaatggggatgattccaagactaactagtttctgagatatcagcaaggattccaggaatctcccaggtagctgagtcccatttcttcagattaatccacagagaactgagcttggagagtgttagcaacatggagatcccacttcccaagacaggattgcctgccgttttcccacctaccctacccctcctctcgacatcccctcttccgccactgaagacaagaagttcatcacccaccccgaccgagaatgagggttgccgggggtatggaacttatttccagtggtgtcagatccaatcatggagttttcttgatttgtgtttcttctttgtatttgtagagccagacgcagaagacagatcatcygatttctagagcaaagccctttctctactttgctggcacacttcagaattatttacccctcccttagtgtgccaggctacagagggtatgcctatgcctgcgtagttcttgtctaactccttcctgtgaaagggagagcagtcccagacagaatcagaaacctagttcctcatccagtttcccaagtctggagttgccattgcacggatgacagagaaaaaggtgagggagtggggtggaaaagaaccatatcattcttgtaagtttcaacgtgttttgcaggttactgactcaacacagctcataaattctgcctgcatctcgcaagccacttgcttactcactatctctgctaaacatatcttgtgagtttcatccattctatttgtttttcttgtcttgtctggcagaatgaatattctcatcctacagtaaacacacattgtaagcagaaagatgtagggaaaaataagataaaacacagagaaaagttttgctttgtagtggcaggagaaatagaaactcaaacagataatagctgagtcacagtaatggtggagtctcgagcagaaagtggtgggtgctgaatgctaaggggtgacaaagtacctgtcactgagactgcatggtcctctgagatttactgggagctttctttctatggggttgtttctggtttttaaagaggataaatcatcattaatacaggtgcatcccaggacgccatacttcctgaccaactcctccctcttccagcccctaccgtgctggaaatcacacttaggataagaataaggatggaggtttcgtggcatgtgtggaaggaggaggcaattgaagaaggaggagcagaggaagctcagagacccacagaaaatatacaggatatcatgggatgactgctgctgcgtttgaacacatttgtttgttctaggaattattttgaaagtaaacatagtaaaggggttcatgtcttagccctttgaataataaaagcaacaagcatattgtccrattcaagccatgtattagtttccttggctgccatatcaaagtaccacaagctgggtggctgaaaacaacgtaaattgattgccccagaattctggaggctggaagtctgagatcaagatgtcagcagggttagttccttcttgggggtctgtgaaaacatttattccatgcctctcttccagcttctggagacagctggcaatctttgccattaactggattgcagaagcatcattcaaatctctgcctccaccattgcacggccttccccctgtgtcttcatttctgtctcttcctcctcctcttcttataaggaccagtcatactggactgggggcccatcttattccagtatgacctcttcttaactagttacatctgcaacgactctatttccaaacaaggtcacattctgaggtggggttaagacttcaacacatcttttcgagaaacataattcaacccataacagtccacaattaagaaatataaatttgcattttatttattttgagtgctcattctctatctctctgaaaataggaggattgagtttttcccagtttaaagatttatggtagatttcacgtataaactgttttatatatgacacaaactgttaaccgtggttatctcacaagagttatctcttaggggaaggtgacggggggtgggggggctttcatttctgcattgtaaatgactataatgtttgcatttctaaaacaaacccatgtactaccttgcaataagaaagaacaatgacatactttcaaggagttaatggcttttctttccctcgcagcctctagcatcagagtctccttaggagagggatcttcatggatgaggaaaaaagcaggaggccaggggcatgtgccatttggaaaattatgctaaagctacaattgttttgacatgcttgtctttagacattactttattttaaattttaaaatagcattaaaggaggactcaaggttttcacrtttacccgaagggagcacggattttcaatattgagaaatacaaaggcttcttgcagccactcatggaggcttccagtcagcgaaggcaaaaagggaatattggcttttaaagctttcatccaaagaaagatgcccagataaaatacaagatactcagtcaaatttgagcttaggataaataacaaatttttcaagtataagtatgttccaaccattgcatgcatgagacatactaatccaaaaaattattccttgtttgcctgaaattcaaacctaactaggcatcctttattatttatgtatgtatttatttatttttgagacagagtcttgctctgttgcccaggatggagtacagtggggtgtgatcatggctcactgcagccttgacgtcctgggctcaagcaatcctcctgtctcagcctcccatgtagctgggaccacaggcacatgccatcatacctagcaaatttgttattttttgtagaaaccaattttaactatgttgcccaggctggtctcaaactcctaggctcaagcagtcctcctgcttcagcctcccaaagtgctgggattactggcacaagccacagcacctggctggtaccctttatttttatttgctaaatctggcagccctattccaaacataccaatttagataagctttttctaaaatttagaccacaggagagattagtcccagaagtcactcataaaaggagtaaaatgaggttgtarctcatcacatttttctttgctgattttgyacaagccatggaaatgtggttcaaatgaatcctatttttgtcaacactttgtatcaggagttcttgacaaattgtgcaggagttgcagggggtccgtgagcctcctgaaatcacaggccaggttaaatacacgtgcatttttgtggggaaaggaaccacaattagattctcaaaaatgtctgagacccccaagaaggtcagagggcaccaccttaatgccttaaggccatagctttgaacccagggaaggcatttttttctgagggattaggcattatttttcagattaattacttttcagatgattgactttctgatggcctaaactgcaaaatggagaaaatctcagaaaatgtaagaatgggaagtttagtctgctgaagcatccctcccaagtgtttgagatgccaaatgttctgcatgtttcacaagagctgagcggaagccaggtcaagggtggtgctgatcattgtgacttccctgatgaagttgaaggttagagacatctgccttgaataccaaaagcccttaaagcgagagattgagagtgggaaacagacacacagagagcaacactcaggccatgaattttcttactacctttagaaaataaatgaccattttgataattgctactttattgttttccttagaactctttcatcaatctaccaacagcccttaccaacgagcttgactggccccaactctctggtgctacaggatttctggaytccactgttgggtaagtgtctttgtgcaccctcagacatttcaatacctctgtgtaaggaaagaacaagagatgggggttgctaccaagatgttgaaatgcgaattattaggaactgcttctagaacatgaatttgagttcatccaccatacagtaggatgtaatgcaaattgtattttagcagcactggcaagaaaagcatattcctgctatgggcagggtgggggtggagttccatagtttacctctgatggaaaatactaaacacatcactgraattttctgattcaaggaaaaacaaagtttacttatttgttctcagaaataaatttgtaaagataatggccaaagctgattggcacttctcaaagtcctagaatcatcctggctttaatgccccagatttgtaggtagagaccaggcctggtragtttgaatgacacacaaacccaattcactacatatgcctgggtgttaaggcctggggtctgcttcccagggcccacacttggcagggacacctgtgatgctggtgaaacttggcaagtgtccctaacatggtagtaaaccacagatatgagtctatggccatcccaccctgaacacaccagatcttgtctgatctctggaaggtaagcagggcctggttagtacttggatgggagaatgtcacagatatgagaggcaatttctctcccaacatctcctaaacatttaygacagttaataggcacaaggaagatggcaaatgaayggcttccatgtgtaaaaaagaagaaagggtagagctttgcttttaggtctaaagacaggacagaaccagctaggaagcccctctctgactcaggcaaaaatggcagaaggctggaaagcaccatgagataagccatgagaactgtgaggagggcaagtgtgcatggggtgtgatttacccaaatctgtaaggaacaggaaygcccccaaaggacagacattaatcattttaacaagcaattattctgatgaacaaagracattgtgtgccatgaataatttatttgatgatttttattcatctgctttaaaaatatttcttaaatacttaaccacctaatcaggcacagatgttacaggtgtccatttaaargtagatagggcttgtcccatctttgtagtcaattgcaattaaggcagatgagacaagtgaacaaataatggtaatgcaaggaagatatactaatgacaggtctcctacagagccacggggctccgaggaaaaagagttcatggaagtgatcaacagtcacttcctttgggtgggtaacacatgggagactggggtcataaaaggggyatagaagaaactaggaagggaactaaccttcagggaagcgtactcatatttacatagaaataatctgccaatatagggaaagccaaggagatgtgttttccagtgtagttataccttttcaaacttaatcatgttattttaaaaaaggctagtccttgtcattagtgtaaaaatactaaaatacttactaatagggatagtaagaagtaayctttgagaagtaacaagtaactatatgccaagcatttactgagtgttgtatagatattctctcatttaacctccttgtgaggtagtgggtattgttctctgcatttgcagttgagagatccaagggcaaatagacagaataagaatcttgaccaaggttgcccagccaagagtggtagggtctgttttcatggaaccttgtgtcatatcataacaaagatatgttcttgcctctcaaactttgtgttgtttttattctttgtgtgggaatatggctcactctaaccattgtccctctgtgtgagagcatagctatgggatggagaaatgactaagaaccaagagaagtcctccccatgtagaggtgtggcctgcactatttcagtgacccatcatatgcctccttagggtcccaataagcacagacatctgggactttctgagtcctagcctcagtcccatcttccctctgctacagcctctgttgtctttacctggaacacatccagagataacccagccaaagcaggtttatagaagagagaaccttggtcatccccccaatttcaacatcagaaaataaaaaaatatatatgtttaaatgccctccacccagtctagtcatttctcaataaaagtatctggaattttctctcaatcaaggcttttatgacaataacaaaaagaattaattaggtatgaacaatgaacacagtttactgtacctttaatgaaagcttaaatttttacatattgactctataaatcccaactaccttttggccccatgaagttgccataaaagaaataccratccgatatttaaaattaatttccaagtagtttaaatctttactggagtcactcaaggaatgaaagaggaatccattcaccatgcccagcaaacagataaaaacatgtttcctcatctctttcygcttacagctcgcacacaccagtagttgctctgtatttcctaaatctaaacttccccaaaacttgacccacacttagctccttctcccaaacagactctgttcagtcattttgagtttctattgggggatgagagggaaagctcccttttcctttctgcatctgttctgtcctcccaccaggggtttactcccttatcaatgtaaaatcccactagctcttcaatcctgcagcagtttttacccatcakcctgatcagtgcccagcaggcagacaggatcttccatcaaagcatggcaatggggtaaggggaagaggaaaagttgagagccttcagacatgaatggtttctaactcttataagcattatgcagagaaattctgacaccatctcacaaagtaagtgaccatctaggtgtggcttatatgaaaaccatctctatcctgagctagtctttattgacctagtacctttttatattcggttctctattactgcttacaaaaaacgcatagtctgcttaagcaacttccttagtgttgactctaagtcctgtccttacctgttgtatttctaacgaggcacacaccacagctggttgttcacctcccctgcaggaacttttctttctatgtgtttgtgggaccccaagctccctagctgttcctctcagaatgctctttttgccagctgtttctgtgtactgtgcctgtgtttgctgccactcagctggagtggagaagaatataccaactccttttaatggaaaaggaaattctgtttggaatctgagttgcaatggattcccccattaagcagaaacagaggcagcatgacactgcatctgtgggatcataatttgctatgtccctcccagcagtagttacagctaaagtatmcatataccattgtataaattatattcacagataatttgtgctaggccaatctccttattaaaggaataraaagttataaagtatataaaaatatcaaagagattagcatatgatggaggtcctcatttgtggaatcaggaaaatgaaaagaatgttgacccagargcagcacttctgagaggtgtatacagctcccatgggcattttgggcacaygccctttgaatccaaatgcttatccacagaattggcggatttctctattcaactggatctccagaatgcgcttcctaccatcatgatcagcctyctgctatgggtgtcaacagcgtcctttggaaaatgtgccttgtgaaagcatcaggagaggaaatggctccttccctttcattctttgtttatgctctttgtcctctcaaaatttattatccccttcatagataactttaattgaaattatgtgcatgcattaaatgacaaacataaccccttagttttacaaacctttagttcttttagttgagttgatgttaacaaaaactgttttcttgactcttgggcttcagaaaattcaataagtgatatcccttaaaaaatatactgggatttttcttcagtgtgattcaggaagagattgagtaggtcaaaagcagaaaaaaaaaatctctgtgggggttaagagcttggcaatagagcagtataactgtaaataggaagaaaaaagtatttttaaaagattaaaaatagctactgggcatctgaggtgaaaagattactggaggccaggagtttgagatcagcttgagcaacatagcaagacctcatctctaaaaaaatatttttttttaattagcctggcatggtggcatgtacttgtagtccttagctactcaggaggctgagacgggaagattgcttgagcccaggagtttgagattgctgagattgctgtgagctatgatcacgccactgtactccagcctgggcaacagaacaagaccctgtctttaaaaaagtaaaaataaaaaagtaaaaaaaattaagattaaaaattgtacttcatgttcagatcactttccaaagcaattcatataacaggaaaatcctacttacattaaagaaaccaaagatctaataccacatgtagaaagatgggaaacaataccaaaacttttacaagaaggaaggacttctcatttgaaagcatcatttaaaatcccagagtaggcatgatagagtgaaaggaagtctgtattttcagttataagggtgctcattctgtgttattccaggtggaacatttagcattcctcaacctcatttatgtgctcaagttaagttggactagatgatctctgacgttctctcccacgctcattgggcatggttattgggcaacatgatcctactttatgaygctacttggtttagaagtactgagggaaattgttcaagagagatgctcctgcttctgctacccactatgtcttcccctactccttaactagcctgtacctcaagacaagacatggctaactttatgggtcagagcctgaagttcttgaaacagtgtttggccagggtatagagcctatggtatagtgcagtctcatgcacagtaagccctgtgttgtgtgatattgagtgcttgacaggctgttaaataaacatgggactccattattgtcctttatgtttactatatctctccagcaaacccaaaagaggaaaacaggcatctaagtccttaacaaaaatagccacctgaacccaacacatctaaactgagcatttctggccgttcgtatccccttrttctgaaggtggggccaggagtcagtccagtcagtagggttctgcagacaaggataagtgataaggatgaaaaacagggcagcaatcagagctttttcaaaaaaagtaaaaagctaaaattcatcataaaaagcaatgaaggccaaaagaaccaaaagcagctaccaaaattgtcacaccaagctggagaaataaaactgagatctgtagtcagcataaatgagtgcaaaccagatgacattttctagattaaatgttgctccctctgcctccagcttaaatttggcatattgaaccaaagatgtagcaaatactcagacaaagccattgttataagtggtacaataatgctcttcaggggcatttaaacacacctttagtgagaggtgtcctagaatagaagcgttaaaggttatctattctctcctacccaatagatgttatatgagagaataattttgaaaatcagtgtataacactgaaccaagtcacttggggcagtaaagccagaaaattggagagtagggaattgcagctaaaatttgctaacctaatttcatgtttcaaaaaaggacatgtaagtactaaacactaatgggcctaataaccttattaaatccattattcgcaaattacatgtgatataattgcaaatgattagccctgttataattatactttgcaaaacaaataattaaccagagaggtggtcctctgaagttgggtgaggctgattggagtgggatagtgtccatagcagcagttctccaagtgtggtccatgracccctgtggggtctctaagaccctctcagggggtccacaagtgaaaaactactttcacaacaatactaaggctttccactatgtagccattggtacagatggtacaaaagcaatggtgggtagaactgttgacacgttagcgtgaatcaagygctggcaccaaactctattagtagtcactgtgttcttcacctcccagtttaaaacaagagggggacatcctcccttaaaaatgtcacatagtacaaagcagaaaaaacattattaattttattaaattgatttttaaataatttaatctgatgaaatgtgaaatatgcataaagmatttgtactgcataataaattaacaaaggatgatggctgtcttagggaaaagcacttgtgtaggcgagatgagagctgagttaacttttcatggaacaccatttttattgaaaaattacttgataacaratcatggtttttcagacttggatatatggcagataytttatctaaaatgaatgaaatgagcttgtagtttcaaggaaaataattgtttgaaaatcatattttcaatgttttgtttcaaacattgtttgacagtattgtttgaaaatcataaaatttgagctttcaaagaaaatatttgaattttgaaaactttgcatctgctagtatgaacctgacagtttcctaagagtctaagactcttctaatgtgatatgtagcaatattaacaaaaatgatttttttatattatagcattaaatgtatcaacatttggaatatcttcataactcaggaaccaatattttctaaatattagtgtatgattaagatgatgcatgggtaaaagattcattaaaagtgcaagacaggccaatgcattttaacgtaacaaggtattaaagataattgatataatttcagcttccaccttgcaactaatcaatctttaagaaactactacttgttgaattcttgtgtagaatcaaagacagctatccatagttatctaaaaaggatactgaagtgctcctcccttttccaactacatgtgtatataaaaccagattttcttttctttctttctttttttttttttttttttttgagacggagtctctctctattgcccaggctggagtgcagtggcgtgatcttggctcactgcaacctctgcctcctgggttcaagcgattctcctgtctcagcctcccgagtagctgggactacaggcacacgctgccacacccatctaattttttgtattttagtagagacagggtttcaccatattgcccaggctggtcgcgaactcctgagctcaggcaatccacccacctcagcctcccaacgtgctgggattataggaatgaaccactgcccccagccaaaactagattttcttaatataccctcaccaaaacatcgtaacagactgaatgcagaagcacatgaatctacctgtcttctattaagccagacattaaagatctttgcaaaaatgtaaaacaatgccattcttggagggttttggaaaacatatatttgtttttagaaaaaaagtgacaagttaacatgtaatggatttattataataatctaaaatgaattgataattaaatgtacatttaaatttcccaattttaatacctaatgtgataaattttgacagctttaactcacataagcaaaagctctctgagttcttcaataattttaagagtgtgaagtggtcctgagagcaaaagtttgagaacttttgttctaaggagtaagtataaaaaggaaacatagctgaagacagagaggctaggagatgctgacatttagagatctgggcagagaagattgaaaaggaacaaccctgaaagtagaaagaaaactggaagggcttacagtcctggagggcaaggaaataaagtgtttccaaataagaagagagcatcagccaaatgatgggggaggcagaggaagatgagagctgagagtgacaactgggtgtgcaagacagggacctggagagacctggagcagaaacatttcagtggggcgaagctggaagcctgattggaaagaatgggttcaggaggtgatgacatcagcttgggtgagcatgtacaacttttaatgggttttgcttcagagaaatggggcaatagcagcaagggaataatagatcaggaagacttgttaaaatggaaaatcctgcagcatacttgtattgataggatgatctaaaaggcagagaaagggaatgaaggaaagaatgaagcctagagaaggcaagaagggatgggacccaggcataaggaggcaccatccttgggcaagacggaccatctgtagacaccatggatcctggtggagggactctccctgccatatattgacaaagcccttcacctgcaatgacttccccttgtccctatttatttttaatttttcatttttaattactcaaaatatgaatatattttcattgtacaaaaaaattaatgtgtataaagtaaaaagctgaagtcctcactttttgtccccagttttactccctttcttagaagaaagccctgtgatcagtttagtgtgattccatccaggccctttctgtgtattttcatttgtacatgaagaaatgaacactttgttgggattttcccataaaggctatcatattgtgtttaacmtactgtaaatcagtgcttcaccttagccatacttcttggagctcttttccttcttgtccaatactgcatagtgtttcatagcatagttatttttttctcctacaggtggacatccaacttatatccagagtmtcattattcttcrtaatgctgcaatgagcattttgtaytgactctttggaatatgtgtgaggatttcttaagaaaaaattattggacccaaatgtttacatttttaattttaataaggcctccaaatgggctataccaatwtatattcccacaattagtatatgagaatatttgttttcccacacccttgccaatactggatattgttcatcttcttaattttttccactataacaacaacattgtattgttgttctcacttgtaacctcctgactactagtgagtttgagcatcttttcacaggcatcgcccgttgtctttgtcctatctagtcgccctctgcccatgctgcagcacctacccctcagggatcatcccccagcctctctgtcttcagctacatttcttttttatacccctccagacagccccttcatactgaccccccatctaactggatgattattttctgagatcctatcatgtccttcaataccaatgtcacctcacttataatacctgtttactacttgtctcatgctccaccttcccatgcccagactctgagcatcctgagtatgggaatcaggtgacttcattttgtagccctcttacctggcacagtacatgacacatggcaggtgctcaataaaagaattgctgaaccagctcataaggatatcagtttgcccatgtagagtgctttacaatctgcaaacctccttcatgtgcattttgtcagattatctaaatcaaataagatttgttgggattaacattttgggggaaataggcaaaggagtatagctgaattagcaactgcatgatgtgatatgtaaaaatatgtaaaaataaatcagcgtaagttaaacccttggaattctaagtgtgtcctataataagtattctgcaagaaattagcaaaattaattaaaatattaaatcacacaattaacattaaaatattagccatatgtaatcaacaaataggagaaaatgaatttaaaagaaacatcaattcagtagccaagtggaaaaaatgaaataaagagatttgctaagaagtgaatttggctaatgataagtcaaaccttgatgtgaatttttgcccagaatgatgtaaytttgcaacccagattaatcaaagtaaatgaacactctacagatttctctagtagaatcgttgtaaccaactgaacttgagattttaggccacctcaatgcttaaatacagatcacagagataattcatcaatattcttcataaactcttctgcgaaatatgagttccacaaaatgttaaagggtactaacacacatttcttaaaagacgtgttaagtcaaataagttttggaaatgttaatttaaataaagggaaacaagcttatttggtataaggcttattatagccttcactatgcgaaaaagcattgtatatcctcaaaaaatataaaacattcaaaaatatataaaacatttcctaaacttatttgaccacagaactatgtagaatttgtgtgtgtgttttatgagaaaaattcaaagaaactggtgtttcacagaacatcctttgagaaatgccgtttaggtcattaaaaccatctgctatgtcacaagtaatcttttcagatgtataagcctccacagccttaaatgtctccactttatcacagtttaatgttcaccctaatacagtggcctagaatcaaatctggggctgggaaaggccaggatggagagagctacacctgcttcaagctcagagaacaggaggggaggaaatcttagtgagaggttaacctaacaggtaggaagccttgtctgagcccagcagctcatgaattattgaacacaatgcctatgaagtctttttccctgtactatttttctggtccaaattcaaaatttatcatgctgtcctgctaatctttttgtatgtgaactcctaggacctcctctgtagccatcctcacctctgcataattagcttattgccagtctctctgagtccacggtgagtcatattctgtatgtttatcactctctgaggctacatcttagttgttctatgatgtagtgagttaggggttacacagaactctgggatgtggctaatatcaarggactgaaaggaatcttaaaaggtctttaatctatctccctggccctatgctggcctgacctccatccacattagaaagaaagttatccacccttttcttaaattttcctakcagaaaaggtccctggataaagccttaaagcctgtctagtctctaagttacccaagtttatcctaatttactcccctccctaactcttcacatcaaatatctccaggtatttctcaccaaccctactgctggagcctgttttttgtaacttattccctaagattcaacttaatggagactcataatttatacccaagcaagctgtgcctctggacagagtcagaaattgcctaacaagaggatcacctgaggtcaggagttcaaaaccagcctgaccaacatggtgaaaccctgtctctactaaaattacaaaaattagctgggcatggtggcatgcgcttataatcccagctactcaggaggctgggacaggagaattgcttgaacccaggaggtggaggttgcagtgagctgagatcatgccactgcactccagcctgggtgacagagtgagactctgtctcaaaaaaaaaaaaagacactgactaagaaatttcatcagaatatgctacatcactcttgcttgaatcatatcacatctggtttacctcagagatctctggcaggctacaaagcctttggaagaactccatttttgcctctctccaaataggttctgccttgagtcaacatgggaggcmatcttttatttcattttaaatcaacctgtttaatttgtctacattactcttgaggcccattcttgatattactctgttttgttctaccgaaatgcagtgggggraggcattaggaagctctcagaraaagtgatttttttgtgttccctgagccaatgttgggaagagtaacagccattctgtttgagttttactcattttgaattacggtgctagaaatcaaaacccaatcagtgtgttttcacatgaaatgcctgtactgccaggccctccagtagaaggagctggtgaaactggaaagttaacgtgactcacttccatgcctatgcctggagttgaggattcagttctgtaggcattgggcaaagtgtggagaaaagaacttttaagtacccgtcttgtgcatccctcaacttacaagcccaaaagcagtcacctcctcctagcacattggaccggattttgatatatacaacagagcagaaagagaaaaataaaagatcacactggaacactggatttttgtggagaaaggagagcaagaggaagaggatttgaggccagaatcatcatgatagtttagcctcattatgcatagcatcctagtagcctcagcttgtcctatgactacaagctcaagaccctgcatatatataattttctattaagctatcytctcaatttgcaggcatatcaaaatattatattgatcccactatatactcaggatttctgagcactccttgagaaatgcarttcctaaaatatataagagagattatagattcgggatggggatgaaagaaagcagtatcttttactatgtgaaatactttctagtgcttggtacaaggctttcatcccaaaattctagatgctatttctagtcagaaatgttawtagaactatctcctattggtaaagatttctatattcttataatgaaaggtgcaactaactgtatctataatattaatacctacactatttactcttcatgagcaggacatgagcaaaacaatattttggtatataaattccattctcagaatgatcaaaaatacatttgtgactaaataggtaagaattactttcccaaagaaaaataacccctctttattgaccataaaattattttagtatcaaactcagatccagtgtccatttcccatctgtttttccaaaatataataaaatactcaaggcagagggcataagtgaygcagtgtataaggtatccatttcaggcttttgagtaagatagcagattgaacacaagcacttacatctctcccttgaaaagccctactctaacgacagtaaatgaatttgtccaagaggacgaagagaacaagaagagccaacagccacaaaacgttggaagctagaaatcagacagatgaatggtaactgacttagtagattcaggagagctgcatcctaagctggttggagggaatgccaagaagcaacccagttcacactgcagaagccccagaagacttggggattggttacatgtgggagctstagaaatgcaggtgaggctaaaccagaagtattggttggaagattgctgaagagcagttagctcctcagaccccttccaactctscacaggtggtcaactgcccctcccatactctggaataagactagagctttattctctggaaacactaaagtcaagggcctctggactggaagacaccaaacataaatgaggagaggagtatcctacggaaacacatgaatgctaaatgttgaggacccttccctacatgccccagagtgttgccaacccagcctgtactctcctggctgcagactagaagatccttccctggggaatctgaacagcccaagaggagagtcccacagatgctgacagcagggttccccaagaaaggcccagacagctcatcttgcagtgagggctgtagtcaacaagcacagccaggggcccagcttccaatcaaaatcaattagctttttagctggcaactagtttcaacatttaaaaataagcctataacccaggatcatcamacatctgaaggaaacctcaaacatgaaagaaaatacagaaacaaaggggraaaaaagcaacttagagaaacacagactatgtactaagggggataaaactttttagaaagtttaatagcctacatattaaaataactgaaattaatatcttcaaaaagataaaagaattctatagcagacaagtgcttcaaaaaaggataaaagaagatgttacattcataaaacaagaacattaaaattaaaaagatattcagagaaccaataaggtcatttggaaattattctggtaatagcagacgacattcatagaaagattaaaaaataaagttgaggatattatccagaaaatggagaaaaaggtccatgacatgaaaataggacagagaaacagggaaaattacaagaccggttcagatgacccaatagttgtagggaaaaaagagaaaggaagaaatcatcagtgaaataatttaaggacatctctcaaaactgaacatcatgaatttccaagttgaaagggtttatcaaaggtctaacactatgagtaaaatcagacacacaccaagactgccatcataacatttcagaacacttggaatgaggtgctaccataggctttcaaaagatcaagacacagagttgcttcatacttaacaatgctggggaggctaaaagccaaaatcaatcaattccttcagacttgtgagggaaaaatatcataactgtgatggttaatactgagtgtcaacttgattggattgaagtatacaaggtatcgatcctgggtgtgtctgtgagggtgttgccaaaggagattaacatttgagtcagtggtctgggaaaggcagacccaaccttaatctgggtgggcacaatctaatcagctgccagcatggctagaatataaccaggcagaaaaaatgtgcaaagagagactggcctggcctcccaggctacatctttctcccatgctggatgcttcctgcccttgaatatcagactccaagttcttcagttttggaacttgarctggttctccttgctcctcagcctgcctacagcctattatgggaccttgtgagagtgtgagttaatactaaaaacccccccatatatatatatattcattccattagttctgtccctctagagaaccctgactaatacctaatacagatttatgttattgttgtataacaaactgccccaaactttcatggcttaaaacaatagtcgttttattatatctcacaatttggggggggcggggttcaggaattcaagcagagcttggctggccaattattcctctctatatgaaattatggttactcagtgacatcacctaatggctgggctgggctggrctgggctggagaatccaagatggcttcactcacatgatgtgcctgggaagggacagctggcaaggctgagttcagttcagctacatagggccattttttttttaagcagttttaggcttatgaaaaatttgaggtgattgaaacatggaggcggatttctcacacatggttaagcaccatccctgttggtactgtcctcaggatagggagtgagttctcatgaaatcttgtcatttaaatgtgtgtagcacatttgcttgttctcctgctctgctttttccatgtgacatgcctgttccccttttgccttctgccrtgattagaagcttcctgagacctccccagaaacagatgctgctatgcttcctttacaccctgcagaaccataagccaattaaaccccttttcttataaattacccagtctcaggtattcctttatagcaatatgagaatagactaatacaatgataaatacttagaaaattaaggaaagaaacaaaaggcagttattaactctacagaaataaaaaagttagaaagaaattagaaagcaatcattgattagttgtcaatagctaaatcctcttctagagtaggaagtgaacagataatgtcaaagactaacaatcaagaagtagccttaaaagtatgttacttagagatgaggagaaaaacatcaaaagacctagtcaattaaggctggaattagttgcctatggaaatggaaaaatggagagtggagggaggtgtggggttgctatttatcatcacaagtcttatatacacacataggtaagttatttggttctgtgagactcaccacctcaagtctttgttgattttagcttctcaattagacttcctttggctactctaattctcatttcctttcttcatagaatttagaactttctagcatactctatcatttgcttttttataatgtttagttcttttattggccttttcctgttgaaatatcaacaacacagaagcagggatcatgtattttaattttccaatataactcagtgcctagaataatacttggaatgtagcaggtgctcaataagcatctattaagtaaattactttttaaactatgtgcatgggtagctttgattttaaaaaataaatacattattcatctcaaaattctactacaaagcaaaaatctcacacttaaaatattgctcaggcatcttggtcttgtattaaaaaacactatcrttggttttctcagacttcaaaaaagggatactattttctatgcatcctgaatgcccaaacataatatatgcttacctttctgaagcactgagacagttgccaagcactgtaatacaattagtaagctttcatataacacttaataattggtgattgtatgtaaggttgtgagatgtgaacttattataatgaaaagaagatacaatacatttgaagattactcaaatattttgagctaagttattattttttagtttacatctggtcttatttcaaagattttaggaagcctatgaaagtttagagaacataacatttaattacatttaaactaaattttgttgcattaattaaactacttacatctatattaagcraaagaaaatgaaaaatcaaagatgagacaaaaaggagccaagaaaatgagttaaaatatatataattatagcctgatactggtgtcaaatttttccgtaagctctgtgtttattagtattagattcaaggaacagagattcaacatatatgagtttatttctctcacacagaaaggtttagaaaatgtgcagtctggaattgatatgggagctcaactccacccagttctcagggatccaggctccttccagctcacccctctgccttctcaacgtcaaccttattcccatagtttaagatggcagctttcctattctgggcaggagactggagaaagggtacaaagaaggaaccagaatcaccattcaatcatttcctaagaagcgttaccagaaattgccactggatagttctgatcccatctcatctcacccagaacttagtgatgtgccactcctagctgcaagagaagctggaaaacgcaatcctcattctggacagacatgggtcttgctaaaaattctataaattctattgtagcaaaaattctattrtagtgcatgaagggagaataaagctgaaggacaataatagtgtcaaccacagcttcatagcaaccaaaaaaaaaaaaaaaaagaaaggcaacatgrtcaggttcaaaataacagagtcggtaaaggtgagcaattgctcaagaaatgtacagcagctcttggtaaaaagcatttgaaagggatgactctggaggtctttgtacaaaagaaaaagttttatgtcttcaacagtattcttacgacacccatacaactcaatttcatagaactgcttctcataacaactgccaatattacattcacagttcagagaaaacttgtcagcagagatttgattttttgagttcattttaaccatatttttttaaaagngtgatgtaaacatggtttgtttaaacttctttatgtgagtatcctgaccttaaatatatacatatatatttgtttcagaattaaagaaaaatctatttaccttcgcttatggaaaagaaaccactgtaatcacagggactaccagaatatttcaagaaatggtacgtaactttccatttaagccttcatcaatgttcctgtaatgattgagtttatttcataagtacctcaaaagctgagattcagataacaaggatcacagaataaaatgaacggtctcccttccaatgccattgccctttctgaaagaagggccctgtgcttaaagccatttacccacagcaaaggagaacaaaaacaagctgcagtcaaggggttgaccaagagagcagatcattcacccaacagcaaagttctagcaaggccaaggcacaggatgttygaggctcaggaggcaagacctaaatgagcattagcagaacaagagctgagaaaaattaaggtcatcgcaaaagctctgccctctctgatggtgcaaagtctcccacgtttctgctggggttggagttttcagtttcacctgtgtgggtttcaatcttccaccttggacctggaggcggtctattgccacaagattctgatgaaacttctgattgataagccatggcctggctaatgcctaatgaattgccaaggaatgttttgtaacaccataatgcagagatggtaaacagtgtatgtgttgccactctgtcttcctaagcctgggaaagatattgctaatcagccttggcactcttgtctgctatgctcagattctgcctcagcagttctcgaaacacagcacgtctgacaatcatcatcaacaaattaggcttggcacatgaagttaaacctatttgccatccctgtgctatctctaattaacaaaagatgttgaggaattttccaagcaacaagcgtttaaactaagtatgtgacctacaaataatgtatttcttataataaatattctatacagaataaatgctctcctcttctaagaacaatatagattttttttactaataaaataattgctgccattaactgagctcttaccaagtgctaagaacactttatgtttatttctgttaatcctttcaacaacagacattgtaaggcaagtattattaaatttcttcagtactaatactattgattgtaatagctctagggagtgttgagggagggaaaaggaaggaaaaattacaatgttcccattgattgcagcattcaactcaataccaaatgcgttaaaatatacttctcagaattgggcattaaaataatattcacacygtagcagctggggaaatggaggcatggagaaaccaagactctcttcctcagccacacagatagtaagttacagaggagacacttctacccacgttgtctcactccactcagataccaacaaagataatacagtcattgggctatgatcccagatgatctgcagaaagagatcggcctcatccctctgcaagttgaacactatcaatagttaatggacagttacagtcaaatctggccatgtgactcatcacagatacaaagtgaacatcaggtgtgtggctgcactttctttttcctttagtgacatactgaaacagccccccaacactgtcaaataccctctgtcaatgaagattataaaaaacaaagcacaaaaaaaaaaaatcatctgtgaggaatatcatgcagccctagaaaatgatggctaaaagtcaaatatatttttatttggaaagacaaaacactgccgaaagaaaaatcaggatataaaattcaatcatacagtttagtttctaccacatttttcaaagaaagggaaaaaaaaggtatacgtaggaaagattggtagaaaatatagaaaatcattatgtttgataaattacgagtgatcgctttcatttttttccgcttttctgtttcctgatgattttatttgtatacagaaataacctttaaaaaactcgacagaaactgagtctaggagtagaacagggcttgtccaaggttccatagccaaaggtatgaggttagggtaagacactgagtgataggattctgccagaaatgcaggctgcaggctgctctttgttacttgtgactctaacccagcatttctctttcacaacacccaggtgtgcaaagtcgacatcacttttctacccacaataaatgtagtgatctttcataaaatcataaagaccagagtaagatratccaaaaagtataactaggacacctgatagtaaatggttgtccttttgcgatctcctgtcttgacaacactcctttaaaattcagattgcaaagataaaaggggagacaggagacaggaagagagcctaatcgtgtcaaaatgtgctcgaaggccgtggcttttgtcagacttttgtctaatgaatagatgccggggaataggggatattttcttccttttctttgaatttgcagtccttagaaatgcataaaatgtatactttgtctagtattactatcctcgactatttttctaagactgtaatagtaaaaagatatttttttagtttctcagttactcattatttaatgttctggttttactctccagcccctcttcctattttctcttgtatttccttgctatggactttcttttgatattacgcagcaatgtaacctgactacccatgctaaattacttcaattactctccaaggtttttattagatataggaaaagtcagcttttcactttctgcatatttatggggctacactgatttttcagaaccagcaagagagaaaggggaaaaagggaagagttgaatagaatagtaaagtgtttcttaaaaattgggtagtaagaattaaagaaacagctcctattttcatcctgatccttatgtaagagatctcaaaaacgtctatacataactctgtcatgaaccccagtcagtgattataacgcatttttttatttttttgagacagagtctcgctctgtcgcccaggctggagtgcagtggtgcgatctcagctcactgcaacctccacctcctgggttcaagcaatccccctacctcagcctcccaagtagctgggattacaggcacatgccaccacgctcagctattttttgtatttttagtagagwcagggtttcaccatgttggccagactggtctcaaactcctgacctctggtgatccaccagcctcggcctcccaaaacgctggggttacaggcgtgtgactgtgcctgaccctataacgcattttaaaatggagaatggagaagtcatctttaatccagggaatgattctctggtgcaggggttaggaatggcaagagtgctgccaaatcttttttgcaatcaacagaggaggggcttgcagtrgctctcagaacttcctcrataccaaaatggcctgagttgggaggcagccagcacatggaagagggaaggacccaagaactgcagagctggctggctcctctggtccttctctaagatggaaaatagggccctgaaaacagagagcagagcccttcctctcctgattgcctcatataattgtctcttttccttggggtataaagtagactggttttgaatttgggtcctggaattagtgtgtggcttgggccaatcattgaatgtctcttgcctgtttctgcatctgtaaaatggggatcatggttcattgagcacagttgccaaaggtgaccctggatctcattcagggttgcccagacaacaaaccaccttgaatgggccatcttccccatcctcctgggggagaggctgcacccaaactcagtgggataaggcagtgctggagatagctaccttctcatcttttgcaaacccagcttttctccattaaagccagttatttaaattatgccatgtgacattttggaattcatcacaaaacctggtgtgtgactgaccagatatgtcataccttgcacacagggatgggaacggtacatacctgagcttcatggggctgctgaagactgaatsagaaacacagggcttcataaatgtccagcatcagggtaccactgacacagtgtcgctaattccacctaccaactgtattattatttactcagtggttttgaaaaccatttgttttttctttcttttctttcctttttttttttctttttgtgacagggtctcactctgtcactcaggctggagcacagtggygtggtcatagctcaccataacctcaaacamctgggctcaagtgatcctcccaccttagcctcccaagtcctgggaccacatgcatgtaccaccacacctgactatttttattttttattttattcatttatttatttattttggtagaaacagggaccttgctatgttgtcaaagctggtcttgaattcttgggctcaagcaatcctcttgactcagcctccctaaaagctgggattacaggcatgagccactgtgcctggcccaatcatttttttcaatgtcaaaagattttttgttattgttagcaataatttcattttttatttattttttattgctgcataatagatgtacagatcttcagggtacatgtgatcatttaatacattcttataatcaaatcagggtaattgggatatccatcaccttaaatatttatcttttctgtatgctaggaacattctgattattctcttgtagctattttaaaatgtgcaatagattaatgttaactacagttgccctactggtctatagaacaccaggtcatatttcttctatctatctgtatatttgtaccattaatcaacttcaaaaatttttaagagaaagaagtcgatttgaaaaaaataaaaataaattcaaaagctatatgttaataataataaggcctgtggctcctagatttagagggcagcagaagggctctagggttggatacccagatcctaagagacagcagcaggcaggagggtagctgggggcagctgaattggcctggagtatcaggcagaaagaagggactccctctgcaaggaaaaagctgggctagggacaggagtgagaagtgatggaagctaagattgacataagtgagcagcagcagacagactcctgagaggcaggagatggctgtagcctggggagtgggctcaggactccacttggggaggaaccaggggataaggataggaattaaccaggagaggagacagtgctgagggccaggcagccaaagaagccctgaggatggtggggctaaggattggaaggggctggagagcagccttggctgattgagctgggagctcttggatgtgctgggggtggaggcttaaggtagaggagaagcagatgaggggtttcagcctctctctagcaaaaaatgccctccctttgggggatagaccatcagcaaatggctctggcagcacccacccagctggggagacccaggggggcaaaagtggaccctgaactgtctcctacccctgtgctgtatatttcactctttgagacctgggcattaatcctgggggcctcattctcagcgaggactcagtaaatactagactttattcatccctccctgtcctgtgtgatctcatgcccctatgcccagcagaatggattagccactccacctgactcagcaggcgagccctttgctcacgcctctgttattgcactttccttggtgtatggttcgttatttgctttaagactgatgtccagtcccatggggaacagaagccacatggggccgatattagctcagcctctgcttcgcatagcagggacttgtacatctaaaacacttttttttaacctaaataagttaggagtcccattaaacctttgagaagaactaaagcacaaattgtaatccaactgaatccagcttgccaactgaaaaaccaccgtggtgggcaaaaaccacaattggcaagattatgtttcatttaaaataaagtgtaagaaccacgacgagatatcacctcacaccagttagaatgctcactatcgaaaaagcagaagacaacaaacaggatgtggagaaactggaacctttgtgcactgttggtggaaaggcaaagtggtatagctgctacggaaaacagtatggaggttcctccaaaaatgaaaaattaaactaccagatgatccagcaatcccacttctgggtatttatccaaaagaattgaggatctcaaagagatatgtgcactcctgtgttcatggaggcattcttcgcaacagccaagaggtggaaacgttcatcaacagattaatggatcaagaaaatgtggtctctgcatacacagtggaatactattcagcctttaaaacaaagggcactctgaacatgcaatgacatggatggatcttgaggacattatgctaagtgaaataagccagtcacagaaggacgaatactgccggattccacttacatgagccatctaagtagtcaaactcacagaagcagagagtagaatggtggttgccagtaactgggagaaggggagggaaatagggagctgatgttcaactggtttaaaatttaaattatgcaagatgaataaatcctagggatctgttgtgtaacgttgtgcctagagatgatagtactgtattgtgcgcttaaaaatctattaagagaacagttaccatgttaagtgttcttaccacaataaaacaaaaaaatagataaaagacaaaaaataaaatcaagagtagaagaaaaacaaatattaaagtggtataaaatatatttttaagtaggggctgggcgcggtggttcacgcctataatcccagcactttgggaggccaaggtgggtggattacttgaggtcaggagtttgagaccagcctggccagcatggtgaaacctcatctctactaaaaaataaaaaaaattagccaggcatggtggcaggtgcctgtaatcccagctactcaggaggctgaggcaggagaatcacttaaacccgggaggcggaggttgcagtgagctgagattatgccattgcactctggcctgggcagcaagagtggaaactccatctaaaaaatagatagatagatagatagatagatagatagatagatagatagatagatdtgtaaatctggtagttttatatatatatatgtaaatctggtagaaagatagacagatagatagatagatagatagatagatagatagatagatagdtttttttaagtaaataaaaatctgtaaggcacatacctctaaagtaaacaagactcatctgcttttgaacagaaaccaatcccaggtctgaatttgyattgcggccacccatggcctgcagaggagaagtcactgagatgcacacaggccctctttacagtttccagacaagactttcctcacttggaatataatgtctttttcactggcagccttcctcattttgttttagcaagcttagcaaaacctttatatacacacctctttggggttgttttgttttcagaaattcaaaagtgcctaacggcatgttttcctgggaccagtcttctgttcatacagtgaggggcctcccctctctgttcgcccacttacagggagggcagagagcagaggactcacatgaagtgtctggatatgaaaaaaaataattgagaattttaacacttcatggaagtgtctgtgtttacagcctcacctgcccctcctcccatccccttgtgcagaccacctttggtctggaacctcataggctgccccccatccccaacccacactctgaaaaaacctcatcttgcttgttctcttctttggactttggttaaaccatctgcaaaatgggagagaatctggcagacctagagaaattagaaaaggggcacaattcagrccagcatatgcaatttcatattcaggtcaggaaggctaaggagagaagaaagagaaggggaggggagaagagaaacgtgggcagagaaggggtgaagaaagagtttctgaaggggattgaggagggaggccctggagcagaatcagagtgaagggaaaccccagaagagaggggaactgggtgtgcatggcagttatgctatgagcacagctcagtactccctctggatgattgttggactgtgttttctcaacacagcactgctctgagaatgaaccacaggagaaagcaggacaatgacttaggtgcccaatgggtcagaaaggcttgcaagagtgaggaacagctccagagagttgaccaggccctggctgttgagaggcaccaaaatatttccctgcaaaatgtgcctttttggcataaggattattttgagctaaaggccattgagaaccagcagaggcaaggacagttcttcttttataaaggaaatttacatttgtaaaaggtatctcccgctccctgtaccaggaagagaaggactcttaacacctgttatcagtggggaaggcaccttactcttaaacttaaatctgcataacaaacctcattaaacaacccctatttaccatatttttcctccttaccttcccataacttgcctcccccactcagaagcccaaatccctttttctttagcctaagatgatttatataaacccaagttctaactgcccctttgggttacacatcgtaggatggtctcatgtgtacacgtgcaatgcacatattaataaacttctatttcttttctcttgtgaatctgcctttagccactctaatgtacagggccccagctgcaaagcctaagctgggtaaaggaaaggattctttttcctcccctacagtgtctagcagaaggagagatgccgcctctgggagatatcctaacaagagtagacgtgagggagcagtccatcctgctgctgacctaaagaaacctgacggaaaaaaattgcttcctcagtaggcaagagaattgtcaaaggaacttgccctgggcacaaaaacaccactattcgggccttactccaagccagagagaacaggttgatgtcctcacaggccctagacggttaatcatatgttttacccaccagtattgccaggaaccattgttaagggcccaattctccagggctatccgttagcagaatgtgtgaatttagctggagagttgtttcaggttgctattattacttttatagatttttagctaatactaagtatcttctctaagccagacactccgttaagtactttatatactccatcttcatttaattcacagagcaactccattttacagttgaggaaactgaggctcacaaaggttaagtaacttgcccaaggtcctttagcttgtcaggggtataccttaagccctgtctgtctcatactaaaggccttgctctcacccatgccatactgtccgctatttgggttctggcttctaaaatcactattctgctgcctcagactgttagcagcagggaatccatatgagcctgcagcaacctcaattcttgcctcctcagaagaaagaattcgattgggggcattgggcagatggagagaaagagacacgttttagagcaggagtgaaaatttatttaagttttagagcagtggccaggcacggtggctcacgcctgtaattccagcactttgagaggccgaggtgggtgcatcacttgagatcaggagttcaagaccaccctggccaacatggtgaagccccgtctgtactaaaaaaatacaaaaaattagacaggcttggtggtgcttgcctgtaatcccagctattcagagacttagcaggagaatcgctggaacccgggaggcagaagttgcagtgagccgagatcactgcacgtatgcacagtggtctgccagcccttgagagggggctctgcgcagtgtgttcactgaagttacacgcatgcttacgtgaggcatttttcccttactagtcaagtggtcctggaggaaggtcatatatcagttacatgccaccatgttgcctctcagtgtgcatgcttgagtccactcacccgactcctgagatcctgtggggaagctgctaatcaccagcttcaggtgttttctatctattgggagctggcttttccctggtgctggctgtgaccaattattattttagagagatggtcacctgacattcctgggggcaggaggcctcacctgccccactcatgtctgactagctacctactctgacaagacagcaaacacctgttctggagtatgatgaatgtcagaattaaatacctgaacccacggaatccagccctctgccagtcctctttatcaaaagtggccttcttgaaaagagatagaggcaaaaaaaaaaaaaaaaagttaaggatgaagagacaaactataaatgagtattaatccaggcttagctgaattcagttacacgtagaaggacttatttttataacacagtccccaccccaccatgatctctattatggaacaaaataggttttgtacctttaactagctaactgagcttctgctattgtattcttgccaaaaattgcataacctgaatgtaatcatgaggaaacataatacaaacaaaaattgaggaacattttaccaaaaaaaaaaaaaaargccagtattacttaaaagcgtcaaggtcatgaaagacaaagaaagactaagcaatcagtttagattaaaaggatactaaggagatgtgatagctgaatacagtttgtgatcctaaattagatcctagcccagaacacggtcattagtggaacagttagtgaaatttaaataaggtctatagatcaggcaatagtgttattgtggatttcatgattgtcctcattgttctataattattgaagatgttcacatttggccaggcacggtgtctcatgcctgtaatctcaacacattgggaagccgaagcaggtaggattgcatgttctcaggagttcaagacaagtctgcgcatagcgagatccctctctactaaaaatttaaataaaaaaaaaaaatcagccagttgtggtggcacacacctatagtcccagctactcaggaggctaaggtggaaggatcacttgagccccagaggtagagcctacagtgagccgtgtttgcgccactgcaccccaacctgagccacaaagtgagaccctgtctcaaaaaaaaaaaaaagagatgtttacatatagataatctgggtgaaggcatgtataaatcctttgttctacttttgcaactttttggaaatcatttcaaaatgaaaattttgaagtaattttttaaaagccgcagaaaagagtattggaaagaagcaaagaagtcacctttgtcaagctcaagcaggcactcagtaaatatctggtgagcccaactactgggttgagtatttggtttcaacccaaaaccttgagaggataatgacaaaaattatgtataacaaaacaatgaggacatttctgtttgcagagccttgatacagagtggtgacagcaacagatgacagrggtgacagagacagattctggtaccaatttttgagatgcttcatataaaaaggcaaatgcttatagatatactcaatgcctagagcatcaaaacctgctgtttctcctaaggacaaaatgcatctccaagatacagtgtttaatcactagaaacttttaaaagagaaagaattcaatatgacatatctcatttagaaatcactctgttattactcatgtatttattatttattattcccatttttaatactttcaaggttttgaaatttaaaggttcgttaaataatggagacattctgattcaaatgggactatttcttaggacttactcatgcaactcttcctggcttactgtttcatgcaaaccatctagataggagcaaggcatgacagtgattgtaatgtgaagagtgtgcgcttttgatgcatctgttttgtcaagatttttatcctgcactgcttgaaacagcacaactacagagggaaaattcagaagcaaatgccttacatgtttttaatgtcattggcaatggccagggctcctgaagtcctagcgggatgtcctttaaacagatgtcttttgtttagggcttgagataaaggacatcagggaaagttatctgctgcttgtactgatagcttgagtgagctgtcatttctatcagttccaaagcatcctgggatgaggcttttacctctggtcttctctttcactttccttctgctcattttccacttgactttgccccaccactcccctcctctcctttctctccaatattgcaataggtgctagaaatagaaagatgagaaagacaaagcccccaccttcaaggagatcatcatcaaatgggaaacaaagacaaaaagggaatcattgtgtttctggtgaaagggcagtgaaataaaggcaagttgaggcctctggacataagaagcacttaactctgtctgtagaagtaggggaagactttacatacgagttaaaatttgagctgagagccctgaagaaataaataggaattcaaaaaggacagggagatggtgactcagagctgggaggctctgaggggtaaacatctttgaggaagagggagagagaagttggacatggctgaaagatatttgtggggctatgtcaggctttgaaactggaggcagatcacagctactgtgggaaggctattattatgcatccttttaaaaatctatgttttagagaatcatttagctgaaattcagagccacacttgtgaatctgaaagcatttacagtagtagaaactgccacaacaaacaattgttaagtgcctactattttgagctcaaggtcaatagagtagtctcaatgtttctgcctattgcaagcaaatatttttagagaagaaaaagaatttaaatttctcatgatggatttttttaatggattgtacaaatcattctcctgaaactacctctaaatcataaaaataaaagcaaaatctgcaatatttaaaattctaactcgtgttcaaaaatgttaatagatgtattttaggacagtgtatgatacagtattttccaagaacttttcatactctttttaacagattccagtttctggtttcaagtacaatggagtaaacataccccaccctgtctctcccactgaaaatagctgtaaaacctggacagagtgtatggaatagctggagcactctggaaattaaatagcaggccaagtgaagaagaaaatcagaattagggccaccaccaaatgagcagtgaggttagcattatgctatcctctggtatcttccaacctggactcaaggcagcccaaaacccagaagcagcacagacaggtcacttcaagaagaaccctctagttctcactctagatctgggaaagtggtctcctggcagtgacagcagaaatagtggggacatacaggtgcctagaattccaaagaggtttgagggagactgcctcttcactggaatagttgtggtcccaggaaggtggggcaaactcccattgcctttttttttttttttttttttttttttttttttttttgagacggagtttcattcttgttgcacaggctggagtgcagtggcacgatctcggctcactgcaacctccgccttctggtttcaagtgattctcctgcctcagcctcctgagtagctgggattacaggcgcctgccaccacgcctggctaatttttgtatttttagtagagatggggtttcaccatgttggccaggttggtctcgaactcctgacttcatgatctgcctgccttggcctcccaaagtgctgggattacaggtgtgagccaccgcgtctggcctgccttttttcttattctgttctcccatcacttggggttaccatgagtgaatttttaggaagagcacagcagagtggagcactaaagccccgactttctggctacaggaccaaattgcggagtccagggaaccaaaaagtactagagagatcatgggaagggaggatctttggaaascaactccgtaaaggtgtttctgaatatgcatttatggagggataaccaatgctgggattatgtgaaacctttctcttctttcaatgccctgcaccttatttaaaagaaactggatgaatcagacttaaaggcctgtgtggacccttttcttctcgtcaytggagacaggtgggctctccatttggaccatcttgacaaataaataaaatgttcctattccaaggtcaaacctctttcatttctccaaactatgatcgcagggatcagaatatagacttcttaagggtaaagtgccagttcttgaaatgtttgccttactttgccacatcccacaggctaggagctatctatcttttcttgctgcagtccgtattttctctaatgataacagcagcagcaacagcaagcagctggggagaagtctatgtacaggggaagaaagacaatagagatggggaaggagagagacacaaaatgttgatgagtctggcaaaaggataacaaaacaacagcaaaaggaaattaacaagaaacagtgacatgagaattgcataaactaattacataatctcaaaaaacaggtttctgaagggaaatagaaatagtggaaggcgcaagaactttggagcaaagagaattctaggctcatagtatggacacctactataaaaaatagacatttgggtaaagaagaacagacaagtcctcactccttgggtagctgtttgtgattgcttttcaaaaatttttcacagccaattgccgttggtctcgcatccttgtcctgagtggcaaagggacccaggggtgtgagcgcaggaagggatgctcatgtggcatgtcacaacaggctttcattttcattttcctcaagctctgtgggtgctctgcacctcagattcccagctgtaccctagataatgaagacaagtgttgctctgacctggtcctttaattattttttccccacttatggcttgagctttcattagttttcatttctcattaagagaaaaataaaagaatgagaattaaacatctcctgatctattatctcactgaaaataagaagccaggagtcaccggactggaactgaatgaagggcccagccgatgcgtgtgccaccgcaagatcaacacagcgcatgggggctgtgctccttctcttctgtcctctggaggacaacagggagcactcactcccagaaagactggagcccttgtactgaggactcagtgttatgaaatctggcaccttccctgaatagagataataggcctcaaatcaattggcttttcctgttttcgagcattggggttggattttcactaatctcttaaaattgtcatctgggcatggtggctcatgcctgtaatcccagcactttgggaggcgaaggcaggtggattacctgaggttaggagctcaagaccagcctgggaaacatgatgaaaccccatctctactaaaaatacaaaaattagctgggcatgctggtgggtgctggtaatcccagctacatgggaggctgaggcaggagaatcccttgaacctgggaggtggaggttgcagtgagccaagatccgccactgcactccagcctgggggatagagtgagactccgtctcaaaaaaaaaaaaaaaaaaaagttcccagtgctcaattatgtgtctacccccatagatactattcagaaagtattgaggctgtgtccacctcatctgttaatccctgctttatggcaggcacatgccagtgctcaagaaatggatggagtaggtaaaggaacaaaatgcacacagaaatggactgattactcctaatttatatggctatgtgcattttaataattcctaggcagcatttcccttgagaagtaaagcaagaagaggatgcccactctcatcactcctgttcagcatagtactggaagtccttgccagagcaatcaggcaaaagaaagatataaaaagcatccaaataagaaaagaagaagtcaaaccgtctctcttcactacaatatgattcttacacctagaaaaccctaaagactacactaaaaggctcctggaactgataaacaactttagcaaagtttcagggtacaaaatcaatgtacaaaaatcagtaaaatgtctatatatctataacattcaagctgagagccaaatcaggaacataatcccatttacaatatcccaagaaaataaaatacctaggaatacatctaaccaaggaggtcaaagacctctacaaggagaactaaaaaacgttgctggaagaaatcatggatgacacaaaacaaatggaaaaatattccatgttcctgaattggaagaatcaatattgttaaaatggccatactgcccaaagcaatctatagatccagtgctatttttatcaagctaccaatatcatttttcacagaattataaaaaaactattctaaaattcatatggaaccaaaaaaaagcctgaatagacaaagcaatcctaagcaaaaagaataaagctagaggcatcacattacccaacttcaaactatactataaggctacagtgaccaaaacgcatggtactggttcaaaaacagacacacagaccaatggtacagaacagagagtccagaaataagatagcacacctacagccatctgaccatcaacaaagtcaacaaaaattggcaatagggaaaggactccctgttcaataaatgatgtggggatagctgacaagccataggcagaagaataaaattggacccctatctttcaccatatacaaaaattgactcaaatggattaaagaattaaatgtaagaccttaagtataagaatcctagaagaaaacctaggaaacaccattctagacattggtcttgggaaaaaaattatgactaagtcttcaaaagcaattgcaacaaaaacaaaaattgacaagtgggacctaattaaagagcttctggacagcaaaagaaaccatcaacagagtaaacagacaacctacaaaatattcacaaatgatgcatccaatcaaggtcgaatatccagaatctgtaaggaatttaaacaattgaacaagcaaaaaccaaataaccccattaaaaaaatgggcaaaagacatgaacagatacttctcaaaagaagacatataagcagccaacaagcatatgaaaaaagacacaacatcactaatcatcagagaaatgcaaatcaaaaccacaatgaaataccatctcacaccagtcagaatggctattattacaaagtcagaaaacaacagatgctgacatggctgcagagaaaaaggaatggttatacgctactggtgggaatgtaaattagttcagccactgtggaaagcagtttggagatttctcaaagaactttgagaactaccatttgacccagcaatcctgttactgggtatatacccaaaagaaaatcaattattctaccaaaagggcatatgtacccatatattcatcacaacactattcacaatagcaaagacatggaatcaacctagatgcccataacagtggattgaataaagaaaatgtgggaggagccaagatggctgaataggaacagctctggtctacagctgccagcgtgagtgacacagaagatgggtgatttctgcatttccatctgaggtaccgggttcatctcactagggagtgccagacagtgggtgcaggacagtgggtgcagcgcaccatgtgcgagccaaaacagggcgaggcattgcctcactcgggaagtgcaaggggtcaaggagttccctttcctggtcaaggaagtgggtgacagacrgcacctggaaaatcgggtcactcccaccccaatactgtgcttttccaacgggcttaggaaacagcgcaccaggagattatatcctgcacatggctcagagggtcctatgcccacggagtctcactgattgctagcacagcagtctgagatcaaactgcaaggcagcagcgaggctgggggaggggctcccgccattgcccaggcttgcttaggtaaacaaagcagctgggaagctcgaactgggtggagcccaccacagctcaaggaggcctgcyggcctctgtaggctccacctctgggggcagggcacagacaaacaaaaagacagcagtaacctctgcagacttaaatgtctttgaagagagcagtggttctcccagcacacagctggagatctgagaacaggcagactgcctcctcaagtaggtccctgacccctgacccccgagcagcctaactgggaggcaccccccagtaggggcaaactgacacctcacacggccgggtactcctctgagacaaaacttccagaggaacgatcagacagcagcatccaccattcacgaaaatccactgttctgcagacactgctgctgatacccaggcaaacagggtctggagtggacttctagcaaactccaacagacctgcagctgagggtcctgtctgttagaaggaaaactaacaaacagaaaggacatccacaccaaaaacccatctgtacatcaccatcatcaaagaccaaaagtagataaaaccacaaagatggggaaaaaacagagcagaaatactggaaactctaaaaagcagagcgcctctcctcctccaaaggaacacagctcctcaccagcaatggaacaaagctggacggagaatgactttgacgagttgagagaagaaggcttcagacgatcaaactactccgagctacaggaggaaattcaaaccaaaggcaaagaagttgaaaactttgaaaaaaatttagacgaatgtataactagaataaccaatacagagaagtgcttaaaggagctgatggagctgaaagccaaggctcgagaactacgtgaagaatgcagaagcctcaggagccgatgcaatcaactggaagaaagggtatcagcratggaagatgaaatgaatgaaatgaagcaagaagggaagtttagagaaaaaagaataaaaagaaacgaacaaagcctccaagaaatatgggactatgtgaaaagaccaaatctacgtctgattggtgtacctgaaagtgacagggagaatggaaccaagttggaaaacactctacaggatattatccaggagaacttycccaatctagcaaggcaggccaacattcagattcaggaaatacagagaacaccacaaagatactcctcgagaagagcaactccaagacacataattgtcagattcaccaaagttgaaatgaaggaaaaaatgttaagggcagccagagagaaaggtcgggttacccacaaagagaagcacatcagactaacagctgatctctcagcagaaactctacaagccagaggagagtgggggccaatattcaacattcttaaagaaaagaattttcaacccagaatttcatatccagccaaactaagcttcataagtgaaggagaaataaaatcctttacagataagcaaatgctgagagattttgtcaccaccaggcctgccctaaaagagctcctgaaagaagcactaaacatggaaaggcacaactggtaccagctgctgcaaaatcatgccaaaatgtaaagaccaytgagactaggaagaaactgcatyaactaacgagcaaaataaccagctaatatcataatgacaggatcaaattcacacataacaatattaactttaaatgtaaatggactaaatgctccaattaaaagacacagactggcaaattggataaagagtcaagagccatcagtgtgctgtattcaggaaacccatctcacgtgcagagacacacataggctcaaaataaaaggatggaggaagatctaccaagcaaatggaaaacaaaaaaaggcaggggttgcaatcctagtctctgataaaacagactttaaaccaacaaagatmaaaagagacaaagaaggccattacataatggtaaagggatcaattcaacaagaagagctaactatcctaaatatatatgcacccaatacaggagcacccagattcataaagcaagtcctgagtgacctacaaagagacttagactcccacacaataataatgggagactttaacaccccactgtcaacattagacagatcaatgagacagaaagttaacaaggatacccaggaattgaactcagctctgcaccaagcggacctaataaacatctacagaactctccaccccaaatcagcagaatatacatttttttcatcaccacaccacacctattccaaaattgaccacatagttggaagtaaagctctcctcagcaaatgkaaaagaacagaaattataacaaactgtctctcagaccacagtgcaaacaaaccagaactcaggattaagaaactcactcaaaaccgctcaactacatggaaactgaacaacctgcttctgaatgactactgggtacataacgaaatgaaggcagaaataaagatgttctttgaaaccaacgagaacaaagacacaacataccagaatctctgggacacattaaaagcagtgtgtagagggaaatttatagcactaaatgtccacaagagaaagcaggaaagatccaaaattgacaccctaacatcacaattaaaagaactagaaaaacaagagcaaacacattcaaaagctagcagaaggcaagaaataactaaaatcagagcagaactgaaggaaatagagacacaaaaaacccttcaaaaaatcaatgaatccaggagctggtttttgaaaggatcaacaaaattgatagaccgctagcaagactaataaggaaaaaagagagaagaatcaaatagacgcaataaaaaacgataaaggggatatcaccaccgatcccacagaaatacaaactaccatcagagattactacaaacacctctacgcaaataaactagaaaatctagaagaaatggataaattccttgacacatacgctctcccaagactaaaccaggaagaagttgaatctctgaatagaccaataacaggagctgaaattgtggcaataatcaatagcttaccaaccaaaaagagtccaggaccagatggattcacagccgaattctaccagaggtacaaggaggaactggtaccattccttctgaaactattccaatcaatagaaaaagagggaatcctccctaactcattttatgaggmcagcatcatcctgctaccaaagccaggcagaaacacaaccaaaaaagagaattttagaccaatatccttgatgaacaytgatgcaaaaatcctcaataaaatactggcagaccgaatccagcagcacatcaaaaagcttatccaccatgatcaagtgggcttcatccctgggatgcaaggctggttcagtatgcgcaagtcaataaatgtaatccagcatataaacagaaccaaagacaaaaaccacatgattatctcaatagatgcagaaaaggcctttgacaaaattcaacaacccttcatgctaaaaactctcaataaattaggtattgatgggatgtatctcaaaataataagagctatctatgacaaacccacagccaatatcatactgaatgggcaaaaactggaagcattccctttgaaaactggcacaagacagggatgccctctctcaccactcctattcaacattgtgttggaagttctggccaggacaattaggcaggagaaggaaataaagggtattcaattaggaaaagaggaagtcaaattgtccctgtttgcagacgacatgattgtatatctagaaaaccccattgtctcagcccaaaatctccttaagctgataagcaacttcagcaaagtttcagcatacaaaatcaatgtacaaaaatcacaagcattcttatacaccaataacagacaaacagagagccaaatcatgagtgaactcccattcacaattgcttcaaagagaataaaatacttaggaatccaacttacaagggacgtgaaggacctcttcaaggagaactacaaaccactgctcaatgaaataaaagaggatacaaacaaatggaagaacattccatgctcatgggtaggaagaatcaatattgtgaaaakggccatactgcccaaggcaatttgtagattcaatgccatcgccatcaagctaccaatgactttcttcacagaattggaaaaaactactttaaagttcatatggaaccaaaaaagagcccacatcaccaagtcaaacctaagccaaaagaacaaagctggaggcatcatgctacctgacttcaaactatactacaagsctacagtaaccaaaacagcatggtactggtaccaaaacagagatatagatcaatggaacagaacagagccttcagaaataacaccgcatatctacaactatctgatctttgacaaacctgagaaaaacaagcaatggggaaaggactccctatttaataaatggtgctgggaaaactggctagccatatgcagaaagctgaaactggatcccttccttacaccttatacaaaaattaattcaagatggattaaagacttaaacattagacctaaaaccataaaaaccctaaatgaaaacctaggcattaccattcatgacataggcatgggcaaggacttcatgtctaaaacaccaaaagcaatggcaacaaaagccaaaattgacaaatgggatctaattaaactaaagagcttctgcacagcaaaagaaactaccatcagagtgaacaggcaacctacaaaatgggagaaaattttcccaacctactcatctgacaaagggctaatatccagaatctacaatgaactcaaacaaatttacaagaaaaaacaaacaaccccatgaaaaagtgggcaaaggatatgaacagacacttctcaaaagaagacacttatgcagccaaaagacagatgaaaaaatgctcatcactgaccatcagagaaatgcaaatcaaaaccacaatgagataccatctcacaccagttagaatggcgatcattaaaaagtcaggaaacaacaggtgctggagaagatgtggagaaataggaacacttttacactgttggtgggactgtaaactagtttaaccattgtggaaatcagcgtggcgattcctcagggatctagaactagaaataccatttgacccagccatcccattactgggtatacatccaaaggattatatatcatgctgctataaagacacatgcacacgtatgtttattgcggcactattcacaatagcaaagacttggaaccaacccaaatgtccaacaatgatagactggattaagaaaatgtggcacatatacaccatggaatactatgcagccctaaaaaatgatgacctttgtagggacattcattcatgtcctttgtaggaacatggatgaaattggaaatcatcattctcagtaaactattgcaaggacaaaaaaccaaacaccgcatgttctcactcatagatggaaattgaacaatgagaacacatggacacaggaagggaaacatcacactctggggacagttgtggggtggggggaggggggagggatagcattgggagatatacctaatgctagataacgagttagtgggtgcagcgcaccagcatggcacatgtatacatatgtaagtaacctgcacattgtgcacatgtaccctaaaacttaaagtataataataataaaaaaagaaaaaaaaaaagaaaatgtggtgcatatacaccatggaattctatgcagccataaaaagaactaaatcatgtcgttgctagtaacatggaggcagctgaaggccattatcctaagcgaattaatgtagaaacagaaaaccaaataccatatgttctcacttacaagtaggagctaaacaatggatactcatggacataaagatggcaagaataggcacaagactactagaggtggggaggcatggaggggagcaagggttgaaaatgacagtcagagcagcgattattaaaaagtcaagaaacagatgctggcgaggttgtggagaaataggaatgcttttacgctgttggtgggaatgtaaattagttcaaccattgtggaggacagtgtggcrcttcctcaaagatttagaaccagaaataccatttgacccagcaatcccattatggttatatacccaatgggatataaatcattctgttataaagatacatgcatgtgtatgttcattgcagcactattcatgatagcaaagagatgaaatmaacccaaatacccattgatgatagactggataaagaaaatgtggtacacatacaccacagaacactatgcaaccataaaaaggaatgagatcatgttctttgcagggacatggrtggagctggaaacctttatcctcagcaaactaacacaggaacagaaaaccaaacatcatatgttctcacttatgattggtagctgaacaatgagaacacttggacacatgaaggggaacaacacatgctgaggcctgttgtgggagtgctgggcttaatacctaggtgatggcttgataggtgcagcaaaccaccatggcacatatttacctatgtaacaaacctacacatgtatcctggaacttaaaataaaaaataaagaaaattacctattgggtctgctatgctcagtacctgggtgatgggatcaattgtcccccaaacctcagcattacacaatatacccaggtaacagaagtgcacctgtatcccctgaatcaaaagtaaaagttgaaattaaaataataataatgattccttgcctcactacaaaaargaaagaagatgatatagtcatttctaaaaaaaattaaacatagtattacaatacagcccagcactttcagttagatataccatacgtccaaaacacttgaaagcagggactatccatagcagcgttattcacaacaaccaaaaggtggaaacaacccaaatggccatcaaagaatgaatggataaacaaaatgtgttatgaatgaagcttgaggacattatactgagtaaaataaaccagacccaaaaggacaagtatgacatgagccatctacatgaggtgcctagaatagttaaatgcgtaagggcagaaagtaggagggtggctatcagggactggagggaggagttagtggaaagttattctttaatgcattttgagtttcggtttggaatgatggaaaagttctggagatgggtggtgatgatggttgcacaacaatgtaaatgaactgaatgccactgaattgtacactcaaaagggatggaaagatgaaatgaggccagatgcggtggctcacacctgtaatcccagcactttgggaggccaaggcaggcagatcatgaggtcaggagttcgacaccagcctgaccaacatggtgaaaccccatctctactaaaaatacaaaaactagccaagcatggtggcacatgcctgtaatcccagctactcaggaggctgaggcaggagaatcacttgaacccaggaggcagagattgcagtaagccaagatcgcaccactgcactccagcctgggcaacagagcaagactctgtctaaaaaaaaaaaaaaaaagaaagaaatgagatgtacattttaccataataaaatggaaataaagcaatatttatttaatgtgctaacatttcctgaatcaaccaagagaacatcagtgctgcctgtacagcttgccactagctgcatgtgacaaagaggcaatcattgcatagctacacagcttcagtgagacacaggccagcatacccttcatggctacacgctgccctttttcccaygtggaactggaagaacatrcctgggtctccggtaaaatgcacttatccccaagcttccaaggctggaagttatagaagaatcttcctatggaaaggggcaactggatggtatttctccaactcggtccaccgagttgcaccacccacctgacaatcacttgcttatttctagcagatctgtctcttggggacaaaaagacagtacactggtttgggttaactctttctcaactacagcctagaggagcactgtccacaggaagccagagctcaggatggcagacggaagggactggtatgaactgcagttcttcgaatgagtacctgtgtggctttgggcaagccacttaggtgggcctcagtttcctaatttaaaagtgggaatacaacagtacctacctcacacaactgtaccacagcttaaatgagctgtaaaagtttaacagcacctagaataaaataagtattcaacaaatatgattttcttttttttttttttgagacaagtctctctctggtcacccaggctggagtgcagcagcatgatctcagctcactgcaacctctgcctcccaggttcaagcaattctcctgcgtcagcctcctgagtagctgggattacaggcgcacgccaccacgcctggctaatttttttgtatttttagtagagagaaggtttcgccatgttggccaggctggtctcgaactcctgacctcaagtgatccgcccgcctcagcttcccaaagtgctgggattacaggtgtgagccaccacgcccggtctgggttttcatataagagatatgttacaggtggtaacggggattggggcaggatggtcatgcatatcattacaagagttgaaatatatcaactctacaatctgaaccttgtgttgaccagacagcctgcgggagccttgggagtgtgcaagaataataggaggagattaaatggggctctccaaggaggtgggtaattctcgtaacattcttttcgttttcctctaattcttcaactcattcttgaatattttcggtagtttgtctctttggtagtagatacatactttttttctcacatctactagaagatttactcatttatgcttaggaaatgtctgaagacccatgaatccaaataaattttggttttgttaatatactgctaaataaacagaaaagcccttaaggagagttccaggattaaacactacagaaactgattggaagaaaattatttccatcaatgtgttggtcagaacaacctttgcccgaacagtaatgccgctttcatgagttcagtcaatcagactcccatattgatagtgtgaaattgaactcactaactttaattgttttcttaattttaattattcaggtgcatcttcccgaaacctgaagaaatttatagaaaggtaagcagaagataagaagttgyttttaatttggtttctcattttgaataaggaatgaaaactctgttattaccccataatcatttttaytgagcataaatagcttgttagtcactatccaaactcaaggatatcactccttgggccagtgagcatagaaagtgattaatttgcatatgycctcaaagaagggtgataaaaatgcatagagagttggtaaaacttagctctgacagacaaaaggatgatgtcatatccctgctttatgaatgagaaaacattttttatgcttatttggggcttgaaattcagaagcaaggctcgaggtgtcctgactggaagcctcaagaagcctttgccttttcaaagttgactatgggtccacggctgccaggttatcctaagaacatggacataaggaacccaataactcgcctgtgcttattgatgcaattgctgtgaaagatgccaagaagatagcattgtgtctatttacccaggacctcaatccattcttttcaattttatgcatttatgtggcctttctctaataggcaagtgggataatgattatagagaataaatgggagatgggaatggtggttggctgtactagaatgaaagaaaaatagcaaaaagttgccaagagggtggtcataccaagattgttttcaaaggcccagcctgtgtcactggctacaaagctaggtttccaagtatctgacattcagattccatctatgccttctcagcttgtctagaaacaaggtgttggactatcccgccatcgttatatatgccatgattggaaatgatgtctgcagtgggtgagttattgagaaaaagtattttcaagattctttggctctgggctcttccccaccctctcctcaccaactccactccattatagcagcctgctgttcagctgaatttctctatcttagaagcacggccgggcacaggggctcacacctataatcccagcactttgggaggccgaggtgggcagatcacctgaggtcaggagttggagaccagcctggccaacatggtgaaaccccgtctctactaaaaatacaacaattagctgggcatggtggcgtgtgcctgtaatctcagctacatgagagrctgaggcagcagaatcacttgaacccaggagacagaggttgccatgagctgagatcgtgccactgtactccagcctgagcgacggagcaagactctatctcaaaaaaaagcaagtcctagacacgtgtgaaatcaacagtaccaatctgtcacgctgaaagcctcttttgaaaatatctgctccattaatgatcaactctgatgtaacaacaaatgggtgtgtcctgatcagttatatcacaagaaatgtgctactattcactgagaacccaagattgggaattgtgattttttttaataaaataaggcagaagcacagttaccccataagaacatcgatctcactcatattctgatctactttacttcctcatgtggaagagacagcttagacgcacagacctacagcatttgcaaagaaactgcggataactcatgggcaatcctatctatgcccatggcccatagcaagaaggtgattttgctaaactgctggtattggtagtaacttcaaaatggtgaattccttagttcctatataacatttggggaggtttctcaaaatctgtgtacacccctaagaatatgatgcatgtatgaatgccatctgtcctgtgattgtggccaaaaaaaaaatggtgagacaggatttagagcaactccccagtagcaatagccacccactcactattttaggaaacaggaaagtaaggccaaacgaggttcacgatttgcccgaggcaacagggttgattaatggcagagctggactccaccccaactgtgctagaagtgggccatcctgctcactccgcctgtttgctttcctgtatttcatacgccatgctttccaagcctgtgctgaaaacaaaactcaatagtattaaagtgtgtttgcccgcacagataaaattcagatggcaaaggagatgcagacataatcagtgaagtgtgttcagggcaggagataccacaatgatccagagactctgatacgccagatgtcaccttggtgcccttaggctggtttactgctgtccccagaaccccaagttggccaaggctacattctgggcaccaaggtctgtgaagagacaccggggactttccagtaaatggcaaacaccctttaaggactgccatgaaccaagaggtacatcactctatgtcattccatcctcccagcagccctaagaggcaaggatgatggtcccattttacagatgggaaaactgatttggcaaggataaggaacttgcctgttctggtattgagcatcaaagctgggagccaaaccaggttatctaaccaaattccattccctgtctatagtccacactgtcttatttcctttctttgactcattcactttttaaaatatacagtgagcaccacgatgtgccaagcactgtgccaggctctaggatatggatacaatgacaaagaagccacagtccctgacatcaaggagctaatggaagaggaaacaccatgcttcaggctctagctgccatcacgaaacagaacaaagctatggtcagaccagccattgctcccccagcccccagagcatgtcctccagagaggaacagagagcaaactgactatactgaataaagaacatgtgcagaaagagactctggctccaaaagccaaaatccctgaaactgtacttttccagcaaaacctgcttacccagatccctccagcccagtcctacttttcctttcccaaagagctaaagggcaggcagacatcagccagagacctgtgccagcctctcccctgctggagatctgggtagagaagcagcaagcatttgggtgaaagaacagagttggcagtatgggatgtccctgtggtgcccactttgtgatgtcctgtggaggggttaaaaaaataaagacagatggcaactatatctccccatctgccagaacgtcaaggtggagtagatttcccaaaatgagcaaatggattttataaaaagctcaagcagcaaggagttacataattaagtttgtcctggaacaagttttaggatatttgcttgacgtttttcttttctttttctatgacaatgctagctcttactgaagtaacacatttatgtgctttcttctcaattctctaaactcatccagttactcaacaaatactggttaaatgagtgagggtcacgattggaagatagcttttagcatcaggaagtcaaaaagaaagatcacatagagaacctggctttctcattgtaaccctgctcaatttgatttaggctaactcagcttcctttgcgcttttcctatcactgcccttgagggctatgtaatgtgaatgatatggaaggagaaacattcctgaaaacaaggcaaatgttgggaagctacagcagcagaaccttggggtggcggaggcagtggtgggaaatgggaatggcctcagaacgtccaatcataaaggccagtgacaatcctttgccaacatcccagcgcagcatccctgaaacgaacatggtaattgctggaaattccatagaattatacaagcatctagcactagccccataaatggatatggtttcatttgttacagtggacaattatgggacagatggcattcatacaagcatcatattcttaggagtatacacagaaagtataaattatacattttcatcttatggagagagccagaaccacccacacagggtgtctgtgcccatctgcccccaaccattgtttttcttcaatgccaacgcttcaggttacaccctgggcagttgaccagcactgaattaagaggaagccagccgaggcactgacaggttgcaggccccaatgagcctggactagtgagaaacaatccatgctatttattcagatgatagaaaagccagcagggaagggaatggaaagagctcctgctgctcagaggaattctctctcccagactcttcagtgagagacatgggtagcaaagggaatgataaggaagttccaaccagccagcatgttccaggccacacccacttttaagggatgtttaatgtatctctatgcatggggtaatatggaagtcctcatcccattcccagtctgtatcaagatgcctcttctccccagctactcaggaggctaaagtgggaggatagcttgagcccaggagttcaaccctgcagtgagctgtgatcataccactgccctccagcctgggtgatagagcgagaccctgtctctatttwaaaaaaaaaaaaagatttctcttcaaggggattggatgggagcccaacaatgtgattgcaactggctggcatgaagaaaagggctaaccctcttacctgggtgtttcaaaaacacaaatgctagctgtgagtgaggtgtgagcacttgatcactacagtgatctgggctttagctatggttccaggaagctggttttctgcacaggctgatcagtttcttccttggaagggacacctctctctagcaccagccaggtgaaatctggctggcttacctgccagggtaatgaaatgatcaggcttattttgcctgatcagacacaattcattagggcgggacaggcttcagagccaccttcaggagtgaggctcttcatctgttcccagcccggccatttgtttctgacatgtgtgagagcatgtcagtgagcaccagtttctctctcattattttccccagtgtggcccctgtgccacaggctggttttcacatcttctctgttagctgagcactctcgatctctcacctatccatctgagtgtctggggtgagctcgctggtgtgtgagaaggggtgctgggaccctggagtcggcagacaaatccggggtggcaggtgcctgggacacctgggttgaaaagggttagacaccttcagctcagcccattcgtcctttggcagacaccagagagacctaggagatagttctcaaccactagggttctttggtctccagaatactaacacaaagtctcccccaaacatcaccagaggggaaaaagtacacagatcaaaatggcattgaaaaattttcagggggccgggcgcagtggcttatgcctgtaatcccagcattttgggaggctgaggcaggcagatcacgaggtcaagagattgagaccatcctggccaacatggtaaaaccctgtctctaccaaaaatagaaaaattagctgggtgtggtggtgctcatctgtagtcctagctacttgggaggctggggcaggagaatcacttgaacccgggaggcagaggttgcagtgagcgagatcgcaccactgcactccagcctgggcaacagagtgagactccatctcaaaaaaaaaaaaaaaaaaaagaaagaaagaaagaaaaaagaaaaagaaaagaaaacttttcagggacagaagtcaaaagccaccttctatggcatctgggaggggtgatcgtcccatgaatcacatagactcccttgcccttacctgagctaagagttggttgattttgctatgcaaattaaaagtaaattatgtagttgtacaaggtggaacaaagataactggagaatgttccattagcaacaccaaggcttatattttgatttcacttagcaattagccatgttgattatgcttgcttaatttgtgggtgccctttcataaatacaaattagctcagattcttcgtttagcatcagggctgtgcctctaaccgaaaaaaaaaattattcagtgtggatttggggagactttgtccatcttaactcatcttgcccttatgtggttggagaacattagctcagcataattgctttgtgccaaagcgtggctgtatcagcaggaaaaaaaaaagtgtggcaaggcaaaagtgaataggcagtatttgccagctttaccagtgccagaagaaaggatatagacacccaacttgcctttcatttcacccttgctgttacacttcaaacacacagtgaatatagaacctagatacttggggcaggttcttcagtgctgcttctgtgcatatgggaatcaagtcaaagcccctccccacgcttctgctctagtaggtaggcaacctagtcgcaaatcgtcatagctggtttttrtcaggtaggaagatttttatttttaaaatagtgtaattttttcatgacaatggaaaacatgaaattagcatgcagttctataccctgagggtttgtaaaattagacatctttttctctccccccttaagagactctagcgatccatgacatagtttagaagcacatacaccaaccataactgccaccctactggctacccccatggcaccaaaagtattgttgtagtcaacaatactttaatactttttagccatctttctatattaatacatacaaattacttctttttttttattcaggtgaaattcacataatgtaagactaaccattctaaagcaaaaattcagtggcatttccagttcacaatgttgtgcaaccaacgatatctagttattatattcctaatggctatatagagttctattgcctgggtgtaccataatttatgtatttaggcttttatctttttccagtggtacactataccaagcaacattacaatattcgtatgtacatttttgcacattggtggaaatgttactataggataacttcttgaaagtgaaattccaaggtcaaaagttaagccagcttcaaatttggatacattttgaaaaattgccctccgaaaaggcagtgccaatattcatttatgagctcccttaaaaatgagaattatggatccctgggggcccctttctgccccctcttcccatatcacttatgccctgggtccagcctctgagtgatggacttattttatctggttcacaatctgtattaagttccctggagctgccataacaaagtaccaaaactggatgactcaaaacgcagacatgtattccatctcagttctggatgcttaaagtccaagatcaaggtgtccgtggggccatgctccctctgaaagctccagggaaaaatccttccttttgtcttcccacttctggtggcttccagcgatcctcagcactctttggcttgtggcagccataaccccagtgtctgcttctgtcttcacatggccttcctcctggtgtatgtctgtgtgtcctctcctcttcttataaggattcagtcattgaatttaaggcccacactaatccaacatgacctcatcttaactaatgacaaccatgaagaccctattttcaagtaatgtcacatttttagggacactatttaacccactatcattagggaaactggaattttaagtacacaaaagagaaagtaacactgtagcattattccatttagggtaaagacaggcagttagagtgtaaagagtagatgaaaactctagaaaattctgtattctactcccaagttaatgcaggttaggatccgaatccaaatttgttgtgttcctgaaggtgtgtgcaaaagtcaattgtacaaagaaatgaacaataataaacttatattaatgccaaaaatactttagcaccccttgccttttaaacatagctttttaaaataatttcaacttgtattttagatatgggggtacatgtgccagttcattgcatggatatattattgtacgacgctgaggtttggagtacaaattacctcatcacccaggtggtgagcatagcacccaaacataactttaaatcaaccaatgagtgcaattttaacataacttcaaatgatgtctttgtagtattttgtacattccttacttcttttccaaaccaaatgaatataagtcaatcagcttaaattcaataaatgtctgattgagggtaaagattcgtcactttcagctcacttaggagcttcacctttgtctgacatgctttgattttaggcctgtgtctctcataactactttcagtactttctttttttattttactaacttttatgaaataagaagagaaaatataatttaaaaattcaaataccctctatagagcacaagcactactatataaagacaataatgcgggctggaattgttgtgaaatgctgttgcagggtatagcctggaatagaaatccatcaggaaatgcatgcaagtccaaatccagtgtagaaatggaaggataaagagcaagatacagtgtggacgtataatrtaacttaatcagtaagattctgttttctaactgttatacatgtgaaaagttttaaagaccaagttatagacctcgaagtgtcaaataaatcataagtaataccagacccctttcatttcaaaaactgtgtgtaagtcaggccagcgagtttatgctacaggaacaaaggaacaaacagcccctaaaatcttagtagcataaagcaacaaatgtttacgtctctctcacactacttgtccatcagagatcaccatgggactctgttccaggactcagattggtgaagcagctatctagaacattgcctatacccatgcaaagaaaaggagcattctagaaggtgtcacatcaccaaatatgacacatgtcacttcagctcaccactcattggttagaactagtcacatagtccactcaaccgcaagggagtcagtaagtacagcctatgtgtcagaaaggtggaaatccaggaatattttgcaaatagctccaatgaccaccacactgtgtgtgtgtgtgtgcgtatgtgtgtgtgatgtatcttgtatttgcgtgcaacttgcatgcatctatccttacaatcaaccaagatattttctgtttattccaccaacaggaagagtgacccagtcccagccatgaccactcctgagaaactctactccaacgtcatgcagactctgaagcatctaaattcccacctgcccaatggcagccatgttattttgtatggcttaccagatggaacctttctctgggataatttgcacaacagatatcatcctctcggtatcagtttgaagattcttttactctttaataacatcaatgtatatacagttcaatgtatatatggttcaaaccatatagaaatgtgcctaaaatgccatcatggaacatgggtcagggttgataaaggcaagagcccctaggtgcagtatctaaaggtcattatccagaggtgagccgaatcagatccaaaggcagaaagggcagaagtaattcatgaagaattgggacacattgaaaggtaagtgctcaaaccaggaaattcctctaacagaaggtgaaatgtaaaatgagctgaggaagcccaaacaggagacagacccgtgagtcaaagacagggatttctctgaacctcaatggtaagtgcttcctggtggcctgttagaattctctagagcacagtcctccagcctgctcatttcctgcttctacactctcttggggtccttagctccgaaaggctttaaaatgtccctggaaccttctaatggcaactcaaatattctcgatactgtacaaataacataaaagtgctagtaatttgcattaggaaggtgtgatccttaaccctgtgagatagatgtttttatcaaccacaataatttcattttatagatgaaaaaaaccaaggctcagagaggttagatagcttgccaaatgccacagagctcactgaatatgttgtagcagggctctgctttctgtatttcagaggagaatgtatttattaagtgccaactatgtgccaggcactattctaggcacagggtaaccagcagaaaacacaatagtcctaagttcctgcccacagaaagcttatattacaatgggaaaatgacccaaaagtatatcagaaggtgataagtgccacaggaagaaaactgagcaaggaagaggaacagggagctggcctcagtcttccctgatgagcatctataagaagaggcctgggtaccttcctctcagccccatattgacagcacctgcaccaatctatcatgaagaagggactatcccttacctggtgttaccccactcacctcctgagcccaacccactaaaaggtgctggcagtccaagcaccttcttaggagtcaggcgagaaattcaaagaagacctgaaactcattctttcacgccctccttagagggagtgggtggggagcaagatttcccatttcaggccatcaagagccttttcttgcatatactactttgtgtgaatctttccagtcttctcttgtcctcttcctgcagtccctgtctaagacaaacaccccacttctccctcaggaaattccgcctctccccacctgggaaaaaagtaagggtcctttagctagctctcaaaggctctggtctcttagttggagggacaatggtggacacccacattccctattctccaccaataaggatgaaaccattttcctcttgagttactcatgtatcacaaatattatcatccaagcaaaacactgtacagcctcacctaagtagagcatattcttcctgttcatgcaactttgaccacgccgccttagaaataacatgatcacacatggaacttcactccattctgggctgctttgcatgcagaaaggacaccaacctgggctaagaatgtctctttgaaccacgggatatgaaaattgtacatctgccctcaactgattctttcagatttccaaatgtgtctcctacactaagaaatgctttggaaagagaagctgagggcagggaagtttgttcccaatttactccatcacagtaatagcgacttgacttccatttttctgatttctaatcccattttctttccatgaactctggttacgccacctccataaattctttccgatatgccatgcaattcacttgatttatgagacatgtttggtttcataaatatgagaccaaaggtaagaatgactccatgcaatttggaaaggactaggggaaggaaaaatgtatgtaagaatgtaagaatgaggccaggcacggtggctcatgcctgtaatcttagcaatttgggaggccgaggtgggtggatcaactgtggcgagagttcaagtcaagcctggccaacatagtgaaacctcgtctcttctaaaaatacaaaaattagcagggtgtggtggcacacacctgtgatcccaactactcaggagactgaagcaggagaatcgcttgaacccaggaggcagaggttgcagtgagccgagatcgcaccattgcactccagcctgggtgacaagagtgaaaaacaaacaaacaaacaaaaactctgtccaaaaaaaaaaaaaaaaagaatgtacgaatggtatgtaagcatgactccacgcaatttggaaaggactgagggaagaaaaaaggatgattgggggatttgtccacttctgtggattctctaggccagtggttctcaactgggggcaacccactcacccccaccctgcttttatcacatctggagatagaagaggggtgcaactaggctgggtgcggtggctcacgcctgtaatctcagcactttgggaggccaaggtgggcggatcacctgaggtcaggagttcaaggccagcctggccaacatggtgaaaccctgcctctgctaaaaatacaaaaaaaaattagctgggcgtggtggcaggtgcctgtaatcgtagctacttgggaggctgaggcaagagaatcgcttgaacccgggaggcggaggttgtaatgagctgagatcacaccattgccctccaccctgggcaacaagagtgaaactcagtctcaaaacaaacaaacaaaaaaaaaaaaaaaacaagaggggtgcaactagcatctagtgagtagaggccagggggtttgctaaacatctacaatgcatgagacggcaccccaaaatcaagactgtcagtcatgcaaggttgagagactgctctagattttgcctttgccttgtccttctcaagtggactctctctggctgctaatcacaccctagcatgtacagcacaaaatggaaggaagaaaaagatagaacaagtttgttctacagaaacatcagtagttttggaaaaaaaaaaaaaaaatccaatcaaggagaaagctgaaaccatctaaaatttgtttgatgcttataagtaactattcacatcctaaattatctctgctgcctggttgccatgggaaataaattatacatttctcaacgaagcatcagggtctttcctagaaaggctggagaagtaggtgggatttatccggcatccccaggcctcctttgacaggactcatcactcacacaagatgacagacttcaagagggggctgcattaggaaggtgtgattcttttttttttttttgagatgaagtctcactatgtcacccaggctggaatgcagtggtgcgatcatagctcactgcaacctctgcctcccagcttcaagcaatgctcctgcctcagctcccccgagtagctgggattacaggcgcctgctaacacactgggctaatttttgtatttttagtagaaatggggtttcaccatgttggccaggctggtctcgatctcctgatctcaggtgatccacctgcctcggcctcccaaagtgctgggattacaggcatgagccaccgttcccagctgagaaggcgtgattcttaaaacaaccctgggagatagatgctttcattaagcacagtaatttcatttattgctctcatgctgtctctcttctgctctcactccaaaccccatctttggatcttgagccagcagtgaagcagggttcatgctgggccggcctcagggtttggttgctctgcccaggccactgtagatctcatcttggtcagcagctggacactcaagtctgattcctgggcaccgtgttaagggttgtgctaacagtgctgtgcaaagaaaaaaaaagtagggggaagagggtgaggtccatttatttgggcctagaaatgtggtgatcatagtgtttagacttgactttggccacttcttaaaaattaagaaagcgttcaggaaacagaggcatggtaggagaccccctggtcagtgacacagtctctgctgcctccttttccctcagaaggacaggcaggaactcagcctgagcaaccagtgaaggcagggttagatgccacagcacccacgcagcaggtcactcagaggcccagaacaagagcaggtgggtgtctcactcctgccagggacaagggggtgacgaatctctcctcgcatccctcctcagccaggtttgtgactcactacccagtccgtcgctggctgccaagggctggggcaccccacagcctctactagtagctaaaattcctggtgagagtttattgtctttgtgaggaattaccagacagcaagcctcatacattgggattctactgatgtgggtcctttgagaaaagtcaagcttggccagtcacaagtcctctcagccatgatctgtgaggaaggggatcattccagaaatatctctgagattcctactctgtgcttttgagaaaagatgacataagacgcaatctgtgtcctcaaatgagagggaaaaaactccgctagcgaactcagcacatggaccctgacagcgaacgtgccgagtgcccatgaggatgggcaagtcacaggcattcaggggccatcccaagggttagactatggagaggaagccagggactcctggctgcaaattcgtctgctagtgggccaggcttgaagggcttctgccacaaaacagcaacttcatcttgccccaattactcttaaacttgaaaccaaatgtctttttaaaataccttggtgtttctattttatcacgcactttccctccgtctgaatgaatgtgattttaacacatttacatggcatttcatggagatgtgcctgatctttgttggtactaagtttctacagtacctaagatttcaattatgtttccagaattaaatagataccagagaccctgccctaaagaagttacagattatgaagacgcaaaccgtcactaagccagctagggaagaacacacctttgatcttcagaggagcttatggcaaacactgggacagcccgctggctccccacaacacacacaggcacacagacacacacaaacacacacacacagacayggacacaggtacacacaagcagacacatacacacacagacacagacacacacacacacacacacagagacacagacacacacggatacacacacacacagacacatacacacacacagacacacacacacacaagacacagacacacacagatacacacaagcagacacacacaaacacacacacagagacacagacacacacagatacacacacagacacagaaacacacaaaaacacagacagacagagacacagacacacacgaagacacacagagacacagacacacagacacacatgaagacacacagatacacatagacagagctcctcagcccctggtgattcctggccactgtgggacagtcctcctggcctgcccctgggctttcttgatcagctttcctatccagatggactttctaaccagggagtcacagacacaacctctcttcatgcaccccatagaagtaggatcaataggccaaaattacattaaagaaacaaagataaaaggtaatgcttaaaaagaaagagtgggggaccaactgatattgccaataaagcagaaagtgtaagaaccatttccctcttcccttcctcgaaaccataagcccatcgcaagcacccctagccaatcttccacatgaccagccccagagtccctaccctctaacaggcagaaacaccagacaggagggacactgattcattgcaactttcccaggttcttctaaatgcacctaatgtgccctcatcctgttcagcagacctagccacccacactaaggatgttcccattctcaatcaggtccagctggaggtggagccaggcgacagagggaaagggagagggactgaggaggtgcagaagggaggtgcccctcagggtctcattgggagctgtgctggccatcagcagaaggacagcaggagagggcatcaggcagcgtggagcaaggccagggtgggccttcatccccaaggaggagccaacaatgaagttcccagtgtcacaggagcaggacaaactccggcccctctggatatcaaagcaatccaggcctgaaggtggggaggggagagtgcaaggtcaggcatgaggtgccacctcctgtcaggctgcagagagatgccgcccctcagggggaggggacacaccagggcccagaggggcggcagggccccagccaggctacctaagtttcactatgaggccccagttccaacatagcgacaagatggcaccaggcaccaaggcaaaagcagccagacactgggccctcacagaaggtggggagacggaaggccgcaactcagtggtagcccccagagggaaagagcgaagccaggagagcacgtggaggacccagggtggggagtggagaaggaagatgtcagtcactgcagctgagacacattcagaaagggagcaaatgacaaaaagtacacayacacaaacacacacacacacacacacgcacacaaaatagagggaacaaatcctcagtgggtagaagtaggaacttgggggaaaatggaagctcagtgttggacccataaaataaaagcaaggacgaaagccaaggatttgggagtcatttaaaatgtgaagatacagaagcctgtacagaagacagacctggcgggtcactgtgactttagtggccataatgagcctgtggctttcctgtcttgggactcactcacctacacagagagataataaattttttctctctgacaagaaaattgaatctatcttccagtctaactaatcagaggtataagtgaaaaataagactgtgttctatcaccttcaatctttctcttcattctgagataggtcctattatcttcctttatgttttcaagagtgtgaggagtgttaatggatacagtgtcagtcattcacccccgagatttggggagacctggattttgtgtgtcagccacagcatgaaagtcaaattgcttcagcggggtggatatgctggaggcggggtggagcggtgttggaagagagaagaaatcacccccacagattctgggactatagctgatgttcagaaaaactggatgaacgctcatctggtacttttcactttattatgtacctctgtaacttgcactaaaaaataagggtgtctactaattagggtcaaataagatatccactggacagcccataatccagtgccacagagacatgaggtactgcctccccatcccatgggccaaccaagcatttcgtatggctttcagttcaccaactgcagggaactacgtggtcagagcttcagatactcagaatgtcctgccaggccctcagtgtgggataattcggtcagacctgagcgtttcataaacctagaaaaggggattaggtcaaccgccacctcgaatgttccctgtgccccatgcagggagcatttcataccagggccaggagaaagtactgctcttaaagggctttatccaaggcatcctggttcacattgagctgtaggatacttgcatttctttttcctgagtccagatgaggccacttcccccagccccatccaggcccatgcccacagctctatatggcagtgagttcctcagggctcctcctcaactctgggtctgaatttctagaggctcagaaaggaggaaagcacaggcattcttcaagagcaatgctgcatgaaaaatcaggggaacaccctggaaatagtgactttctgcaagggaggcagggaagcccccaggtgcctctaaatgctgctattgccgagtggatgcaatctaccagacctctctgttttccaggccagctaaataaagacatgacctatgcgcagttgtactccttcctgaactgcctccaggtgagcactcactggcttgcttcaaggcccgcttacctaccctgatcctctgtaatcaaaagtgttttcccgctctcaggtcagcccctgccacggctggatgtcttccaacaagacgttgcggactctcacttcagaggtatgactgtcacaggccttttgataccatctttgatcattctttccctgtgtttgctgcagagttttcactggggatgggatcctggcaggcagatggtctccaagctggtgaataacaaaatcaaaccttccaggtgcttgaggagccgagagaacctggtgcaccctgtctccctctgtcttgctctgggtctgtcctctgctgactgtgtttctcagccactgtctctctcgtgtgtacacatgtgtgtacacaccctcccctgtgcacacgcacacatacacacacacacacacaacctcttaaagctggtcctaagcatagttgtggagttggagagagctgattgaggttggcccctatgcatgacagaagttctcccaaggtaaataagaaccttcctcccttctctcagggaatccattgctcaaagaacatggtttacacttctttcacagatggcgaataatctctttgtaaaagacttattgaggctgggcgcggtggctcacacctgtaatctcagcactttgggaggctgaggtgggaggatcacttgaggtcaggagtttgagaccagcctgatcaacatgatgaaaccccatctctactaaaaaatacaaaaattagccaggtgtcatggtgggcacctgtagtcccagctgctcaggaggctgaggcatgagaatcacttgaacccaggaggcggaggttgccgtgagccaagatcrcgccattgcattccagcctgggcaacagagcaagaccctgtctcaaaaacaaaaatgaacaaacagacaaaagacttattgaacattttttacataaaaagcatatttcaattttttagaacttggagaacacaaaaaagcataaagaacaataacaaatatcacgcaaaattccaccacccaaagttagtatatgtgtatgtcttcccattaccacttctagagatcaatatatttggtttttgcctacatagtatgagaatgcacatactcttttatgctttccaatgttcatagattgtttctccacaccataatgttgtaaccattctaaagtttatacrtgactatattatgatttatttcatcttttgttgttggacatttagattgtttccaaatttacactatgataaatagcattgtgatgagccatcgtatatctaaaggtgtaagtctctgtgtacatctcaatttccttgagacaaattcctagaagaattactgggccaaagggtatgtccatgtttaaggatttgatccatattgccaaattgctctctagaaaggttaagctaatgacattctcattcacctacccatgacaacattcaatatcatggttatcttacctttgccagtcccaagggtgttaaaactagtatcactaatttacactgatttgattcctaatgaacattaacatttgtctcatgttcactggccatttgtacgtgactagratttaatgtgcagagctgctgtctgctgatggcttggagaaatgaaagtagagtaggatggggaagatcgatttctttgttctgcctraattgtctcactaaagccaaagtctagatttcatgaaattctccctgtttcctctctcttcagagagcagagcaactctccaacacactgaaaaaaattgcagccagtgagaaatttacaaayttcaatcttttctacatggattttgccttccatgaaagtaagtagctttgtttgggtattgacagaagatgaaagcagcagctagtttagggcctgggcaactggttttatacttttataagccaccaggcagcagattcggcagggttactcctgcctattctgacacactaatagctctcagtattgaaaaaaagataaaatgtgggactttttctgaaaaagttgggttcagcattacctctgtacttcaccatcattttagaatccctgatgcaatagagccagtgaytggttagaaagagctttgagctggcaacctacaggttaatgcactcactaacctgttcttgtcgggttaaaagccctggttacctgatggatgtgacagaaatgagggatatggtggcacctctcacagtgggccctgaaatacccagggactcaggagcagtgcagattcccacaccccatacaggatgaacttaatcagaacctctaagggagggaccaaagaacttgcccatggcaaagtgatcaacccatgtcccaactttctggaaggaatattactaagttgcttttttagcattctgtccaaacaccggagtcactgctgagtggccacacaaaaacaggcatgattactatagctactgatttactctttacatcttgagtctgaaaaattattgcttattgactgtaatctttcctgattcattttcattgctaagcaatttttatacaagagcaaagccccctgttgactgccagatgagataatgctaatgaagggtttcacagtgtaggcgaaagatggaagattcctcatccagagtttatcatctctgtcccccacccccagtgcccccatccgcagcatctgggttggagcagatggccatcatgaattatcaaatattacattcactgacatgttttgcattgcagactctagtagttcaattctgaacatcctttcaacaagactggtctcccttaactagatttcctgcctaggtgatacacatttctctcrtggggagagacattttgataaataacttctcattaaaatgcagagttaaagacccattaatgaattcctggtgtaaacaaatgcaccaccaagtgatctttgatcatcatcaaccttgaatatagataaagttattaaaaatataataatgtctaacactcacatgggactttttttttttactttccagagtgatcactagctctgtcatttattatctctgggactgcaggcaattctctgaatatttttaaactccmtttccagccctggaaatggggataccatatcttcctaacaaatctctgtgatgattctatgaaataatgtgtcatcctcctaaatgttatgcctggtacacagaaaaggtaccatttccttacacccttgctactcaatgtatgcttttggataagcaaaatcaacaccacccaggagctggttataaatgcagaattccaggccctactccagacctacctaatcagaacctgcattcaaacacaayccacaggtcatctctatgcccattaaaattttgtaaatggtttgtgaagctgagatgggaggatcgctcaagtccagraggtcaagaccagcctgggcaacattgcaagaccccatctctaaaaacaaaacatctttttttattagccaggcatggtggtgcatgcttgtagtcccagctactctggaggttgagatggggggatcacttgagcctgggtggttgaggctgcagtgagttgtgatcacgtcactcaactccagcctggttgacagagagagacctcatctctataaaaataaaaataaagtttaataaatggagctctataatgcctcaagattaagagctgggtcagtcatcagatttataagtcctgctatgtgccaggagctatgaaggtgctgggaacataatcgtcaacaaagcagaagagtccttatctctgtggaggatatagagagaagagctttattcttgtctgtccagaattccactggtgaactgatatgcttggaagcagggcctcatcagccctttcttgtcctcacagcaataataaacacagtgaaaaagcaaaaagttgaattaagctgaactgaacattctacatcaacgtgggagaaasctcctaggcatttctccatgcttggcgattcccatcaacagttcaaggaacttcctgttttgtaatctcctgctatttgtttaaaataaatgtgaagatcyagttttggtgcagggccttcttcatcttctcctcaggaagttagtgggcaccccactagggaaggcatgtgggcacagtgagaccactgtgggacctgcctccatgaacatctgatacagcacctgcatttgatgtctaggtgccgccatgtccacctctgaaagagctagcatttctatctggttttcaggaaccgtggtagtgtcctgacttaagctcagagtcaggtactgcaaaagacatttttaacttgaaattttagcattttccaaagcagtgggagggataatcccctcccagatccatctctgtgggtaaccacccgtgcctgggcagctcatcttcccagaaacccaccccatgtgggtrcgatgtgtggttatagaaagagcccagaatttacaactgtcttcctattccagctcagacacagaatagctgggtgacctcaagtgaattaaataaccacccagcctttgtttccttgtatgtagratagaaataactaacccacgtaaagattaagtaaaacaaaacttgtaaagttgcaaagactcagtaactgttagtggccrtcccccgccaccaccatcatccgtgtgtatgaagcaactccttcactcctgatgtccaacccaccccccagctccattcacgcctgtgaagtactttgagttccttcgaggaaggtatggtagaaatgcatccattaccaagaagaaaagtaatcttttatcagaaattaaaatcctacagagtcacttattaagtctgcagtcctgatagtcccatgaaaatctctcctctcattttggtactgtatgtgatctgacaattgtgtcaaaaatattctcatttttcatgatactaaaattcacaatttcacatccttgtgacagagcaaattgcagttaagggtccctgtcacttgagggtaggcacaagacccattcattttccaccctgacagcctcagtccagcactgaaagatgattactcatctccaaagactttctgtctcttgctgactcattctccaactggttatgaactaaacagaggcagcaacttttcctcccttcaggaaatgccaacttgagcaggtgatattctttttctttgtctgcaccacacctccccaacagaggaaagaaaatgccacttggctgacaaagccatttttacactgacagtttaaatatacctccagctgccctcaacttcccagacagctcaattggcataaacctggctcttggttccccgcaccatgaatacatttgtaaaatcagccaatgactttatggggctggccagaaagcagccttttctttaaaatatctgctagtgttgctgttcatcaaacagtgtttgatgaacaagtgttttatgagtcttcctcccttgtttctattacatctttgaaaagctggtcattagcagcttctttgactttacaaataaactacattaaagaagaagaaaacaaaacaaaatacattatgctccaaatctccacagatcatccatgatcattcaagaaacttaatccagatattctgaagaacaaataggaattcattggtctattttaagttatggtccaaagtagaaaggaagctgaccaacttaccatgttatctttgaatggacctcccactctaaaatcaatcaaggaaaaagtaaagaccagtgtctggtattgcatttctcccaagaaagcagaatttcatcctgagataaacaaaaaaaggatctttcctttgacattggtcacgatacagataaaatcctaaataaacatttgcctgtgagttactgaagctcccttaagttttactgtcctgatggctacatgtatgtgatgacccatatccctcacagacataataatcatatgggggaaaaaaatgatgtttacctctgtaaataaacaggttgtagtcttaataaacttggagcattttcttttaacacctattgtattattttatatggcaagcaagttcttccaaaggctggactcccttgtagttgctgcctaatgtagagaagggatgggggttgagagacaggaataatttcctagcaggmaggaatgtgttatcatcgacattatttagaattgctggactatggtgatgayaaaaggtggacctctcccactgcccccaaccctagggtacgctcctattcccccgcaaagcttggcaagtaaatatccctcctctttctttgtgctttttctcctgagttttccttttatgatccccacaattatgggattgctcaagtctccaagggaaggagaagggaatggtcatctcttctcattttgaaaacacagtataggttgaatatccttatcctgaatgcttgggaccagaagtgtttcagattttggattttgggggatgtttttggattttggaatatatgcattatgtatacttaccagttgatcatcctacacacaaaatccaaaattttccagtaagcatttcctttcagcatcatgttggcactcaaaaagttttgaattttagagcattttggattttggctttttggatgtgggatgctcaacctgcatcactaactctgatatctgaattatcttgttccatgaagacatctatcaacacctctctttctttctctaagggccatagttttcagtttggtaattagtaacacacaaaaaatgcaaatcaaaatgaaaatagcctagaattactttaagcctagatgccaaaattgaatcacagtctaagaaactcatgtataagcaaatctcacctttgtaatatcaggctcctagtaaacattcttctcaaggaacatgatattgtttaaactgtgtttccctaacaggttcaaatttgctttctactgtggattttccagagctcctgatcaccataatccttttctagactttttattagccatctcaggcatgggctttgattcaacatgtcattcaactctctttgcaaacatggagagtcagaaagtatttaagaggcttcctaccaccactgcatcagatgaccccaggagagtccaggtcaggtccatggtttgctgtgcatctatttattacaagaggactctgcctcatgtcttattcatccaactcttcacaactttttagtaggctctgtctgaagtcttgatgaggctcaattcccattggcctgctgttattagcatacctgggaattttttaataactgtcttatctcagaatgctgtaataaaataccatgaactgggtggcttataaacaacaaaaatttatttctcacagttccggaggctaaaagtttaaaatcaggatgccagcatggtcaggttctggtgagggtccccttccgtgttgccgactgccaacttctcatcatatcctcacatggtttaaaaaaaaaaaagagtgagcgagccctctggggtgcattttatttgatttatttatcttttaatttacttattgtcgagacagagtctcacactgtctcccgggctggagtgcagtggcgcaatcttggctcactacaatctctgcctcccatgttcaagcgattctcctgcctcagcctctcgagtagctgggattacaggtgcccaccaccacacctggctaatttttttttgtttttttttttttaggttttcttttgtatttttagtagagacggggtttcactatgttggccaggctggtctcgaatgcctgaccttgtgatcaaccctcctaggcctcccaaagtgctgggattacaggtgtgagccaccgcacctggctgggtgtgaattcatgggcatgaattccatgatgggggctccatcttcacggaataattacctatgccatcatactgcggattagggtttcaacacaggaatttgaaagggacacaaacattcagtccgtgcaacaccctgttgcgattgtctttcattctttcttttctttcttctgttagcatctgtacaacataaggtgaaacccaaataaaaataaagggaaaagtgggaaaagggacaaaacgttaatcaagaactttggtgaagcaaaaaggagcacaagtagaakggagatgatgtcatctctgaagtcacggaggggatggggaggctgacatttcacctggcccgggcctttctgcatcgttgctgatttttgtttgagagactcctgtgggactgcaaggagagatgggacaaagaccataaaaggacaaagagaactgagagggctcagtggtggtgatcctggctctctgcatttgaagaaatctttccagatggctggttctccattgatggcaatttgttggatgttcagattgggaatggcaggggatgggctggatagcattcctgagcaggcagggccagcatcgcagccagcagggcagtctggaacccacaggagcttcagagtgtcaagtccagagggaaatgtgaggcagctagaattgaacctcaagaagaaggttgcattccaaggacatgccaaaaaaaaaaaaaaaaaaaacaggcaaaacaggccaggcaaactgaagactgagccaggcaagcttccccaaaactgtgcctttacaagacactatggccaagggcaagaaagaaattgttgaaagctgcatgctggcttggcagaacaaataaactttcatgagagtgagtgctgtttaagcatcgatgcagctctgagcttcctattagaagagcaggtacctaccattccttcagatagaagtgctatttaccagcacgccacaacttctccctggagactctgtgtggcggacaccatataacacagtgaacagtgtcctcaatttgagttttcaagaaatgcagaggccacttaccaatagctatttcttccaacagcctctagtaaaacccagaagcataatatgatgctgtggctcaggggcagtctttctgccagagaataagctaacaggggctggcgattcagtgtgtaggactccaaaccatcagtatgaatttttttcctgagctttgagaagggcagcattatcctcagcccctggggaatggaggttgagtagtaagtggggatgccatgctgggatattaggactaattgtaaaagcagccttgtattgacccagccctgggaagtccagcccgtcttgtccaatcaaagccyctgacagaatttccgtccttcctttgggatgagaaggggagaaacaggtcacagacctatgttcttgagttttctggggaatgaagagtaaagaacgggaggaatcttagttgtgcctgcccccctcactggacgctgggcaagtgagggcgtagctttgccgggagcagctggctcagatgctgctctccggaggcttcctagggatttgaagtttccttgaggagttcttactgactgtatgatggaatgacgtagagttaattgtgctgttgccttggagcaactgacattcttggtctctcatccctgttgaaggacagtttcattgcttttcatcattytggggctcgtaatattttttctgcagccatactccctccaaatgtggcgatgagataattttatgtaattatattcctgacatactgtatgatttttaaaggcaagtgcttgacacatgcaggcagagtctgcaaatggcaacccatgaaaggggatgttaacaaaatgttggatttttccctactgtaataccatcctactgcaccaccaaaaaatgacatgtactgaaatagatgttgactattttagagctcaccttttcctactgccctccctgctacacaaaccacattcatccaatgctctcacgtattcccttcctgagttagaaaaagcacacacacagcgggaagatcatttctgttcagaaatcccccagtgcaagagagcagctcagaggcagccgtggcttggtcaacatgggcccgggagggcatgggcagttctcacgtccttgtccttggatattggccgttgcttgtgcaagtgtgtctgtaaccctctcgttatgtgccctgcagtcatacaggagtggcagaagagaggcggacagccctggcagctcatcgagcccgtggatggattccaccccaacgaggtaagcacagtcacatggtggctgcagaaggctatttgatggtttgttggtttttaattatggttacacattcatgtgtttatttttatcctgttttgttccagaaaggatttgaggtagtgtacatacatgtataggatagaagatttaataaaaacaaagtgaaatttgggacaatagggaaataaagtagaaattatacctggattcctgatttaatttctataattcataaaatatgtgcagggcattcctgagaaactgccagaagggcagctctgtgcgatgctaaaaggggcagtaagccatggcttccataatacaagaaaaataaatcaagcactccaaaaaaaaaaaaaggaagaaagaaaaggaggaaaatgacgaggattttttggaagtgagacccatgagaaatttattctatggtctttctagaaagggtgctgtataggaggagaacaatgtccttagcagtatcctgcagtaagagctgtttctcatcaaggatccaaagtacagttctgtaaagtagctctcctctggtctcttcacaaagcaaggggagccagagggtgggactctgtcccctcccggctccactcccatcccattatcctggcttcaaccagagaagctccacttttatctgttgtatgtcctggacttgctcacgacatttctttattaagaagaagaagaaaaagaagtsggggagttgttctgccacttgtaaaatgttgaaagctgctcctctatggggagggatgggccatttactctcaggcaataccacatcactagagcctttctgctccagccgtgggggaagcatggtgtggctaccaaagggtacaaacctgaggggcatgcctgggggatgctcgcttgctggccaccaagacctaggccacaggagggctgattgtcccctcaagagcctgaatgacggtaaacacagcccaccttcctccaactctaggctcagccagtgctcacaggcagggctaagaatcacctcaaaaggaacaagaatagaaggatgctcactccccaacaaatgagtaaaagtggcgtcccacaaatgctgagcaaattttaaagtaagtattaaatgcccacctcacggatttaaatagccacacacaaaaaatcagaataatgccctcagaatttctaaccttcctgtgtatcagttggatgagttgatcaaagaaaattattggctagattctggttaaatatcagggtctgatcccccaaaaatgatgtctttggttttagaagagtttgtgtatatccctactttctattttttttttttttttctcgagacagagtttcactcttgttgccccggctggagtgcaatggtgtgatctccgctcaccgcaacctccgcttcctggtttcaagtgattctcctgcctcagcttcctgagtagctgggattacaggcatgcgccaccacacctggctaattttgtatttttagtagagacggggcttctccatgttggtcaggctggtctcgaactctcaccctcaggtgagctgccygcctcagcctcccaaagtgctgggattacaggcgtgagccactgcgcccggcccccttctttctagcagttattaggtactagttcttatcattctctgcacagaatagcatcttacccttctgattctgtaaacaatgggtatatgaaaagatggccatgtaaagtatcaggaacaaactaaaaagaggaggatcaaagacagctttgttttatcccccaggatatatttatcccatctatcaaatgaccattccgtccctgactcttaaaatgatcttggggttcaaagtctgtcaaattgggcctctatcttgtacttaaacagtttcacctatatctgattattgaaaacacagtcaaaagctgaaaatcaatgtgtgccataatcttatgctattcctgcaagacttgttcacatgctggtagccagtgataaagtggccaaaaatggatagccaggcctaaagcctgcctatttatcatgtatattgagctgaaaagtccagattggcaaagtgccatccaaaactatttattgagtgactacccagtgtcaagtgcagtgagaattcaagagtgaacaagaaaatgccctgccatttaaaattatagtatagagtaggaaaatgatgagtaaacagacaattaaatataaagcagtaaatgcctccaactgtgcaagtacagaacaccacagagcattatggggtgggatgagagagaggggtgttcaaaaatgttttcaggccaggtgtggtggctcacgcctataatcccagcactttgggaggccaaggtgagtggatcacctgaggtcgggagttctagaccagcctgaccaacatgcagaaaccccgtctctactaaaaatacaaaattagctgggcgtggtggcacatgcctgtaatcccagctacttgggaggctgaggcaggagaatcgcttgaacccaggaagcagaggttgcaatgagctgagatcatgccattgtactccagcctgggcaacaagagcgaaactccatctcaaaaaaacaaaaatgttttcagaggaggtgatgtcagaacaaagaccatgagctagtagagtgaagggaagcgaagaggggtttcaggaagtattctgagcagaggcaactgcatgggcaaagacctgaatatgaaagaaagcgtggcatgttggaggaaataaaagcgctcagtgtggccagagagtatgaccgtggagttgacagacggagaaatctaccgcgtattaaggaaccagatcatggaacatctgtctggggcttgaccttgatcctgagggacatggggagccactggatgttctcaagcaagaaagaaatagcccaacgtgtgtcctaaaaagatgcctgtagtagcggcgtggagggtratttggtagggaaccagtccagagagacggagaaaaacaaaaggaaaagttgtattttaaaaagattttttaaatgaccaaacacagagttacaggacagcaaggcaagttcttatcagagattttattcaaggaatcaaagtcaagtgcatcctggagtcagtatagatcctgcccactctcttcccacattctccacagcggtcccaggccagtgtaaggatggcccagcatgattccagatcatcgggtgattgaataaagcatcatgctgtattacaagaagctaacttgatgaactctgaaaccgcttctggctttactgtcttaatacattggatgtatttatatgcaacttaacaagaaagtgggctctgaaagatgttcaactacaaaggaaaatacctggaaaagaacctctattaaccagaagatcccasttaatcagagcacccattccctagcattcatctagaatagattttattccacacacatgcttagtagggcagccgatgacctcctgagctgccaaggttgtgtgaactgrcaggaggagggtgtctccatcctcccgtmctgaggacaaatattggggtggagggtatatgataaaagtttccgctggtaaaatgaattagcttgcatccatctgatggcataccatgcactgaattaccccatctactaaaaatacaaaaattagccaggcgtggtggtgcatgcctgtagtcccagctactcaggaggctgacaggagaattgcttgaacttgggaggcagaggytgcagtgagccaagatygcgtcactgcattccagcttgggcaacagagcgagacttcatctcaaaaacaacaataacaacaaacaaaacaaaacaaaaaaaagagatctacctttagtgacacagaaatatgtttataatgtacagcaaagtatatacgataagactacagaccataggagcaatgattcaactgtatgcatttgtcaaactcatggcactgtttaccaaagagagttcattttactgtgtctaaattcgacttcaataagagcagattacaaaatgatattcaagaggaatccagtgtgtgtgtgtgcgtgtgtgtgtgtgtgtgtgtgtgtgggtgtgtgtgtgtgggtgtgtgtgtgtgttcagatataaaatcagggccaggcgtagtggatcacatctgtaatcctagcactttgggtggtcgaggcaggcagatcacctgaggctaggagttcgagaccagcctggccataatggtgaaaccccatctctactaaaaatacaaaaattagccaggcatggtggcatgtgcctgtaatcccagctactcaggaggctgaggcaggagaatcacttgaacctgggaggtggaggttacagtgagccgagatcacgccactacactccagcctaggtaatagactgagattccatctcaaaaaaaaaaaaaaaaaaaaagatataaagtcagaaaggctctacaccccatgttaacagaggctgcctctattttaattacagatgactttaattgtgtttttctctttttgcttaagtgggttttcagttcttctagaatgaacaggttttcctttaatattttagactatgaatagagaagcataaaagaatatctgttggagaggctgaagcaagagaattgcttgaacctgggaggcggagcttccggtgagccgagatctggccactgcactccagcctgagtggcagagcaaaatcctgtctcaaaagaagaaaggaaagaaagaaagaaagaaagaaagaaagaaagagagagacacagaaagaaagagagagagagagagagacagaaagaaagagaaagaaagaaagaaagaaagaaagaaagaaagaaagaaagaaagaaagaaagaaagactaacatggataaagagaggaaagggtagctgtgccctgccctgtgcagcgcctcgtggaagttaaaacaggaaattgcggtatgagaaacccatagtagatgctcagtaaatatttgtcaaatgaatgaatgattacagtggatcattttatcacaagtctctagtttggtgataagcatgccagtctcatttcagacccaatattttctcaatgcctgctcataaatattttattccttattagagtgacaaccaactaattgcgttcaaaccagttaccaartgctcatatctgagctctttcattttcgtttccctcttcttgccctcaccctgtctcctcccttattaacatagatagggaaataaatgccttggtaccacataattgttagaaagagcttaggtgtatcaagttgaaagccaataacacaaaaaagaagaaccagtaattttccacagacctggcagcagcctcctttgttgagaaatggcaggaaaacagccacaagcccgggcctctgtcttcaaaggtcctgatcactttgtgtgagagatgatccggccctccctggagcactggccagcttcgcaggcagcctttgacatgctcctgcttttaagtgcaaagaagtatatgtggggtgtgaatgctgtgtgcgctttctgtgtgtgtgtgtgtgtggtatccgtgcactttctgtgtgtgtggggggggtatctgcgtgctttctgtgggggtgtgtgtggtatctgtgtgctttctgtgggggtgtgtgtggtatctgtgtgctttctgtgggggtgtgtgtggtatctgtgtgctttctgtgtgtgtgtgtgtggtatctgtgtgggggggtgtgtgtatgttatatgtgtatgtggtgagtgtgcatgtggtggtatctgtgtgaggtgtgtgtggggtgtgtgtaggatgtgtgtgtgtatataagagagatgtatgtatgtgtggtatggggtgtgtggtgtgtgtgtgtgagatgtgtgtggtgtatctgtgtgtggtgtgtgtgtgatgtatctgtgtggtgtgtgtatggtgtgtatgtggcgtgtggtgtgtgtagtgtgtggtgtgtgtgtgtgtgacgtatttatgtgttgtgtggggttgtgaggggtgtggtgtatgtatgcgtgatgtgtggtgtgtgtagtgtttctgtgtgtgctgtgtgtgggatgtgggggtgtgtgtgatgtatgtgtgtggtgtggggttgtgaggggtgtggtgtgcatggtgtgtggtgtgtgtggtgtttctgtatgtggggggtgtgtgacgtatgtgtgtgtggtgtggggttgtaaggggtgtggtgtgtgggggtgtgtgtgtgatgtatgtgtgtgaggtgcggggttgtgaagggtgtggtgtgtggtgtgtgtgtggtgttggtgtgtggtgtgtgggggggtgtgtgattatgtgtgtgtggtgtggggttgtgaggggtgtggtgtgtgtgtggtgttggtgtgtagtgtgtgtgtgattatgtgtgtggtgtggggttatgaggggtgtggtatgtgtgtggtgtgtggggggggtgtgattatgtgtgtgtggcgtggggttgtgaagggtgtggtgtgtgtggtgtttgggggtgtgtttgtgatgtatgtgtgtggtgtggggttgtgaggggtgtggtgtgtggtgtgtgtggtgtttgtgtgtggtgtgtggggggtgtgtgtgatgtttgtgtgtgtggtgtggggttgtgaggggtgtggtgtgtgtggtgtgtgtgtgggggtgtgtgattatgtgtgtgtggtgtggggttgtgaggggtgtggggtatagtgtgtgtgtggtgtgtgtgtagtgtgggggtgtgtgtgatgtatgtgtgtgtggtgtggggttgtaaggggtgtggtgtgtggtgtgtgtgtggtgtttgtgtgtggtgtgtggggggtatgtgtgatgtttgtgtgtgtggtgtggggttgtgaggggtgtggtgtgtgtgtgggggtgtgtgattatgtgtgtgtggtgtgggattgtgaggggtgtggtgtatgtgtgtgtggtctctgtgtgttatgcggtgggggagacactgcatggacatgaccgagattacgcagcgggatgagtgaagttcgtgtccaccttagaaggctcagaacacattaaaatgctggggactttatgcagtgactggatcagtcctagttttctctaactactaaaatctcacaaacagtcagacacagaaaggactttggatcactttctgtcgcccactcaatgtccagatgagagggctgggcccagagagggagttggctacgctgcctattaggaaggggactgtgagctgccctgtggggaaaagtcagggatatccctgagcatccttcccgaacaatgtattcccctctggcaggccttcagcaatcacatttctcattgctcagcattgaaaaccactgttgagatggagccatctggagtctgcaggcctggccaggtcccatttgctaaatgagggcattgtttgcagagaaagagcatcctcctcaaaggcatattaatgacaagccagacactggacaaccaagaatggacccagctaacatcatggataaagggaaacctgacatgcgacagcagaaccagagagtaagcctcaggctgggaaagccagagtcgagcctgctgtgtattaagctaaggattcctctctggcacttcagccagactccctgccctcacagcctgccaggatcccaccccccacccagtcagggacccagccagcctccactcccaggcacctgtagttccccaaacatgccattctctcccacagctctgagcctttgcacacgccgtgtcctctaccattgcagtttccccacatcatccatctagggaactcctagaaaattcatctcagccrccaccttcttcagagagatcccaccccttcccccaccagacagaagtgacacctcttccctttccagtccctgtgggcttggtggtgtcatttggcatgtctggttaccttactaggctgagactttctggaaggaagaacacaccacgttcatctctaaaacccaagccttaggcctgcagtaaatgctagctgtccacagataaatgaataagtggatttctgagaaagtgaatttttaatctattactgaaaaaacaaattccatacacttagcagcttaacacaatacacacttatgatctcacagtttctgtgggtcacagcttaactgggtcctctgcttagggtctcacaaaccaaaatcaaggcatggcatccaggccatgttctcatccggggactcatctggggaagaactgctttcaaactcackcaggctgttggcagattcattcccgttgagactgcaggactgaggagccagcttcaggctggatggcaaccgggtcaccctcagctccagcccagaaaggagagcctccgaagccagtcactagcaaggccaagcctcacgcaatgtgacaccatcgctgaagcagcgtctcctcaccacggccacacttcctctgttagaagcaagtgataggtcccaccgccagcaagggaaggaggttatacagagacatgggggtgggagtcatggggccatcctagaggctgtctctggcagaaagcacgtgggaaatcttgttggtaagtgatttgtcctaatttcccttttcctcgtcctttgggttctctctcacaggtggctttgctgttgttggcggatcatttctggaaaaaggtgcagctccagtggccccaaatcctgggaaaggagaatccgttcaacccccagattaaacaggtgtttggagaccaaggcgggcactgagcctctcaggagcatgcacccctggggagcacagggaggcagaggcttgggtaaactcattccacaaaccctatgggggctgccacgtcacaggcccaaaggactcttcttcagcagcatctttgcaaaatgtctttctctcaatgaagagcatatctggacgactgtgcaatgctgtgtgctcccgggatcagtaacccttcygctgttcctgaaataacctttcataaagtgctttgggtgccattccaaacaagagagtatctgtgccctttacagctaattgttctaaaaggagtttctaaaaacacttaagtccagcgatgttcagcaatttacccagggtcttggcatgccaggggactgatcccccctgtgttgctgacttctttaaaatggccgggcgagctgagcttcctcctatgcaggcggctggccagctgccaaggactcacacaagggggcagagcaggcttcatgaggcccccttgaaaaacataacacaaaactataaatacaaaattagacatgaacttgaatacacatttagaatgaggaaagaaatcaccacaaattacaaatgtttaaaagttgacaaagtgccatataacctcacaaagtccagaaaaatgacaatacaatttttttcctttaaagtattttattagttgattagtgggtataaatgtacagttagataaaagaaataaggcctagtgtctgacagatcagtagggtgactatagtttactaaatgctattgtacatttcatttcaaatcgctagaagaaaataatttgaatgtttctagcatacagaaaagacaaatatttaaggtgatagatacccaaagtacacttatttaatctgtacaggaagactccagagtaaagggagggtctcccggcctgactacctcccttctcccaccctatatgtcttctctgaacctgtcacttcccacccctctaaaaaagactgtttaaattctcttaggcctgaccactcacaaccttggggaatcacctaacatctaaccagttccatcttttgaatgggctcaggtgggaaaacaaaggtacccaaatcctgagctttgaccttactctgaggcacagcaccaaggaactgaggggtggaagaggacgttgaccccatctcactttttcagaaaacacaaatactgcaaataaataccacatggaaatcattactaaataccactattgcctgcaaaactggagtctgaggtcaggccctctgccctggatcaggtgcccgggcaaggctcattcacttctgcctgcattttctatgctccagacacgttccttctttgagatttgaccaagtctttctctctggcttgagaatgccgtccctgtgctttgcgtacttcttataacagcacctatcccgtattgctgcacaggtgccccttgagctactgtcttcagccttgagttttccagaatgatggtgtctgaggattgtccactgacaggcacctgaagggctttcctgggttggcatgctgccctccccatctccccattcctggaggggctgtggaaaaaagcaccggaacctgaactgcaggctccatgagatgggtacctggccggtcatgtgtactcctgtgtccaacccccaacacaatgcctgaccactgcagacgcacaagaaatagcactgaatgaatgaatgaatgagaagttagtgttgctctccaggtcacactgttatttcttgctatttaaaagtaaaatcagcagcctcttttttgacacatttgaattagacccattgaatcacgctcctcgctcatcacggtgagaagagtgagaaagaaaagccatcagaggcgccttcttccctgggcacacttggtgaggggacttggggctcttatgtgatcttcatctaaataccccaaaactctattataatttctgtctcccagccgagcactgtggctcacacctataattccagcactttgggagacggaggtgggagggtcacttgagctcaggagttcaagaccagcctgggcaacatggtgaaaccctgtctctacaaaaaaaaaaaaaaaaaaaaaaaacaaaaattagctgggtgtggtggcacacacctgcagtcctagctgcttgggaagatcacttgagcccagcaggaggtcgagggagtgagcccagactgcaccgctgcactccagcctgggggatagaatgagaccttgtctcaaaaaaaaaaaaaaaaaaaaaagaaacagatactctctcctgttatcagaggagagacctggcttgccctacactattgaaatagagctcactatttgccacatgagtaattaccaaaatttctatttccacccaccatgagcatttttcatttcatgctgagccttttgggttcaggccctggtgacaaaaataaagtcagccccccagaaaaagcagatcagctaaaaatctctatatgggacttgtattgatacacaatgtgaccggacctgaatctccccagaatccgcaccagcttcccaatccctccctgctctgtcactgatttaatccaactgagaaaattttcttaactagggtccttagggatccccagaattaatagtgcctgtaaacttgaatgggaaaaaaaataagtcttcactgtcttctaaatgctaatgctaaaatttagcatttcctttcataatgaatgtaggtaacaaaacacagctgaattagtccttgtcacaaatattttcacatcacattgcagttgttgcagttactgttgcttattttttgtagcagttatgttctataaagttgccatgaacactgaattagcacatgctgaaccattgtccttaggggaagtacaaggctaggttcctgtgagcctgcagtctcaacattttcaccaaccaatcaatatataactgttttccgtgtggcttttgttcaaaagacaccgtatttaatatacagtggattcattaacattgaccgcacaggcaacagcactgtaactcctgcctgcaaagagctcatctaccactggggtgattttcttggtgcggcacgttgcagtcttctgtggcacatcacttagcagcactagctagcacttcagcactgcccttcatggccattttaaacagcaacatcaccgggaaaaagcatgaaatgccaaaaatgtggcactaagtatactgcgaagaggacacaggtttgcagtatgagagctgaaacaagaaggcaaaacttgaccggtcgcagtggctcatacctgtcatcccagcactttgggaggccgaggcaggtggatcacctggaggtcaggagttcgaaaccagcctggccaacatggggaaacaccgtctctactaaaaatacaaaaattagctgagcgtggtggtgtgtgcctggcatcccagctactctggagactgaggcaggagaatcacttgaacctgggaggcagaggttgcagcgagccgaggtcatgccattgcatgccagcctgggcaacaagagcaaaactctgtctcaaaaaaaaaaaaggcaaaacttcactttgccaaccaatctcatctggggaacatgccagttgggcaactcaaatttgtcattggtctgtgcatgggcacagatgactgcaaaggcgccacaagtatacattaatgttacaaataaattttagcaaggaggtgaattcacaaatatgtgatcagtgaacgatgccgatcaactatatcttatactttaaaacatcaataccttaaaacaactgtagttattagaaccaactctggatctggttattaacacgttcaaaaagaagcccatatatttatatatgctcatttgtgaatatctcaaaatattctttgatattctatttcaatagaattggttttcttcgtaatcctacatgttttgtttttttgcatttaaaaatgttattctggctgggcatagtggctcacgcctataatcccagcactttgggaggctaaggtggaaaaactgctttagctcaggagttccagaccagcctgaatatcacagtgagatcccgtctttaccaaaagtcaaaatgattagttgggcatagtggcacatgcctgtggtctcagctacttaggaggctaaggcgggaggatggcttgagcctggaagttcaaggctgcagtgagccatgatcttgccactgcactgcagcctgttgacagagcaagaccgtgtctaaaataaaataaaatgaaaatgttattctgagaagggatcctcaggcttccccaaactgccaaggggctgcatggcacaaaaaggatgtatgcgctgtgggtggggtgggggtgctttgagaaggaagaactccaaagtctgaaaagtttggatgcacagcataatttatttgcttcctggaaagtcacagggtgaaaattctacagtaaaaaagtctgggccgggtgcagtggctcacccctgtagtctcagcattttgggaggccaaggcaggcggatcacgaggtcaggagattgagaccatcctagccaacatggtgaaatacaaaatacaaaatttagctgggtgtggtggtgcgcacctgtaatcccagctactccggaggctgagggaggagaatcgcttgaacccgggtggcggaggctgcagtgagccgagatcgcgccaatacactccagcctgggtgacagagtgagactccgtctcaaaaaaaaaaaaaaaaccaaaaaactctgctccgctcatcatttacccaagattttgacctaagctttttgttctcatgatgcctattaacactctgtggcatctgctttttcagaagcaccttggaagatgctgtttagaggaattagcctctgtctcacacactccctggcagtgtcaagaaagggatttcccaggtattttaagaccagaattcccgacctctcatctttggtgtgaggcagaatgtctttggaatccctttcattgcaacaacagctttcctggtggaaccaaaagtgacaaagacagcatctctcctgggccccaagatgcatggcgcacattcactgtgctatatggatttcctgatggatggatgcatcaatatgctattaacatgtcagtttctcattaaatctragtacagaacccgtgtttgccyggcgggatgaactcccctaatctgatttggcagaggctctagcataaatattcgtacaagctaaggctcttttaatctgggcctttgcttagggtaaaggggaatggggagaggttgcttgtaaagcctgttttctgggtcacttcttaaaactgcagtatcaaaaataatggcctcatcatcatgaacctgtcgttaaggaggattacactttgaagctcttggatggatggaaaggcagaggagaaataaagagcacatgttgaggctcgctaaggatttctttgggtattgtgctcctggcttgctgctttgtttataattaattacatggagcatttacaggaagacttccagcctcagagcgctaatgtaactcacaggttcacaaagctccagtcaataaacctcagcagaaagacggctgagaggatgcaccaagggcttccatgacctgtccaggctcaaggcagcttcagaccccaaagactttcagtttcacctaaggactctgccctccaagatgcacactttgtacaggctcagaaaagcccccagctgttaatattattacagtgattttctgcaaatatcagttggagccaggaggttgagtgaggctgtaggggagcaaaggactcttcagggacaggtagagactccaggctcgtgtaagtctcatggaaagaatgcaattctgctcagctgcctcctggagctggggacacatggaaacacaatcagtgggaattcatgaagcaacaggccttggaagccttaagctcctggtgcctcagttaccttctccttaaaaagggagcaatagtaccattttccagcactgttgtgagcattaacaagagctaatgcttacagaggggtaagtgacaagtagagtgcatatatgatctcacttaacccttacagcaaccacatgtggcaggtctgctatgattccctacttttacagataggaggccgagaacaattaagtaacttgcctgagactgcacagctaatacgtgatgagtcaggtgccatgcatggtgactcatgcctgcaatcccagcaatttgggagggcaaggcaggaggatcgcttgagcccaagr

SEQ ID NO: 93802 - DNA, 19585 bp, Homo sapiens
tggtatgggcgtgccttgcaggaagagagctaaggagtttttagttttaaagtggaacctgtgattactgttcctgctcataagcggattgctataccgagatttattgatagttgagtagttggtgtaaatgagtggggtagaagcccaaggagattggttaaggcaataaagagaattagggatattagtataagggatcaggttcgtcctttaatattatgtgtgattattatttgttttagaacaagttgaactagtcattgttgaatagaaatcaatcttgtattaattatattaatattaattagatagttattagatgatactaattagataattaattaatattaattagagagtatattaattaaatagttggaggttggaaggagtgtggtgggaaacaagatgattagtgctgctgcgggtaaacctaggattgtcggggcagtaaatgaggtgaacagattttcgttcactttagttctcaagggttgttatgtttttgtgtttcaattatttttggtgtagcgggtgtatggtaaatgaaatttgatagttttaattgaataatcgagaataaagttatgattgttgatataataataataggtcatgtggaagtatctcgttgaggaattcactgtagagaggtgtgatttctgtcagaagaagtctttaaaaggttaacgctggggtagctttacagtgagattatagtgtggatatagaccaagttttgaaagtttttaatgggactaattttaaaacaatagatataaagctgtggttagatccacacatttctgagcattgtccatagtagaggcctggtcatgtagtggttaaggcaaattggtttaagcgtccagggattgcatctgtttttaaccctaatgagggaatagttcatgagtgcaggatatctttggatgagattaacatgcggatgagaatttctattgagaggatgtttggttatcgaattcgaggagttgaagttcttctggttttaagttggctgttggaagtatataagaatcgaaacttaattcttcataatctatatactcgtagcttcaataccattgatgtccaattgttttaatggtgagagggggattattgatttcatctgttatgtacagaatacatagggatgggagggcaattaagattaagctgatggcaggcaagatagttcagacagtctttatttcttgggcatctatagtgctagtatgaatcagctttgttgtattagagaaataatgtatagaaccaggaaactaattaggaaaataattataagagtgtggtcatggaaggtaagtagttcttctatagtaggggatgaagcatcttgaagacctaattgaactggatgggccattaagatatatagggcttaacctataactttgacaaagttatgaaataattttattaatatcttattgagaaagtcatagaggttatgggattgacttgaaacagtctctggaggttcgattccttcctttttcgcttaggtcttcatgtaggttggttcttcgaatgtgtgatagggtggtggacagccatatagtcattctaagttggtagatggttgcacaattgttagaacttttcgttttgaagcgaagccttctcagatcatgaaaattattagcgttactgctgttagggaaataaatgagcctacgaatgaaatagtatctcatgcggtgtatgcaccgggataattggagtaatggcgaggcatactggataggctgcggaaatgctgcggggaaaaaagttaaattgacacctataaatatgatggcaaagtgagttttagcatagatttgattgagtgtataacctgaaaatagggggaatcagtggacaaagccttctataacagcaaatatggcttctattgataagacataatggaaatgggctacaacataatatgtatcatgtaaaacaatatctagttatgaattggctagtacaatgccggttaaacctcctactgtaaaaaggaaaataaatcccagggctcagagtattgcgggagatcatttgatgttaccgccatgtaatgtagctaatcagctaaagactttgacatgagtaggaatagcaataattatagtagcagaggtgaagtatgctcatgtatctacatctgttcctactgtaaatatgtggtgagcccatacgataaaccctaagaagccaattgatattatggcctacactatgcccatatacccaaatggctcttttttcccagagtagtatgttacgatatgggaaattatcctgaagcccagtaggatgaggatatagacttcagggtgatcaaagaatcagaataagtgctgatataagataggatcacctccaccagctgggtcgaaaaaagtagtattaagattgccgtctgttaatagtataataatgctggcggctaggactgggagagaaaggagtagaactgctgtagttaggactgatcagaccaaaaggggtgtgtgatattgggacatggctggaggttttatattaataattgtggtaataaagttaatggcccctaaaatagaagagacacctgccaaatggagtgagaagatggttaaatctacaggggctcccgcatgtgttaggtttcctgctaaggcggggtagactgttagccggttccagcgctggcctctactatagtggatgcaagtaatagcaggaaagagggtgggaggagtcagaaactcatattatttatccggggaaatgctatgtcaggggcgccaattatcagagggattaacctccagttattattggtattactataaagaaaattataagaaatgcatgagcggtaatgatgacattgtaaatttgatcatcacctagtagagtacctggttggcccagttccgctcaaataaggaggcttaaggctgtacctgctatccctgctcaggcaccgaatagcaagtataatgtcctgatatctttatggttggttgagaacgatcaacagttggtgaacataagtgaagtgagaaaaggtaaaatggctgagtaagcattagactgtaaatctaaagacagaggtcaaggcctcttttttcctgtcccgaggtgattttcatgttgaattgcaaactcaaaggagcagcttgaatcctgctggggcttgtatgccatttttcccccaactgcgggagaagtagattgaagccagttgattagggtgtttagctgttaactaaattttcgtggtttaagtcccaccaatctagcaagggcttagcttaattaaagtgattgatttgcattcaattgatacagaatagagtttttcagtccttagggattttttagaaattaagtataatttacttgctaagagctttgaaggctcttggtcttacttaacctaaatttctagattatggatagtgttagtggagagattggtaggaggatggtagagaagatgataagtgtggggagaagtaatatgaaatatttttgaactgtcattttatttttatattattggatgtggggaatattgtcactgaaatggagtaaactaagcatatgtaaatatacagattgagtagagttatgatagctataatggttgggataataagacttattttttgtaaactcttgaatggtgattcatttaggcaggaatcctgttcatggaggtaaacctcctagggataataaaattgatagaattatagatactgaccatgttaatttgtttcaggcatgggatagtgatagggttgtagtgcttgaattcaggctgagtgctaggaatgcagtggttgttaggttaaaaatggtaatgtttgggttatatattagtactgctgttattcaacctatatgaataattgaggagtaggctagaattttacatagttgtgtttggttaagtcctcctcaactgcccactataatagataagatcaagagagataggaggatgttcgtgtttactgatggaaaaatttgatatataattgaaatagggccagtttttgtcatgtgaggagtagtataccgaatgttagggaagttccttgggttacttctggaactcagaagtgaaaaggggctatccctagttttattactaagctgttattatttttaaggatgaaagttgattaatagtatttattgttcactggagaacaggttattgaagagaatacttattatgaggaatatagatgcggttgcccgtataaggaaatatttagtgactgcttctgtagagcgggttttttttttaaattgagattgggatgagggctagtatatttatttctaggcctgttcagatgaaaaatcagtgtgagcctagcgttgtgataagtacctgtaaaaacagtaaggtaaataataagttgagctaatgggttaattaggatgggaagggtataaccaacatttttggggtatgggccagatagcttatttagctgaccttactttaggacatggtgtgataggtagcatggggaattttggattctcggggtgagttcaattcctatagttctagaaataagaggatttcaacctctattgtttactctatcaaagtaattcttttgtcacacatattatgtttggggtgggatgctggagattaggatgggtattgagatatgtcatatacagaatactagtgtaagtggtagaaagttttttttgtaagaggtgtatgagttgatcgttgcggaaacagggatatgctgtttgaattcataaaaataggttaagaggaaggtcttggtaatgaaatatgtagtatagagtttggtgaatatatagtgtgtaatgttcctagaaaaaatgtagtagttagggcatttattacgataatattcatatattctgttataaagaagagggcaaatggacctgcagtatattcgatgttgaaacctgagactaactctgattctccttctgttaggtcagaaggggctcagttagtttctgctaatgtggagataaatcatattatggctaggggtcatgatggtaggagcagtcagagggactcttgtgttgtgatgagtgtatataaattgaatgagccgcttctcagtaggactgataacaggatgatggttagggtgacttcatatgaaattgttcgggcgacagcttgtaatgcaccgattagtgcatagtttgaattggatgcccatcctgatcatcaaatagagtagatggctaggcttgatgtggctagaataaataggaggcctatattaaaattaattaaagggtctggaatagggaggggagttcacaaaagaagggcgatagaaagggctagggttggagcagtaatatagagggcaatagtagatgttgagggttgtaagggttctttggtgaaaagttgtattgcatcagcagatggttgaaataaatagtccgtagggtgttagattgagattaacatcatctatagtgcgagggcactttatgaagtaggccctatttttcttgtcctttcgtacagggagaaaaacaaaatagagagaaacctgttggagaccagcctggccaacatggcaaaaccccgactctactaaaaatacaaaaattcaccagacgaggtggtacacgcctatgatcccaggtagtcggaaggctgaggcaggagaatcacctgaaccccagaggtggaggttgcagtgggccaagatcacgccactgcactccagcctgggggacagagtgacactttgtctcaaaaaatatgtatgtgtgtgtgtgtgtgttcatatatgtgtgtatatatatatatatatatatgtatataaaattttaaaaaaacaatagaaacaaatggctgcctgggagtggtggctgcggggcactcccgtttgtgtggcccaggtcatgtccctccctcagccctggtctctcttgcctcctgcagggctggtgaattaccagatctcctcaagtgcagcaaccagatccagttggaagtgcatcttttggaggcagaaaacaaagccatggccactggggcctttactcagggccagctgaaggtaccgggtacaggcaggagcctctggtggccttacctgatgcacgaacaccccccggtctgtactcattggagataatggtggtttggaacttggttaagggaggtcttttgcccccatctgggcttcagcaggagcccaggacagatgaacggccaggcgtggtcctctgagctttctgatatttcccacccttggtgggaggcccagtttttgtgtttttttttttgagatggtctcactgtgtcacccaggctgaagtgcaatggcctgttcacagctcactgcagctttgagctcccaggctgcagcaatcctcctaccttggcctccttagtagctgggactacaggcacatgccaccatgcctggctaattaaaaaaactgttttggtaagccaggcgtggtggcttacacctgtaatcccaggactttgggaggctgaggtgggtggatcacatgaggccaggagttcgagaccagcccatccaacatggtgaaaccctgtctctactaaaaatatgataatttgctgggcatggtggtgcatgcctgtaatcccagctacttgggaggctgaggcaagaattgcttgaacttgggaggcagaggctgcaatgagttgagatcacgccactgcactccagcctgggcgacagagtgagactgtctccaaaaaaaaaaaaaaatttttttttttatagagatggggtctcactctgttgccaggctggtcttgaactcctggactcaagtgatcctcctgccttagcctcccaaagcgtgggaactccaggcatgagccacctcatctggtcaaggggaaggcccagttttgaagggcaggtcccggggtcagccagggaagggcagagcctctgattgctgcatctctgcttgcaggcccaaggcggctgctggggtgcacgaggggccttcctgccagagggagggccggatggggctcaggctgtcggggtgctcacacctggcgctttggctatcttaggtgcggctgactgcacagacgtcactggggcctttgtctgacttctacacactccctgtggggatccgcactgtggctgtcactgagagccagttcttcatcaacgggaaacctttttatttccacagcatcaacaagcacgaggatgcggacctgcgtttgtgctcctgggtcstcgttggggctgcttctggtcaccttccacttttgccttccgtatgtcccacagttgagggcagctcagggcaataaggcaaatggctccaaactgccccatggtggagccggtgcttgggctggagagggggctcatggggtggctctccagggtcctggctctcaraggaagtgcagcttcgacaggggcaggggtcactccactctgctgtctcctagatcctagggaagggcttcractggctgctgctggtgaaggacttcaacctgcttcactggcttggtgccaacgccttctgcaccagccactacccctacgcgggggaagtgctgcagatgtgtgaccgctatgggattgtggtcattgatgagtgtcccgcygtgggcctggtgctggtgtgagtccccaccacgcacccgctccacctgcccagcccgcagaccgcaccatgaccctctgtcccttccctcctggcccacaggcagcttttcaacaatgtgtctgtgcatcaacacatgtgggtgatggaggaactggtgtgcagggacaagaaccaccccgccgtggtgatgtggtctgtggccaacaagcctgcatcctacctggaacctgccggctactacttcaggtgagtgccccctggctgccctgggctggatcgggaaggagaccctggcaggtggcaggctggggtgggtttgtgctgtttgagaccagcctcctgtcccagcctgatgggagtgccgtccatacccagacasttcaggggaccaaatatctacccacccaagttgtggttttctttttctttgttttkttttkttttttttttgagacgtggtctcgctgtgtctcctaggctrgagatcagtgacatgatcttggctctctacaacctccgcttcccgggtttaagtgattattttgcctcaggctcctgagtacctgggattacaggcatgcrtgagccactgcacctggcctgtttttttgattttttttgtttttttcgaaacggggtctcactttggtctcccaggctacagtgcagtggtgtgatctcggatcactgcagcctcgacttcccaggcttaggtgatcttcctgcctcagcctcccaagcagctgggattatagatgtgtgtcatcacacccagctactttatacttattttttatttttttgagatggagtctcactctgttgccaggctggagtacaggggcacgatctcgactcactgcaacctctgcctcctgagttcaagtgattctccagcctcagcttcccgartagctaggattacaggtgtgtgccaccacacccaactaacttgcatttttgtttgtttgtttgttttgagatggagtctcactctgttgccaggctggagtgcagtggcacaatctcagctcactgcaaccttcacctcccaggttcaagtgattcttctgcctcagcctcctgaatagctgggactacaggcttgcgccaccacacctggctaaattttttttttttttttgtgatggagtctcacaccgggctaatttttgtattttcagtagagacagggtttcactatgttggccaggatggtctcaatctcttggcctcatgatccacccgccttggcctcccaagtggtgggattacaggcgtgagccactgtgcctggccaacttttgtgttttttagtagagacagggtttcaccatgttggcaaggctggtcttggactgctgacctcaggtgatccgcctgcctcagcctcccagagtgctgggattacaggcgtgagccaccgtgcccagctaatttttgtatttttagtagagacagggtttcaccatgttgaccaagctggcctcgaactcctgacctcaagtgatccacctgcctcagcctctgaaagtgctgggattacgggtgtgagccactgcgcacggcccccttttcttccttataatcgtgcagttctaacagcgttcagaggtggatttttcacttgtggtagaggcagcagaggttgtagaaatgtttcttgagacagacaccacaccccaayttcatggagtgctttgggctgagccaagtctacagcaggcagaaggctctgagaagtygtcccagcctgggcaaaggacaattcagagctcgggggcatggggtgtgctcagcagtactgggtggacaacgttttttgcaaaagtgaagagttcaggcttccaggagcggatgcctgaggcttccagacaggcttctttgagcggtggccagaggagatgcctgtttttcagggtaggaattgaagggagttgcccaggctggagtggttcagccaggctgtcacaaggctttgaagcttcccatctgagagcctggctgttggatagtgcaggtttggaacttgaggctgggagattctgttccatcatgtgccagccacagcctttggatgggcagagcagtgatgggggagggtgtaaaagaagaaataaactgaggaaagagaagaggaaaacaggcttcaacaacaatctaggctgggcayggtggctgacgcctgtaatcccagcactttgggaggccaaggckagtggatcacctgaggtcaggagttcaagaccagcctggccaacagatagtgaaaccccgtctctgctaaaaatacaaaaataaaccaggagtggtggcaattgcctgtaatcccagctactcgggaggctgaggcaggagaatcacttgaacccgggaggtggaggttgcagtgagccgagatcgtgccattgcactccagcctgggctacagagtgagactctttctttcaaaaaaaaaaaaaaaaatctgtactgtgcaggcctcaggtgggtgccagaagctctgagcagggactgatccctctgttgggtttttcttccctttatccctcctggttaacttgactcggcataagggccatttcttctaagagtctctccctgactctccaatccaagttatgtttattgtcttgtagataccaattcctgccaccactcgtcatttccattggcaacatttctttcattgtttgtttttcagagttggtcttgctttgttgcccaggctggagagcrgtggtgtgatctcggctcactgcaacctctacctcctgggtttaagcaattctcctgcctcagcctcttgagtaactgggactagaggcatgcaccaccatgtgcagcctatttttaaaattttttatagagatggagtctcgctttcaggctggccttgaactcctggcctcaagtgattctcccgcctcggactcccaaagtactgggaatacaggcatgagtcacacaacgcatggctgacaagattcctattcagcgtctgagcacggagaagactcccttggcctggggcaggtgaggtaaacctcctcatagaggggacagttatgaggacgctcatagctgtcccctctatgaggaggtttacctcacctgcctcaggccaagggagccttctccgtgctctgcccctgttgtagcctgaacctggctctccctgcgttctcaccaggcactgtcrttatttctttggctctctctttggactgtgggctcaggagagagaaggagttctatttattgttgcttcctaggtactctgcaatatctgacacagcacgtgctatatgatacctgttgagggcttgagggcatgggtgagatcacagagccatgtttaatcactcattttgtcctctttatttatgtatttatttatttttatttttgagatggagtcttgctctgtcacccaggctggagtgcaatggcgtgatctcagctcwctgcaacctctgcctcctgggctcaagcaattgtcctgcctcagcctccaaagtagctgggattacaggcacccgccaccatgcctagctaatttttgtatttttgtagagacggggttcccaaaatcctagaattacaggtgtaagccaccgtgcccggcctgttctcattttttttttatccatctcatttttttttcctcaccaaagatatgttgctttgtcttggggtttttttacatgtgaattcctgaacctcatccagcccctcgtcccctccccagccagctcacactcgtttgtcacagctcctgggactcccattgacatacaggtaacagccacccacagtggactgtgctgttctgtttgcacccttaaatttatcatgattacagaatgccacttctgcaaactagtcaagtagggggaagtggctcatcgatatgcatgcttgctcatcctctttgaaaaggtaaccagctctgaattcttttttctttgagacggagtttggcacratcttggctcactgctacctctgcctcccaggttcaagctgttctcctgcctcagcctcccaagtagctgggattacaggcatgcgccaccacgcccatctaattttgtatttttggtagacatgagatttccccaccatgttggtcaggttggtcttgaactcctgacctcaagtgatccgcctgccttggcctcccaaagtgctgggattacagacatgagccaccatgccctgcctcagctctgaattcttaagaaactcttgagagggtctaggtcagtgctgatagaacctctgcagtgctgggcgtgatggcttacacctggaatgctagtactttgggatgccaaggtcagaggatctcttgagcccaggagttttgagaccagtctgtacaacatacaccccatctctacaaaaaatttaaaatgagttgggcatggttgtgcttgcctgtagtcccagctacttgggaggctgaggtgggaggattgtttgagcccagtaggtcaagactccagtcagccatgattgcattgctgtactcccacctgggtgacagagtgagaccttgttttttttaaaaaaaacacccttgcagtgatggaaatgttctgtatttgcactgtctgaaatggtagctattagctacacgtggctattgaggtcttgatatrtgactaggataacygaattgatttagtttaattaaaaaagattttttttgagacagactcactctgttgtccaggctggagtgcagtggcataaccacagctcactgctcgacttcctgggctcaaccactcctttctcctcagccccctaagtagctggaaccacaactgtgcacccccatgcctggctaatattttgcctttttgtaggactgggtctcactgtgttgcctaggctgctcttgaactcctggtctcaagtgatcctyctgcctcracgtcccaaagtgctgggataccagacctgagctaccatgcccagcctggtttagtttaatttcattttacatgtatgtatgtatgacagggtctcgctctgtcactcaggctggagtgcagtggtgtaaacacagctcactgcagctttgacctctggggctcaagcagtcctcccacctctgcctcccaagtagctgggaccacaggtatgtgccaccatgcttggctgatttttgtgttttttgtacagatggggtcttgctgtgttacccaggctggtcttgaacacctgggctcaagcaatcctcccaccttggcctcccaaagtgctgggataacaggcatgagccactgcacctggcccaaagacgtatttttacctgtagtgtagttcagcctttagactgtaccagcagatagaggtggaaaagtaatgtaaagcgaatatcaaattacatttataaataaagcagttgctcattaaggttgtttttttttttaaacctccttttttattctgggttacatcattccctggctgtctttaccccagcatcagtgagtcctgcagtcactatagccccctgygargacagatattttggtcaccatcaagtggatctttatttttatctaacatttacaattctgccatttctgactcttagaatctctttgccttgaataccagggtccacctctgatgttcactgaagagtaccagaagagtctgccagagcagtaccatctgggtctggatcaaaaacgcagaaaatacgtggttggagagcttatcgggaattctgccgatttcacgactatgcagtgtaagtggcagtttggctcatgggataacgtacctgtcctcattttttcaggttgccttgccaattctggccattttgattataagaatattggaaacaaaggagggaagctggcttactccatgtaggttgcattgagaattttctagaaaaagtaagttgtgcttagaaagtaggagagcaatcaggcccccgcctcccaaatacggtcaaaaagcaaacaggagagtgtgctatagtgagacggaaatgactagcttgcctttttctggtctatttcatagccaaggaggaaggaaaaatgggacctcattatggatttacttttgggacacactcattattccacagtagggtacaaagcctaagaggcttaaggtatttcagtctgttttatattacttgcaaaaagcaggctgattgaatataggtgagtttcaacacgtcttgaatggggtagcatttaaaagtcttcaggctgggcatggtgctaatgcctgtaatcctagcactttgggaggccaaaacgggaggatcgcttgaggccaggagtttgagaccagtctgttcagcgtagcaagacctcatcatctgcaaaaaaaataaacgaattagctaggcctggtggtgtgtgcctgtagtcccagctacttgtgaggctgaggtgggcagatcgcctgagcacaggagttggaggctgcagtgaggtatgattgcaccactgcacgtgagcctgggtgacagagtgagacctgtctttaaaaaaaaattggtcttcaaagagaataagatctgtactctcacgtgcagatggatgaggggctgccaagataaaatcttccagcgtagttgttctcagactgtcattcttgcccattataattaccacccaggaacttggtagaaatgctaacttttggctgggcgtggtggctcacgcctgtaatcccagcactttgggaggccgaggcaggcagatcacctgagtttgggagttcgagaccagcctggccaacatggagaaaccctgtctctactgaaaatacaaaattagctgggcatggtggtgcatgcctgtaatcccagctactcaagaggctgaggcaggagaatcacttgaatctgggaggtggaggttgcagtgagctgagaacgcgccattgcattttggcctgggcaacaagagcaaaactctgtcttaaaaacaaaaaaaaaattaataataataatgcctggcgcagtggctcacgcctataataccagcacttcgggaggtggtggcggtaagattgctggaaacccaggagtttgagatcagcctaaacaacgtagtgagaccccatttctacaaaaaaaaaaaattagccaggaatggtgggacaagctagttgtcccagctaagtctgagggaggaggattatttgagccgggaggtcgaggctgcagtgagctatggtcaaagcactgcacttgagcctgggcaatggagtaagactctgtctcaaaaaaataataaagttcgaaatactgtaagaattaccgaaatgtgacacaaagacaccaagtgagcacatgctgttagaaaaacgmcgccactaccctaactcaacacaggttgccacaatcctctcatatgttaagaaatggtccagacatggtgactcatgcctataattccagaactttgggaggctgagatgggaggattgcttgagggcaggagttcaagaccagcctggtcaacatagcgagaccccatctcagtagttttaactattatttatatttttaaataaaacaaaactatgttaagaaatgcaatatctgtgaagcacaatcaagtgaagtaaaagaaaatgaggccgggcacggtggctcacgcctgtaatcccagcactctgggaggccaaggtcggtggatagcctgaggtcaggagtttgagaccagcctggccaacatggtgaaacttcgtctctatgaaaaatacaaaaattagcagggcgttctggtgcatgcctgtagccccagctactctggagggtgaggcaggaggatctattgagccccagagtttgaggctttattaagagttattatgtcactgtattccagcctggctgacagaatgagaccctgtctaagaaaaaaatcataaaatggtatattaaggctgggtgcggtggctcatgcctgtaatcccagcactttgggaggctgaggtgggcggatcacgaggtcaggagttcaagaccagcctggccaacgtggtgaaaaccccatctctactaaaaatacaaaaattagccagacgtgttggtgcacatctgtaatcccagccactcgggaggctgaggcaggagaatcacttgaacctggaaggcggaggtggcagtgagccaagattgtgccattacactccgtccagcctgggtaatatattgggtgagactccatctgaaaaaaaaaaaggtgtattaataagtatgctaatctactagagaatgctgttaaatgacaagtagtccacaattccctacaacctcattttcactggaagttaaagttaggaagtgttaagaattctaaacaatgtacataattgacctactaaatataataagggtgaaaggaaacgactgtatgaaaagtatgcaaagaaaatatgtttttaataagtaacggtatgaggtacttaggacatgtttccattaatgaaaaagagatggcccggcacaggggctaacgcctgtaatcccagcactttgggaggctgaggcaggtggatcacgaggtcagaagttcaaaaccagcctggccaagatggtaaaaccccacctctacaaaaaatacaaaaattaggcagatatggtggcaggtgcctgtaattccatctactcggcaggctgaggaaggagaatcgcttgatcccacaaggcagaggtcgcagtgagccgagatctagctactgcattccagcctgggcagcaagagtgaaactctgtctcaaaaactccccccaaaaaaacaaaacaaaatctctctgggcttttcttcagggaaggcgggagaaaattgtaacttttagttttgctataatgttcagctaattttgaaaagaaaataaaatcacagagctgaaaagattgtttctgatgaattctggtacaaagcagaattacagtttaaatgtttgttcataaaacattgggccaagcgtggtggctcacgcctggtatcccagcactttgggaggctgaggcgggcagatcacctgaggtggagaactgaagaccagcctggccaacatggagaaaccctgtctctactaaaaataaaaaattagctgggcatggtggcacatgcctgtaattccagctactctggaagctgaggcaggagaatcgcttgaacccaagaggtggaggttgtagtgagtctgaggtcctaagattttattttccttttataatacagacatgaactaataaaaaatatatatttgtaagatctgagagctacagtgtaaaagaaaaaagagcacacaaaaaaatacacacacatatatacacaaacacacatatattgtctctgccactgtttcctggtgcacagctcctgaaacccttggaatctccaaagtagtaagtgtctttgtggatgctaatgagacgactgatttctggtgactcctgaatagtctcaaaatgaaaagtagttgccaggggaaccaacctcgtgattagggggtaggaactttcagccccctgcccccagatttccagggatggagaggagctgaaggtttgagttgatcaccagtggccactgatttaatcagccatgcctatgttgccatcgcgggtggtacatgcctgaaatcccagcactttgggaggccaaggcaggaagatcgcttgaggccaggaatttgagatcagcctgggcaacatagtgagaattcatctctacaaataaaaaaattggccaggcatggtagcgcatgcctgtggtccagctactcaggaggcggaggtgggaagatcacttgagtccaggagatcaaggctgtagcaagctatgattgcaccactgcatgccagcctgggtggcatagacccctgtctcaaaaccaaaacaaaacaaaaaacaaactaaaaaccaaatcatgcctgtgtcttgaagtctccatgaaactcaagacagcggctgggctcggtggctcatgcttgtaatcccagcactttgggaggctgaggtgggcagatcagttgaggtcaggagttcaagaccagcctgggcaacatagcgagaccctgtctctttttttttaatgaaaaaaaagtaaacatggggcagaggaaagagtcagatatgcatttgtctcaggtgagcagagggatgaccttggggtctatcctttgtcctgcaagcataagctatcaatttacattttcagggtgaaatgcaacagaactattctaaggtcaaaatcttgaggcccataaggaatttccttgtgggtaaattttgagggaggtgtgtagcttttaaaaaaaaaatctttgtagctatctatttaggaacagaatgggagaggcaggtttgtatgatccagtttccagcttgacttttgcctttcacttagtgagttggtggtcctgagatttcttttcctttcactgtcattattcagggaagagggtatggtcttgacatcaaaatttcttgggggagaaatctaccagggtttggatgaggccagactgatgatgctcattcagtatctcaaacccagaaagatgagttactgacattgaatatgctaaaggaaaacaaacagttctgttgaatttcttggatttcatctaaaacagttcaggttttttgtttttgtttttgttttcgagacagggtcttgctctgttgcccaggcttgagtgcagtggtgtgatcttggctcactgcaacctctgcctcctggttcaagcaattctcctgcctcagcctcctgagtagctaggattacaggtgtgcactaccatacccggctaatttttgtatttgtagtagagacagggtttcaccatgttggccaggctggtctccaactcctggcctcatgcaatccacctacctcagcctcctaaagtgctgggattaaaggcatgagccaccatgcccagccaaaagagttctgttgaatttcaccctgaaaacataaatgaaaaacttgtcttcacaggtaagggacaaaggacagaactaaaagtcatccctctgtgccccggagacaaaagcatatctgactgcttcctgtactttgtgtttatttaccttatgtaaaaatgcagattcactgagtgcaagatgaatgcataattgaatattcttccaccctttcctttccacatgtaaaatgtgaattctgtaaatgctgatcaaagactcaaaggaacacaattgcttgtctcttcaatttgctttccctccctgctttttttttttttttttaccttcccctactgcccactctttttccctttatttatttgtttatttatttaagaccaagtcttgctctgttgcccaggctggagtggagtggtgcaatctcggctcactgcaacctctgcctcctgggttcaagcaattctcctgcctcagcctcccgactagctgggattacaggcacgccccaccatgcccaactaatttttatgtttttagtagagatggggtttcaccgtgttggtcaggctggtctcaaactcctgacctcaggtgatctgcctgccttggcttcctaaaatgctgggattacaggcgttagccaccaagcccggcctctttttcccttcaaatatttaagtctccaagaccctctttggaagaaaagcatctattacaaatgtttcctgtggtttttattcccttttccctcccattgcgtcctcaacattggcgaaatgacctctaaaaatgactgagacacacctcaggaattttctttgatttacaaatgtttaccaaatttgctttgattcagcaaaacacaatagctaaaaacaaggatatcagaaaaatgttgaatgaccggctgggtgtgtcgtctcacacctgtaatc
